United States Patent Application Publication US 2011/0014706 A2 - sequence listing, part 5

SEQ ID NO: 6540 - DNA, 4107 bp, Arabidopsis thaliana landsberg
gcattttgatatagttgaatccaaagctgactaatttaagcatcattattggtttgagaatcacaaggaggatcaaagggactaaaagctctataagcagaaatgacagagagaaataagaaaaagaaaagaacaaagacatgaagtcccaaagcaattgtgagttttgaacaataatgtggataagaagaacacatttcactccatgtcactattttgtctcctttgttaagtagatacactatctctgttgctcctgctactgatgttgtcatcacataagctaaaaccttcatacacccaaaaaaatataaaaacattattaactaacataagaaattgcatactagatatttgataaatgattgagaagataattttaaaaaacctggtcaggaataaagaagagccaagctttggagactaaacatgtgacccatgaagaaacagtagagagcagagcataaatagcagatatggcactcacaccaaccatatacctacaaattataactaattaattaataattataaaatacttactaaaaagttgaaagaaagtaaagagtatatgtttacttgagacccatgatggagttgtactctaaattgccgtagtccgggttggattcgtggttagtgacagttaaccagatggttgcaacactgagaggaaccacacttagtctgagacatgaatctatgatcttcaaagacataggagcttgtggttgttgctgctttgaagaactgcttctctcttcttctcttgtgttgttattgttgttatctctcatctctggttgattggatctgaaaatcaaattttttttttttttttttggtgtggttttggagaggaagaaagctataaaaattgttgaatagcttcaagtggatttctcagttagattatctatctctttatatataaaataaatatatagatatatgtgtttgtggtcacaatacatataaaaacaaactataatagatacaaaaaagttcctttaacttctactctttttatgattaatcttttaaaaccgcgtggaaagaaagaagaagaagtgattttccatacaaaaacttacaaaatgtgaatatggattaaagttttttcaccatctccggattgtaactttatattattaaagttagaaatttgctttaaatcgttaatgattttgataaattttatatttttattttatttcgagtggcaccaaaaaatttctggttgtggaagtgacatggacgaggcaagtgcggtggttgctggtagcgagagagatcgacatttggcttgccttggtgggcagtgggcttcatatgaatcatcatggctttggattattagttttacttgagataaccttaagaattgagatgcttattatttttaaaatcgttgctaaatattagtacgttctttacataaagtgatgacattagcattagtcaaggtgatgtcacatcatacttctaaagaattctgcaacaacaaaattaattgaccatagggagtctgcattttacattgggttttcagatttcgccattttggtttaagtttaggtttgattcagtgagaaaaatatcaaaatcaaacataacttcatattttataattcggtttgagtttatagctttgaatttacgtcggtttggttctatcgaccgtggtttattagctttagttggggctcagtttggtttatttcaaaacctactaagatatatgggtctacgtcgacaaaacatgaacgaaaacaatatcaaataggctacgagttgtgttttcacatcatgtttcattattttaaaagaaacaatttgtgatttggttggtttattcgaatctagtagtttggacgactcacgtttatgtaatctcgtgatacgagaacaattccactcctttcaaaaaagtggttctctctctcttttacctctattttgaggttgatttatcaatgcacatgtggaatagttgtagtacttgatgcattaaatttatacataatggggagatattgaaaaagtagtaaagatgaaggatttgacaatgaagagagttaaataaaactttgaagggtagaaagtgaaagttatgaatggtctcttacatataacatacatatgtacttggggatatcaacatcaattaataaccgattgcataatcagagggtaaagaggttcagttggatcaggattcaagttcaaccatatgggctgcgacgtttgctaaaggcaacacatagataaccatcattacccattagaacaaatgaaagaaagcatatagataaaacttattaacatcgaatgatgagactaaataaaccaagaccaatgttccatatgcggtaataccaccaagcaaatgaaatctgttaacacccatcgacaaacataggtaaccatttggtctgagacaatagcgtctgataatagcagaaggcaaacatttttacccatcacaacaaacagagagataatcaaaacctatagatttgagatgtttagattaagcaaagcagagaattgactgaggtaacatagcctatgtcaattacaatctaacaagatgataacaaatttgagaaaaatatatgtagtcttatatcattactcttcgaatctttaagtgtttggctaatctttcaaaacagttacaacacttagagttacatatacatcattaagaatcccaaaatgatactcatgtaagtgttcattaatatgtagtgaaggaatatatagtcaaatccaaatcgtaagatatcaaatcaacacaaacattaaattaacaaagataaactcatcaattgaaaacacacaatttattgataatttaatgattcatatagtgagtcttatgatagtattaaactttttacccgaattgtatcatcagattacagatttggtagaaactagtttaactcaatgagcaataacatcactactgggttcaacaagaactgaatttataggaggattgatattcatcatcatcatcgacgagacagatctagcagcggctaatttcttcctctgataactgtaaggaccatagatctttcttagaagatgtggtacctgatctatcgtcagattccgcgaagccgctgctgcttcatcaacagagttctcagatggtgaaatcggatctactagttgcgagagggaggagcgagatacgagagatgtagtagatctagcgttgattcttgagtttcggatctgagcaagcgctcctggttttaagtagcggtggaatccgtcgcttcttctcgccggagatttagagatatccttcatggtaacgatttggttaagcttggtgaaagagattgaagaatctgatgatcgagagagcgagaaagagattgtgggagatatgtgattgaagattggggatctacggatttttgtaatcgagtgagagcggcgggaaaatcggcgttaggggggaaatacgagtctctttagggtttcaaaaagtcgccaagagcgggagtttctttttgagtcacgtggtattgacacgaaccgggtcggatcctatatccaatcgggtcctatgttgcccttgtgggctacgcgtgtcgcgtgagagcaactattctctgcctactcacaactattctcaacgtgaactttctaacttgttctccaatatccaactatataaggacacgtgtctaatctcagagacacataaatatctgcggctaaaaatatcttattagccgcctatttcataccaccgtttgattactttagccaccgttgttttacgtctataattaagtatcttccactaatctcatatttcaaactgtacttttacctcgagctctctccaattttctcatagctctattgttcgaaaattctgaaacgaacgttaccactatggacactaagatcggatctatcgacgcgtgtaacccgaccaaccacgatatcggcggtcctccaaacggcggagtctccaccgttcaaaacacaagtccacttcactccaccaccgtcagcccctgcgacgcgactcttggccgttacctagcaagacggttagtcgaaatcggcgtc

SEQ ID NO: 6541 - DNA, 1804 bp, Arabidopsis thaliana landsberg
gtattattttcattgccaaattgtagtacttgcaatataaatataacgaatcggtctacgagctaaggcacaaaagcaatcatcttctcttttcactgttctgtttctccctctctctaaatgatggcaaacaactgtaatttagtcagtgttctatgtgtaattttggtattgaccctctttcacaaccccatcactgtcgccggacagaatagtccggtggtcgccttgttcacctttggtgactccaacttcgacgccggaaacaaacagactctcaccaaaaccttagtcgctcaaggtttctggccgtacggaaaatctcgagatgatcccaacggcaaattctccgacggcctcatcactccggacttcctcggtacgacttcttttctaatcgaatcctactctaatctttaaaacattaagtatgttaaaaatagtatgattacgtaaaaataatcataaacagtagtatttataaatgcattttaagtatgctactagtgaattacttaaaaaatagtaaatagtatgattaaaaaaaaattataaatgcattggttcagcggctattcacttttcgggacacattctatgaaattttatttattattttcgtcaacagattcggagatgtagtacaaggaatgatttgatattatatgaaaaactaaaatatttttaaaatacaaaatgcagctaaattcatgaagattccgctcgcgatcgcgccggcgcttcaaccgaacgtcaatgtctcacgtggagctagtttcgccgtcgaaggtgctactctactcggagctccggtggaatctgtaagtaaacttaatttcttattatataagagtcatgtatatatctatagtcaacacctaattcaaaagaaaatcaattatatctgtctattattgacccggtcatactaagcgggattctttttgttttacttcacagaaaagcatgtgacttaatatcaataagctttactttaattgcacttataatattggtttaatttttgtctttttctcttttttggttctttagatgactctgaatcaacaagtgaaaaaattcaatcaaatgaaagcagcaaattggaacgatgatttcgtagcaaagtcagtatttatgatatacattggtgcaaacgattacttgaatttcaccaagaacaaccctacagctgatgcatctgctcaacaagcttttgttacttccgtgaccaacaagttaaagagcgatattagcgcgttgtattcatcaggagcgagtaaattcgtgatccaaaccttagctccattgggttgcttacccatcgttagacaagagtacaacaccgggatggatcaatgctacgagaaactcaacgatttggctaaacaacacaacgaaaaaattggaccgatgttgaacgaaatggctagaaactctcctgcatcagctcctttccaattcaccgtctttgatttctacaatgccgttcttactaggacgcagaggaaccaaaacttccgtgagttggttaattataatggtttactttcatttgttttcattttataacttctaataccatgtcattaatatttgtcattcttagggtttttcgttacgaacgcatcgtgctgcggagttgggtctcacgatgcttatggttgcggtttacctaacgtgcattcgaagctatgtgagtaccaacggtctttcctattcttcgacggacgtcacaactccgagaaggcgcaagaaatgtttgctcatcttctttttggagccgatacaaatgttgtccaac

SEQ ID NO: 6542 - DNA, 1415 bp, Arabidopsis thaliana landsberg
cacagacattcataggtttataacatttggtccgctccaaaagataagatgtgagaaaacgcttcttgtgccttctttttttaattatggaattaccttttaatatgtggtgacaaaaaaaagaaataaatttatgtaaaagttttgtttcttttaaataaaagatttgcaaggggtaagagttgcagagatcaatcttttattatggaggaaactcactagagaaacatgaaaacattggaaattaaaactactcaagattccgatattgatccagttataatttgactcataacccttatagaaaccccgatcgatccctaaatattgattttagagactcagtaatactcgtaaccgcggctctcccttagttgaacggtggctgacgttgggggcacccaagactcacgcataggttcatcggcagggtaaacgacaagctcacggatgttcatcggttggataacatttgtatcggctccaaaaagaagatgaccaaacatctcttgcgccttctcagtgttatgacgtccgtcgaagaataggtaagaccgttggtactcgcatagcctcgaatgtacgttaggaaaaccgcaaccataagcatcatgtgtcccaactccgcagcacgatgcgttcgtaacgaaaaatcctaagaatggcaaatattaaacacatggtattagaagttataaaaaaatttaaaaatgaaattaaaccatgataattaaccaactcacggaagttttggttcctctgcgtcctagtaagaatcgcgttgtagaaatcaaagacggtgaattggaaaggagctgatgcaggagctgttctagccaattcgttcaacatcggtccaattttttcgttgtgttgtttagccaaatcgttgagtttctcatagcattgatccatcccggtgttgaactcttgtctgacgatgggtaagcaacccaatggagctagggtttggatcacaaatttactcgctcctgatgaatacaacaagctgatatcgttctttaacttgttggtcacggaagtgacaaaagcttgttgagcagatgcatcggcgttagggttgttcttggtgaaattcaagtaatcgtttgcaccaatgtatatcataaacactgacttcttcacgaaattcatgattccaatttgctgctttcatttgattgaactttctcacttgctgattcagagtcaactaaaaaaacagaatagagacaaatagacaaaattataattgcagttaaagtcagatgtctttaatagaacacaaatatgccgtatagtttgatccaggctagtccataagacaggtcaagcacatgctttagaccagaagatatatactcaatcattcgccacgaataatgccaacagtcatttggtataacctttaatat

SEQ ID NO: 6543 - DNA, 2910 bp, Arabidopsis thaliana landsberg
  unsure (1)..(2910): unsure at all n locations
aaactttgcctctcaatggcgacagagtcaagctccagcttattcttgctgatcttctacgcaacattgtgaatcatgcgccgtttccaaatagttgggtaggtatcagtatctcaccagggcaggagctttcacgtgacaatggtcgctatatccatctacagttcaggtaaacgtcaacagaaacaactgaaaacaacttcttttcacaatgcagccgttttgcagattttgatggtttttaacttaaaacgttcgatgttgttttatgataggatgatacatccggggaaaggacttccttcagagatgctaagtgatatgtttgagactcgagatggatgggtcacccctgatggtttagggcttaagctttcgcggaaactattggagcagatgaatggccgtgtgagttatgtccgagaagacgaacggtgtttctttcaggtggatcttcaagtgaagacaatgttaggtgttgagtcaagaggaacagagggtagttcaagcataaagtagaaattttgagttacaaggcttataaaatttaatgaaatttggtctcttaccaaatgtattaattagaacaaaggtacattatttattaccaccaataagattgtatcttaactatcctatgtatacaatttggagagatcatttggccaaccagacaaaagtaaaacacaaccatcaattcacatgtctagaacaataattctttctaattctggataccagcaaactagaaggaactgagaaaaccagaaatgtttctaaagggtactatgtagtagtttgttgttgttcatcatcatctcatcctagaaactgatatttacgttttaaaccagaggcaataacgtgattcacttgactgtcagctttgatgtgtgttctcgccaacaagaggatgagaaaccgttgaatttgatgcctcgagctgcgaattcttccggatgatctagtttcaaatatagatgtatgagtcaaccagttcatcagataaacacagaaaagataaatgatcattttaagatcatgtgtttgttgtaagagattgtttaccggatatttagattctgatccatcaaagacaataggttggcatctcctatcttcattcatcaaacttgagttctgaaagtgagcaataagcgcagctttaccttggattcgtgcataagccaatgaagcaactttctcgctgttgaacttatcccatttctttccattaaaggcctatgaaacagatcagaagcataagtttatccccaaaattttcactctctgagaaacaacactaaagactcaatcaggttttgtacctcgtacaatgcaatggtgaatttaggagacaccatattgataaatgcataccccacattacatttattctgcacacaaagaaaccaaaagagggcattatagaattcagatcaagtgatgtcaaagatataacaaacaaacctaaatggtctttaccttgaaatcaataggcaaataaagaaaatcataagttccactgtttttctcgtcgatggcagctaagagcatattccgggtatacctgagaacacggaaaaaatatcagttctttcaggtcgcaaaacggtaaactaaccggaccacagcaaaatcaaaggatactcttacttatttgggatgttttttatcatcaaggttgtccgtggatcttcacccctcataatcttactcaagtcaagctgaaactgtatcttgatgtcggcttggttaccgttactatcaaactgttggttgcttccatcctccaatgggtcgtcaatggaaaccattgtagcagcaggccagaggtaagagccattgcctgtaaacaattgactacgtcttggagcagacaacattttaaaatttggagagctagtttcacgcaagttcctttgagcattcatattaccacttgctcctcggaaagccactgaacccattgatgaagtttcaggggacctcgggaagaatccagatggcgcagatccgatatgatgaagctggtggagggatccgttctgagctgnnnnnnnnnnnnnnnnnnnnnntctgtttgaagagaatggattcacaggccaggctgaagaactagggcttccccacaggaattctgatccagataatgtttctacatgactcgggtgtgagttcaaagaaccaaatgaagagacagatccaaacgactgcggttgctgaaaggtagaagctttgtggcttgcattattatagctgctacttgaaaacaggtgatccaagtggctaaaccttcttccttcttggtcattgttcaccgatgcagtcttcatcgaaaattctggataacggatgttctttgttggactcaagtttccaaatattggagacttactgaaactttgtagaggatgatcaataggactattacgccagtttcctattggagagcttgccaaaggcgactcgacatgattcaggtagctgtaggaatcatcttgttccaattccggattcatttgcaacatcatgctgagagaagaaagcaaaacagaaaattagtccacagtttctttaaagtcagtttctttggtatcagtaaactcactttcgacgagcaccaccaggacgactatgttccagcttgatacgttttccagcaatttctgtcctgttcaaagctttgagagctgcatcagctgatctaacgtcaaaaaattcaacaaatttgtgatgcctcttatttggtgtttcccgtatctgctttgtcagaacaataacttacacaaacgttaaccattatgcaggtcgtgagagaaacctaaaacctcaaaaaaatcaaacagaaacaacagaataaaaacgcatcacctccttgatctcgccataaacaccgaatatattttc

SEQ ID NO: 6544 - DNA, 569 bp, Arabidopsis thaliana landsberg
  unsure (1)..(569): unsure at all n locations
caaccattaaaagtttccaaggaatttgaaacgaagacaggaatcatcattgtttgacagggctatattggggtactttgtaactgcaaatcagagcaaaaacatggtatatttatcctcatattttccacttcaagatgccatatctaaataagaagtgcttatctgaaactataacagtttttactctaacaattctagcccatttcacgatagccagcagtgtccagnnnnnnnnnnnnnnnnnnnnnnnnnnnnnnnnnnnnnnnnnnnnnnnnnnnnnnnnnnnnnnnnnnnnnnnnnnnnnnnnaagaggtttctgataacaaatgatatctccatcttcaatctgtacaccagaaactcatttcaatgaagagaacaaactgtaaaacatcaaatttgatacaatgagattaacattacttgacacagcctgaaagaagtcttcttatcaatctgttcacacattacgcacggttcaaactttatttcctgaaattgggcacaaaaagcaattaaatggaatgttacatggccatatgcatgacgaggaggtagaacttaaa

SEQ ID NO: 6545 - DNA, 919 bp, Arabidopsis thaliana landsberg
atggacgccagttgaaaaccacaagagttccttggttaacatctttctctgatggattatcctataaaatgaaaagatcatctattaaaaaaggagaatacaagaatgatatatataagagaattcaagaatatgaaaccttggggattgagaaatgtatgtcaagtttcctctttttaagcagcttgccttgtaatgctcgcatagctgctctagaagcacggatatcgttataagagaccattacaaatcccctctgcttgcaagctgtatagagagttcggatatgtccatattgctgccaagaacgggaaaacaaacataaagatccaatctttcaccctataaagaaccgatttttgagaatacaaaagagaaattacctcaaaaagagcttgcaattcagaatcctctacgttactgttaatattccgaacaaacaaagtccttgaaggatgttcaccataaggatgttcgccagcaatcgatcccactccattttggaaaatgttttgaggcataacattgtcaacgttagaatcagcaaaacccattcttgagaagcccttgtttagactgtcatatggatcagtctccaattcaagacctcctccgctaccgaataaatcataatcttccaagtcatccaacgtagctggcaaggaacttaagtttaaatcatccattagaccagagaaaagctcttcctcatcatcaggaagcatgtttccgattggatgtgagtcaccatcatcaagcatattgccaatgcctccactaaaatggtctaagccagaagccatttcattaacagactgatggtagctgtcacgagggttgactgcaagagttaaagattataacatcatccaacatatgacgatataaagacgaattacgcaactcaatgtacatactg

SEQ ID NO: 6546 - DNA, 3432 bp, Arabidopsis thaliana landsberg
cgttattccacgccgttgcttcagctgctcttcgttattaccacatttaactcagctgacccacactctgaattaccgttttaaccttatacactcatcgacagttttttgggcccaaatttttataaactgtcactaagctcggcccactagatcatataataactttttttcctagacaaaagaaatacgtatcccgattgttgacaaaaagtcaaaaagaaatccgtttaagtgaatttatcaatttacttagagaaaaaaaaaattgctacgttgtttacaaataaacaaaattgtttcgttaaatctacgtagtttagtaatcgtacaccagctgctaaacagaaacaaagaaaagagaaatcagaaaatgattagcgtttgagcagaggggattccatgaacagtggaggaatctgatcaaaggcctctgcggacgaggtttgggcgggaacatccggaggaggcaaccatgttattggtggcataggtggaaactcatccaacggcggtggaagagagaacactggcggcgtttcgtctccaaatggtggcggaggtagccataacggcggaggttgtgtcgtctgatcaccacctggtagtggcggcggaggagacggcaccaaagggggcggaaacactatcaccggcgggggcggtgaagggaagaagaaaaatggtggcggagagggaggaggaggtgaaggaacgagcggtgaaggaggaggtggtggtggtgatggaaccaaaggcggtggagacggcataagcggtggtgggcatggggacggccttggacgcagtggtggtgggggtgatgaaccaaaggtggcggtagacgtggggatggccttggacgcggtctcggacgtggtggtggacgcggtggttggaatggtagaaaagggttttccgacgaaggagttgtaggaaaaggccaatgacctcaggtgtcgaacaagtattgatacagaggatcgcagcttctgcgtccgcgattacgactgctaccactgctgcgtcttcctctgtttgattgcttttgctcctctacggttaaagcttctacgttaacgtttgacttcacttcataatctgatatggactctgttgtgtgaatgattaaaaggagtagagacaacaaaagtccaaccacgagtagttgttttgctttcatcatctctttgtgttctttggttacgttgtcttcttctttgatagaaaactcctacgtaacaacaacaattgtatatatactgtaagattaatcaaagaccattttaatatactaaattttttgtttgcccatttgatataaaatactacatgaataatgcattatgggaaaatgtagttaggaatcataaatgccgagagaaggatgaggattatcctgataacacaatttattggcaaagtggcagatcacaaaagttaaaaagtggtgactaaaaatgacctcatttatgatcacgcatggtctaaaatacatactttttttttttgtatttgcatcttctttttagtttttccgataaagaatattgcctttctaagtaattgaaagagatcaatatttttttttcactaaatcagtgttgataactaactacataaataaatgattgtgatttattttgtaaatttttcataaaactagtctgagaataaattttggatgtgtgtattaaaaaggctttaattgcttagaatgatgtgccaccgttgtaattgaatgcattgcgccttcacttcatgtttatcttcattttcagcaaaactctattttccttcgagaagttgacttcagtatagctagatgctattgtctattcacataattttagttaagaatgctaatcaacggttgaaccaaaaattatagatgggaggaaatagaccgataacatggattatagatgctattatcatatctctctttggtttctcactctaacagtcactcaacgagtggatccaaaatacatgatattggcacaacatatccaatatctacacaaaatgtttcagatctcctcctttttcacagtaaatctgccgactttgtatgttgacttggccttcacatcggcttcctgataccaacataactttgacctgttagaaattgcgccaatcttctaaaacagttcaacgtgtgatgatatatggccaatgagagacgtacctctggcaggtgcaagtataaactggtcttggcctcatttggcttgtgattttctgcacctttgctccaatcataaccaacctgttattgttaacgcaagcgttactcacataacccacataatctacaaagtgtagtgcttctctggtgtttgcattgtaacaaagctaaggaagagaagcattaccgcatacgcaaacattgccccgtcgtgattgaacgtactgcaagtaatcggctggccacactttgaactagcctgaaataataaccggggagtgaaatatgcgtctgttaggtataagttatatagagcaaactgaagaaaaacacattatgcaacaaagatgcttctgaaaacaccttgagccttgctttactatccttgtcccagaaactgaatgtaccatcagagccagtgctggtatacgtgccatgtatctgaaatgcacaacaaggatgatgaagttagtcgctcatcagtctacaacttgtaaattgttgaatcatagggcttaccgggtgaaaattcagagaggttatagagaaaatagtattgcgtattctgtggcatttggaggtatagtttttgctcacttgtgcatcatcaatgtgatgaacaccaataattcccccaattgaaccaacctatagcaaacattggacctagttatcttaactgtagaatatcagtgatcgagaaaagtgacaagagtacttaccaaaaatcctttctgatcaggaaatgcagcaagacaccttgtctggtcctttagtggcgattcaattctcttcaactcaatctacagtataagaagagacattttaaccatgatatcagctcaaatgtgaagtttttatacaggcttgtaatggaaagaaaaatcacacctgagggtttttcaagtcgaaaactagcaaatttctatccgatgtcccaacgaccatcagagattctttcactgtcaatgcataacatttgtctggaagctgctgggtatgcactggagttccctgccttgtgtcccaatatctagaacggtgtaaccaatatgcttcataacatgctattatgtgagatatttccttatagattgattgtatgatgcagaaatcattcttacttcaaagttttatcccagcttccagtaacaaggagaaacattccaggaaaccaagctatctgattgaaaggagcatcgtgcatagcaacagtagatggttagcaccaggcatca

SEQ ID NO: 6547 - DNA, 1847 bp, Arabidopsis thaliana landsberg
aagctgtttgattatgtctatcgattgttttctggcatgatagaggagaattcattgaagaattatctgacattgtacgtatatcctgagctctagatccttctgttctaatcctcaccaggaactcttcagtattgctggttgattgtgcactgattctatatcggagcgttgcgtattatcctattcattttctcgagaatgcacaactgagatgctgctacttttattctgcagacagataagaccggggatgaacttagacttactgctattgaacaggttctgttcgtttaagcattccataaactttgtttaagcattcattttgttgaagtgtggttgctttgtaattcatgacgaataaggcttgaaggagcctaaacgtattctgcaggatcgagattttaattctgtggttttggcaaattcctctgataaaagtaatgatactgtgcagtctaatgagggagaccaaaaaaactttctctcagaagttgataagggtaatatatttcggatcttgtgttattttgttttgttgtcattatcggggaagctttcttatctttagataccatgtatttcaggaaataatcacaaaccaaaggaggaacaagcagtttcacagaaaaccacagtaagctcgaatgcggaggtacgtagtttaatccagttgatttgaagataaaaggaacttgattatggattagttagaagcaattgactatgagaattctagtatctttttgtcaaatcacaggacactttcttcaatgggatttgctaacacttgttaatagaaaatcgaatttagaatttgcatccagatagtcatagcatatgctttaattttgtaatgtatgttccatttcctgtctcaggtgaaaatttcagcaagagatattcaacttaatcataaaacggaattccgacccccttcaagtaagagtgaaaagaatacaagggttcaacttgaaagagcaacagatgagagggtaaaggagatcagagacaaaattatccaagcgaaagcctatctgaatttggccctacctgggaataactcccaaatcgtaaaggagttgagagttcgaacgaaagagctggaacgggctactggtgatactaccaaggataaatatttgccaaagaggtgagcacagctgattgattcaaagggagtcctgttccatcctgtaaaaagttttggcctttacttatgaagctaaatcttaatgaatattgtgttaatttagaagagtcatacataaatgttttgtttcttttcagctctcctaacagattgaaggccatggaagttgcgttatacaaggtcagccgtgcctttcacaactgccctgccattgctaccaaactccaagccatgacttataaaaccgaagaacaagctcgggcgcagaagaaacaagcagcatatttaatgcagcttgcagcaaggactaccccaaaagggcttcattgtctctcaatgcggttgacaacagaatattttaccctggatcacgaaaaaaggcagcttttgcaacaaagttataatgatcctgatctctaccattacgtagtcttctctgacaatgttttggcctcttcggttgttgttaactctacaatctcctcatcaaaggtaaatgtttcacctttattctctttctttcaacatgttgtggttcagttcctttatactcctgaatttgatatctggacaaatgctttaggcttctactgtggttagtaccatatataggatattgtctagttatgaaactaggaaaaggaagttacattattgtgtgctctttgttcagtgaataacttatcttttt

SEQ ID NO: 6548 - DNA, 2289 bp, Arabidopsis thaliana landsberg
acatattagcaagctcattctccagatatgcttctctctgttttgtttcttctaatatccttcaagctcagcttctctttgttctttttcaccaagtgcagcttcatacgatagctcacgttccttactcatcctcagttctctcttcagctccattgatgggctgtcatgttcttgcctctttgcaagactctctcttcttccattgttccttacatttgttgttgttcctgtcttatttcgttgtgcgattgggctcttctgtgttgccagctcagctgctagtctctcgttctgattcataagctttgcaacttcttcggataatgccttgagctcaactgcagctgctgatgcaagaccttttgcatatgaactctcttctgcaagtttcctgtttctgagttctaactgctcctttgattcacttagttccttggcgtcttgtttcagctctttaatcttagttccctatcatgtcagaaagcaaatagagtttgtttaaacatcatgtggcttataagacgaagatcggtgaaaagcatggtttttgcaaacaacaatttttacgaaatgtaaaaagagagacctgtgctagttccagggcctcagagagctgctgctttagatttgcaacttcttcttgcaacacttcacattcacatgtctgcagaaaatgtatttcatcggttattgaattcttttaaacattataaacctagcctcaaagcttttccaaagacaaatgaaatcggggatatagtcaatgtcaaaagtctactaaccttttcattgagtgtttgctgaatgatgcgattatctgcagctttaacctgtaaacaagatgaagaatgagaaaaaagcgtagagcataccattagcttcattgttaatatagtctggcgttttgaatactggtattttataatatacacagaagaaactttattcaggtatgaggagagataatattgagctaaaatgaataatcttatccaggcaatagcaaaaccatctctaacttctgcatagatgaagaaaaattgcataaacagaaacaattcgatcacctcgagttcaaaagatttctcattaagttgatccctcagctcagcaactgcctgaagataatataggaatcacttgagagatgaatggcagacaaaaaaagtcagtgcataatacttgacaattggaacctacctgcatgatatcagatttatccaatgcctcatgagatgtcataacaaaatccattatctgtctctccaacgtagcaatctggtcattctttgctttgatgtcgtcattgagtactttaatttcctcctaagcaacaacgagaaccgagaaggtcaatattttgctagagtaaaacaactagatatagatatcatgaacagggtgattatattacattaatctcctcattttgaggggactttgcagcttcatctgacatccgttttaaagaacttaattgcagtgccgcctcttcagataatatctttttctgttccctcaaaagatccaactcatcgctcattttattgctagtctgggaacaaatgcaaaaaggtattgtaaaacagagagtaggaattggattcgataatgaaaatatctcttatgtacctccggaatctccatttcatgggaactgtcttctaaagcttctctgtcttccctaggctctgagagttgttccatcaaaggcgagccttctgaaagtcttgattctgtgtgcagatgactgcctcccccttgaggagttgatggtgtgctgttagatttgaccacacttgactggtcgctggcacttgaactgtgatctcttttctgataggaataagtaagcatggtttaaaaaaggggagacaagagaggcaccaacaaatcaaagaagaaactgcatctaagaggacataagcctcacacgttgagtccagaaatctatagtgagtgcatgaaacatttacgacagtaaaaacctatagctgccagatgcagttttgaaacgaacaagaatagcccacaacataattgtcaatgctataaatgaaaattcaatcatttgtataccttaggctttaaccaatttaacaatccgtgcttgcgggtctttttttcttctctatacgcattatctctaatctcatgatttccctccacagaaacatacaggtcaagttgctcatcgtccatcatgtcccgcctcttgtatggtaggtaagcaagcaaaatatacatcatcaaccaagatcagccaaagaagctagtaaatttgtg

SEQ ID NO: 6549 - DNA, 577 bp, Arabidopsis thaliana landsberg
acatcgtttctctgatttaactccattctcttactttaactcaattttaggaccattacaattaccacacttacttttatgaattctgagaaaataacatcggcatcatcgtctccagatttgcatgtgattgggtcagcttctcgatctgaaactttagagcttccgtgctttgcttatgctcttcaagtttttcacttcgtccatgggttctggtttcgaaagatgatgatgaatgatggtgataaggacgatgaatagagaaagaggtagagaacacgatgaaattgatttttgactaggttccttacatgtatcgtaccaactaccaaaccaacgaattagtttttacaaagcttatccgaatttatatataattaaaccgttttattggattcaacagagagaatggagttaaaccatattaatgatgttgcagattatctattgagaatctggttagttacttatagaagccaaattatacaatatagattgttttggtacgatgtcccatatcgaatttaagtttaacgataaacaattattcacattaacattgtaaaatcacatgctt

SEQ ID NO: 6550 - DNA, 2146 bp, Arabidopsis thaliana landsberg
  unsure (1)..(2146): unsure at all n locations
cgccccgtcgcattaactccgcggcaggacaggcggcgttctggcaggaaaagcgggcgacgcttcgccttcgccgaaataaccgcggcaaaaaaggtatgccgcgtcgttcgatttcgtatccttttcctttttttcctctttctctatctcttgcaacagggaccgggaaagggggataccccgaaaaggatcctttcccatgagggaaccaggctccgagcctccttactgatcagaggttcgaaggctggccccccgaaggtatcaacagccgcctcagatcgcgtgggccctacacccactactggtcagaggttcgaaggccggccccccgataggttccacggccgcctcaggctacctgggctccgcgcccattacttatcaggggttcgaaggctggcccccgaagggttcacagccgcctcaaacgccgagcgagggatgaccaggggtacgttcgatacataactaaggctcgagctgcgctcccgaggtaccctaggacatttccgagaccagcgggagcgatcttgtaacggaatcccatcggagggaggcatcgagccctcggaccccgtcgccaggggaccgggtccggcagatcacccgcaggtacttttggagcgtgcctctgggccactagccgacccctaacgaacggggcacggacgtccactcggattacccacttgcagctcaccggagacaccatgttcggtgcccatcgagggtaacatggcactctcccccctcctccttgcggaaaggcgacgtaggggcgtatgtaaaaaagccgagtctgtccctgatcgtcctctcgccctgtgcggaggctcgggggctgctctcgcaaacccggctccggccaaaccattgacagcgttaacataccagcccgagaacttgggccccgaccgtacacccgggctacgaccagctcgcatgagggaacaaccagaccagcagaagcattacgcaaggcattaagacctcgaaggagtgaaaccactcctccgaggcctcgggggctacacccggcggttgcgctcgccgcaccaaccggaacaaaatgcaaccgagaaaggctggtccccttgcaaaaaagtgcgacggaagcctccaagcgagtgctaacactcccttcgaggctcgggggctactgtcggggaccataattaggggtaccctcaagacgcctaattctcagctggtaacccccatcagcataaagctgcaaaggcctgatgggtacgattaagtcagggatcagtccacacgagtgactcgatcacgcttcacccgagcctagcctcggccaagggcggccgacctcgagaacttccgtctcgcccgaggcccccctttttacggcggacacatcaccggctcgcccgaggccttgcgttcgctcagaagcaaccctgactaaatcaccacaccgactgaccaagttgcaggagcatttaacgcaaaggtggcctgacacctttatcctgacacgcgcccccccggcagagccgaagtgaccgccgtcactccaccgctccactgaccagtctgacagaaggacagcgccgcctgcgccactccgactgcagtgccactcgacagagtgagtctgacaggcagtcaggccttgccaaaggcgccatagcgaacgtccgtccgcccgaccccagggctcggactcgggctaagacccggaagacggcgaactcccgtccgcccgaccccagggctcggactcgggctaagacccggaagacggcgaacatcctccgcccgacccagggcttggactcggctaagccccagaagacgacgaactctcgtccgcccgacccagggctcggacttggctcagccccggaagacgacgaatctccgttcgcccgaccccagggctcggactccaccgtggcctcagcncgcggtctccgcctcgcccgacccgggggctcggactcgaccccggccacggaagacagactcgacctcagaggagcctccacatcgcccaacctagggcgcagatcagccacgtcgacgggaggcgccatcattaccctaccccaagctgactcaggctacaggaaacaagaccggcgtcccatctggctcgccgccagataggcaatga

SEQ ID NO: 6551 - DNA, 126 bp, Arabidopsis thaliana landsberg
  unsure (1)..(126): unsure at all n locations
agactgnacatccatcttngcaatgtatatatctcatgatgctcttcaccctaacaatttttttttttttagaaaatatatttgatatgagtgtttgttttttgttataaatagattgcttttttg

SEQ ID NO: 6552 - DNA, 2598 bp, Arabidopsis thaliana landsberg
  unsure (1)..(2598): unsure at all n locations
ccccaatatactcttccctccaatatctctttgaccacttatctttctcccctttgaccactctctctttctctccgtcccttaatatgactcaatctgcctcctcccttttactactagcgcgtacacgtgccacacgcttgcatatttcataatcatcgttaaagacaactttctaagtgcttgattaatgattcattaattactccatgacaagaacatcttgcatggttttatatgctaacataacgtcactttatatacacatacctacatattaactaagcaactaatcatcaacttaagtattaaagtaacacatctattcaatataggtatcatggtggacctccttgatgattgcgattattatggcaagaagaacaagccaaagcaagaatagagcatgcgagttgattaatggcgtctaccaaaccattcataccttgtctatttatttcagtatttgatcccccaatatatagtctcctctcttgtagcctcaccacttccttatgcctcctgtcttgtccctcctcattctctcttatcactcgtgtgatcacaaacgtgcatctagacaacgccaccccaaccgcatcctcctctacctccctctctcctccagcggtggtttctcccggcgttgttctccttcgctttgtcgatgatgtacctgaatgtacacactcttatcagtctcttcatcgaccaaaatgcgggtttaattactactttaatcttaatgtactcaagaactttattgtaaagaattgtctatgcacacacaagcaaatttagggttacattttttccttcatagtaattgtataagttttgattttaaatgtataattagattgattataatttataacaagttgacttgtgggtgtttgttggaatgtcgaaattcactttatagatttaatataaaatctaactttagtggtcatttaattaggctttaagaataagaagagagatcaaacggaaggtacctactgtgggcggtataggctcagcgtgaaatgaggacgatggtggaggttgaggcgtcaaaggaagtgataagcttagagattgtggcggtggtggcggaagagataacactatagtagtcgggatttgatgcatcggctgagccatcatcggagctacaaatcctaaactttgttggcacactcttaggatctggccaccgttaccgtttcctacggcggcggcggcggaggaggaggaggaaggaagagtttttctgtcaacaagctcagacaacgcgtcgtatatctgaggcaacatgttactcggcaaattcttctctttcctctcagtcttgtccatcttccagtaagaggaagaagtgacggtgttaaaagacgattctacccttgatctctcgtactctctgatcttcttgtaatccctcataagattgtcccacttatcgttgcactgattctggttgcggtaacatcctcttctccagcaacactcctctatccatttccaccggagctctgctggtttgtttctgccttcaggttgtttctccgatcgccgtacacgcctctggtcgtccatcttcttggcttctatgagaaccaaagtctcactcactgtccaattcccttttctgcactctctcataactatctgnnnnnnnnnnnnnnnnnnnnnnnnnnncatatatgtgtctctttggatttaccaattggtagccatacgtgtgtctttgaatcttgaattcatgaactagagagagagagagagagaaagaaataagtgttggagaaaggggagaagaaagagatgagccaaagaccggtcaaagtcttttgttttctagtactaagattgtcaccaagttcgaaaagacagtgattccaataatgagaaaatatgaaaaacaaagcaagttttttttattctatgtttcctactaaattaaataattgaacacctatcctttttcttttcttatctatgtttcatgtctctagttttttacttttatatgggacaacactatgcgaatccaaggatctcactgagtaactggtacaaggatctaacagtgttagtataaaaactatgccatttggtgactaggagtcaacttttagacaacgtataaccccaagattatcacagaaggccatgttcaccagtggtcttagtacttgacatggtcgttatatatagttggaaggcggatgacgccatattcaaggtctctggatagacgaacgagggagtctcggatctagatctcacatacaatctggacttctctacttaaacgaaatatgaattggtatgtgccagtggaaaactcgttagtcagataacgattcctacctgataattaactcacaaagtatcatatcagagagactgaaaaatacaagtaatatgatccaaacacacaagcagagaaaaaacatcataatattccaatttcccatagcaatttttgtgtgtcatgaattccacataaggaggacaatagtgaggggaaagatgtttgttgaaaagcttatttattcagatcagagaagaccacccctaagagcaagaaccaaatgaagaacagag

SEQ ID NO: 6553 - DNA, 2566 bp, Arabidopsis thaliana landsberg
ctctagctttgatttgagcctcttcttataaatgtgtggactcttgtgatgatactatttgcagaacttttatatgatttgttgggatggaagtggagtttatagagtactaaagattgatcgtcttgatccatctgagcttaacattagtcaagattcgactcattacacaaagaaagaatgttatgagttgctcaaacggatacacgaaggaaataaagctacgggtgggcttaaacttgtcactctttgttatggtatcattggtatgtgtttatcttgagtttgtacagatgcttcagttgttgtgtttactttgagcttgttctcacattttgcatctactatgatgtctcaggctttgttaaattcttgggaccttactatatgctgctaataactgaaagaagacacataggtgatctttttggtcacagtgtctatgctgtatcaaagagcgagatagttgccttgcataattctactgtacagtgcaattttgcaaattcaagagatgaaaacaggttttttgagattttttgtgttatattttctgtttcttcgttagtttactgtttttctctgttctcctcgaatacgaaagtgcaggtctttagacgttttgtcctttccacgttttaaatgagctgaagtcatctatctaacctttaccttttcttatggtgtttccgatttgttgatgaacagatataagagactcttgtgtatggcggaccttacgaaagacttctttttcagctattcttacaatgtaatgagaagttaccagaagaatgtatgcaattatgagactgggcataatctctatgagaaaatgtttgtctggaatgagttcttgactcggggaatccgacatcatctacggaataccctgtggactgtagcattggtttatggtttcttcaagcaggtgagagttgtatgtttttctgacagctcactgctagaagaaaagttcaaaactgcatctgttctctttctattacccttttcctacagcagtggtcttttacatatgtggatcatttttataaatcactaattatataagtcctgtgatgtcttttttttttttttatcatttctttactgcaccaaaggcctagtaagaagttttctgtttcacatacggatttctgtcatatattatcaattatgacactgttgccgtgttactattgttatatatgtagttatggtatactggcatcttaaatctccaattcctggatactcaagtaccatgcctcattttacatgtaggcatctctttctgaatctgggaaggattttaagatcacccttatcgctaggcgttcccgtcataatgctggaaccaggtaaacaatttctttcaccccctagtcaggcaatttagtaggttctgtggtaagcatgtaactgacactgcaaggtgttcctctagagactaaatgttattttttgcaaatagaaactgcatagttagtcatatctggatatctcactagagcatttcacaatacctaacaatagaagatgtaatatacatcttatttgaaatataaccatttttcatagatatccttcttcccctctcctaaatttattttcatattaggtacttgaagcgaggagtaaacagaaatggtgatgttgccaatgatgtcgagaccgaacagatagtgtctgaagatgttcctgaagaccaccctatgcaaataagttctgttgtgcagaatcgtggctcaatccctcttttctggtcacaagagacctcacgactgaatctaaagccagatatagtctgtaagttttgtggcactaaaatttctgcattgctcccccactgtctctcctttctctctttcccctgtttgactgctttgatatcaaatgcagtgtcaaaaaaggaaccaaactatgaggcgactaggcttcactttgataaccttgtagaacgatatggaaaccccatcatcattctgaacttgatcaaggtgagttgcctaatccaccctactatctattttgctgtcatcattttatcttattcatccacacaatcaatagacaaaagagaggaggcctagagagtcaatcctacgagaagagtttgttaatgcaattgactttataaacaaagatttacctgaggaaaatcgtctgcgattcctccactgggacctgcacaaacattttcggaggtatctgtcgtatacacccttatgttccaggtgctacaatcgtgtgaaagtcttttaatacatttgtagatgaaaaccagttttctgttttctatccttcttccagcaaaacaaaaaatgtcttggcactcctttgcaaagtagctacctgcgcattgatgctaaccgatttattttactatcaagttacaccagccatgaagattgaggattccatgagcttgtcttcttcttctgagtaagtcctctagcttgaattcttccttcgcttctctagaatatcattttttttttccatgttatattctgtggcgtctgctcaatttcctgttcttcaaaaagatgaacctttttttatg

SEQ ID NO: 6554 - DNA, 1737 bp, Arabidopsis thaliana landsberg
tctgatacttggttccagcattatggcgggaacgcctagcaataagagtgagtttgaaattccgtccagcttcggaaagtattgtctacatgcacagcaaaacaaggttcagcatccatgaatctaaacagtactgtgcgattatgaaggtatatgaaaataaagatgccagagtattatagctgtatctgaagtagcacgaccaagtatatcaaaattgatagtcaactattaaaaatttgcatatgagacaaaaagcttctttccagaccttttaggcaagacaggacttgatttaggaaagcaaaatagtgatcctaaagaaaatggtacacaaataaaaagactacaaaagaaaaacattggaagtcggcaaactttctttcctctgggtggtaagtggagggtgcagaaaaacatacaattctcacctgcttaaaaaacccatacaccaatgctacagtccagagggtattccgaaggtgatgtcgagttccccgagtcaagaattcgttccacacaaacattttcttatagagagtacctccactctcatggtcgcatatattcttctggaaacttcgcattatattgtaagaatagctgaaaaagaagtctttcgtaaggtccaccatacacaggagtctcttgtacctatttatcaacaagtgggaaacatcagatagagaaacgcaagggtttaatgacttgagtacatatattggatggaatggtacaatgttgctaaagccgtgcactctctcttttcaccaaacagaaacgaaaaacagaacctttcttcagcaatgggattgcaataaatatataagaaaaaaaaagcataatgtagccaaagatatatcaaaatacctgttctcgtctcttgaatttgcagtgttgcaaagcacgctagaatgttgcaatgcaatcatatcactctttgacacttcataaacaatgtgaccacaaatttcacctatctctcttctttcagttataagcagcatgtagtatggtcccaaaaacttaatgaaccctgagagcaaatgccaaaaaaaaaaaaaaaaaaattgtgagaacaaatctgtaaagtaaaaccatctactactcttctgtaaacataaacttgagagaaaaacacataccaatgattccataacaaacagtgacaagtttcagtccaccagtcgccttgtttccttcgtgtatccgtttaagcaactcgtagcattcttttttggtatacgcagtcgaatcctctctgagattaagctcagatgcttcgagccggtctatcttaagtattctatatactccactaccgttccaaccaatcatatagaaattctgaaatatatatcatcatgttagttacaaatatctatagtgaaacaatagtacaacacgaaaacagatctcatagctgattcatgagacaagaaaaagcaatcaaatggcagtgaaaatactcaaaagtggaagttttaaaataccgcttgagtctcgaagagcttgaattgttgcatacagcctaaaagagcagatgatccagaggagcctgagccgccattctccactgatggcgatgaggtcatagctgatttctcaaatattagttccttttgatttacagatctaagcccaaaccgatgggctgagagaataatctcgccggagcattcaccaattttcaaaatcgaaataaaatgtcgaattcatttcagacgccattcaatc

SEQ ID NO: 6555 - DNA, 2379 bp, Arabidopsis thaliana landsberg
  unsure (1)..(2379): unsure at all n locations
tttggagcgctagtatcaaatcttcttgtctataaaaccacactcaacaagctaagtcactcacactctctttttgttcaaaaatttcgaattttactacttctctccaaacatttcaagttcttactctctcttctctagatttctcagaaactttgccaaaatctcttcttacaaaccttttcaaaccctctcttacactctttgttcatttttaaacatcaatttctcttctactttgacctacctttggttattttgtggtgactacctacagtaaatcaccccaagatcatgaatcccgaagaatcaagaaggagagcctctgctcgagccgtggcaagaggctttgagatgattaatgagaagaatcagtcaaagaatcaggaagctgcgagtcctggttttactcggatgacaggccgagtacaatggccgagtatggccccggagtcctctgtgggtcgttctgccgctgctcaagaggaaatagcaagaggcaagagggtctgggagtccgagccagttgcagaagaagaagtgcctgagatagagaaggaagcatctgaggaagatgtgcaagttgatgaagaggtcccgatagttcctacaagtagaagaaggaacaccatgaggagaaagaaagaacctaccatagaagagcactaccaatatctcatggagctgagttttgaggggacaagatatccccatagacctaccatgcaagctttggggatatgtagagatgttgactacctcatggagatggccaagctggagaccttcttctcctaccagtatgaaggatacaaaactgagagctgccaattcctagccactttgaagctccatttctatgctgaagaaagggagagagagctgcataagggagnnnnnnnnnnnnnnnnnnnnnnnnnnnnnnnnnnatactcggttcccattaggcagttggatgctattttcaagttccccaccaagtatggaatccgccaaaatttcagcaaggacgagctccttgatctatggttgacaatcgccggtccactcccctacaagtcatctagggccaagagttcgttgataaggagcccggtgcttaggtatctccacctttgcattgcaagtgccttcttcccgaagaagacaaccggccatgttaatgagggagagctgaagttgcttgatctcaccttatgcttcattttggggcacacgaggaatgggatagagatggaaggggatagggcggatacatccctttcggtggtgttgattgatcacttgattggttttagggagtatgcagccggaatccaccaatccggctatggaggaagcttatgtgctggaggagtgatcacgcccatcctaatagccgctggagttcctcttcatacccccactcacacagcaacctacatcgatatggagtatttgaagaggaagtgctacttggataggtctgctccagcggatcaactctacttcaagttcaagcactccacgctaggtctctttaggctagcactcccttgcaagaagttcaccaccattaggattgggaacaacattgactttgatcctcctcaatcgatcttagtcaatgtccttgcgcctctacaagcagagccgagcttaggaagtgagtctcaagaagaaggagcagagtggaatgaagaagaagccgagcaggaagcttatactcggccgagtaactttcagcaggccgagtatggccagnnnnnnnnnnnnnnnnnnnnnnnnnnnnnnnnnnnnnnnnnngatgaacaagaagattcgtgcgaagctgcagcggagcagtttttctttgaggattatgctgagtccgatccagagagagatcccggtcaagttcacaagaagttgggaatgctcaaaggtctgggcaagtttcagaggaagttgttcagtgggttgaagaagaaggtgaggaagatgaagagagcaatggatggcatggcggtnnnnnnnnnnnnnnnnnaacgaacccagagatcaccaccacctcgacccgagttcaggagaagtaactcaacgagtgtggcaccgcgaagggacgctcgttttgacccgccaagagcctcaaactacgagctcgggaggagctccactttctcagatcgccgtttcaacagccgcccacccggtccagtgaaccaggttgttctgaacgctgacccaagccgagaagagtactactcgggctacatgctcgacgggtcaaccgagtacaaccccaacaaccccaacacctccacacgtgatcctgagtacacacaagaccgcctggacgagtttgtccagaaccccttcgtttaaatgttgaggtatcactccatttcactgtatatatca

SEQ ID NO: 6556 - DNA, 389 bp, Arabidopsis thaliana landsberg
ggagtatactattctcttaaattgttatctataaaataaatcaccgagggtgaggagtacgtaaaatgctttatcatcaaattcttaggtttctagagtaccaacattactatcaatttaattggttaaagacgaacattgtttaggaattatatatataatgcattattaagaaagttgatagaaaaatatattttaatactaagaataatttgttattgcatgaatgaatgattatataattaaaagttatatttaaattaatcaatacaaaattatttacgaaaaccggtgtatagcgcgggtgatcacctatttcgtactaaataattgagtatattagtgaacagtgaatactattcttttgactttccacatgaaaatttatt

SEQ ID NO: 6557 - DNA, 647 bp, Arabidopsis thaliana landsberg
tttaagaggtagtgatggtgtgctcaaaccttaaagaatttgtgttgaggacgagagaggacaggttttgcattgtaagcctgtacaagcttcttttcagtcgagcttagagctagatcttcggggttaacaagtccagctactatcttaagcctttcacggaaagcaacgttgctgtctttagcaaacccttttaccttctccatctcatcattgacaagtttctgttttgaaaccgaaaacaaaaagaactcggtaagcatttagatcagtcatgggatgtgatgaatgtcataaaggaatggcttttcaagctaccttgatgctctcctgatattgctgagaggtttctttttcgtaattgtctcgtaatttaaaataaagtacaatgctcatgccttctccatcactgtccccaaggaacattgcagcaggataggttggtaactgccagtgaaaaacacaagcaaaagttagtccacaaacaaagattacgaagcggttaatgttgagtggtggttacctgaatgttgacaacaagaagagcagggagctttgcctcggctttgatgtttggaagctcgatgtgttgggcgatatgatcaatcttccttggacagacaaacaagtcaacaccaataggagtg

SEQ ID NO: 6558 - DNA, 1097 bp, Arabidopsis thaliana landsberg
tgataaaatattactgacatatttttaaactctaaagaatatcttatattcttttttttttttcaccgaaaaccaaaatttatttctaggtttgttttgatgaaattcagttttactttaataatttcaactaactctacttatgttctaatgcatcttcatgttcgagtagtttctaagaaatctacatgttttcattctctttctcattttaactgagttcgacatctcaagctacatgcaaaagtactaaattatacaccaacaaacaaatacgtgcatcctagttgccgaatatgaaacaaagcacatgcacgacataaaaggtttattccctacattacttccccaaaaggacatgagtgtctatgcctttttcactgctctcatcagcaatgtaattctcgcggagactagctttttcagctcattattttctctgaaattccatcacttagtagatgagacaggatagtaatttgtttacattcgtcgggatattagcaatttgttggacttaatcatataaaaaactgtcaactcataaggggtctatgagctaggttattatattggtgttcttttgtgtggtgggcatttagttcagcaaaacttgaagaacatagtactggaacagccgaagaggtagtgaaacaacatccaagttttatttatttcaaacataagataaagacatgattactttaaaaaccacatagttgcaccatgaaccgatactacggaacgtgtttgcttatttaagtgatcctaatacatataaagattctgcatgttgtttacttataaaaggcagttgaagccaggttgtaccggcaaacgacagagaccaaggagcccattaagcctcaaattgaggttgacggtgatcccgagaagattaagaatattgagtcttacggcctcgcatgcacatacagacacaagagaaacattattaagaccagataagatagaacaacattgggccgcgttgctggtggttatgtagatgagacaaagtacgttgacgcaaatccccaattcagactggttaagaggacacacaggttgggctgaggtgaagaccaagaagacga

SEQ ID NO: 6559 - DNA, 1653 bp, Arabidopsis thaliana landsberg
gtattaaaattttgtagactttgacctcttatgtggtagttggtggtccatttatcatgggtgtaagtgttaaataatttaataagtgtgaatattgatactctttttagattaagacacaccgaaacggataaatcattatcccttataatttattaatcaataaacaagaaattatacacgccgtcaataaaacactaattaagcagcttatacacatttaacaatgactctttggtatcatctttgatgagtgaacatgattaagaaattaaccacgcttccatgaaactgaaagggacaaagttgcatttcctataatggaataaatattggaccgacgatccattgatatgatttgatgtatcaacaagatatcaataaagttatgtacatataaatgattaaaacaaatgaatatcacgggatatataaattatactatagagcttttgaatggtagtcaccttaacgtcgttaacttgacttcccttaaacatatatatagcactaaacttcgtgaaaaatatgtcctttaacgccgtgattatttcttaaaccaaatttaaaaatagatgtgattctttacttaacgatacgacccaaatcaaaaactaaaaaaaaaaaaaaatcatttacagaaatcaaagtgatcaaagctaatagagtaatagtctaatacagtgtgaatcggaaattagttgggtctcgttttccattttcttggtagtcagataaataaatattatgatgggacgtaaaaagaagtgagaaactgaagtaaaaaaaaaaagaagtgagaaacttctatatgaataatcaaatccaacttgttgcttctgacttgtgagttgtgactgaacataaactcttcttctctttctctgcctctctctttcttctctctctctcaggcacacgatccacacacacacaaagactcaaaacaaagtcaagaaccctaatatcttaagaacgtcctgacataaccataggatcaaagatggagggagaaaccgcagccaaagcagcggcaagttcctcctcatccccgagccggtacgagtctcaaaagaggcgagactggaacactttccttcagtatctaaggaaccacaagccacctctgaatctgtctcgttgtagtggcgcacacgtccttgagttccttaagtacctcgaccagtttggtaagaccaaagtccatgccacggcttgtcccttcttcggacaacctaacccaccgtctcagtgcacttgccctctcaagcaagcttggggaagtctcgatgctctcatcggccgtctaagggctgctttcgaggaaatcggcggtggtcttcctgagtcaaaccctttcgctgccaaggctgttaggatctatcttaaagaagtccgtcaaacacaggctaaggctcgagggattccttacgacaagaagaaaagaaaacgttcgcatacagacacggcaactccaatcgccggtgacggagacgatgccgaaggaagtggtggtgctgctttggtcgttacggctgcaactacgggatagtggagacgatccagctactagctagatgcttaaatcttaaaagaatacgggataatcattcttgagttcttactttttttataaattatatataattcggg

SEQ ID NO: 6560 - DNA, 699 bp, Arabidopsis thaliana landsberg
tcaaaagaaacgtatcttcacttcttcctcttctcgttcttctatcaatcactcctttttcatcatctttgtttccgagtgacaaagtcacaaacgagacacttaaccaactctgctcaaaaccaaacatttacaaccacttttgcatcgcttggctaacctctgatccaacaacattcaccctcgacctacaaggtcttctcgattcagtttttcaaaagacgcaattgttgggctataagagcctagcggcgatgaaaggctcagtgaataccacgactgatccggcgctcaagatcccatttgagacttgcgtgacggattatgaagtagccattaaagcgatcgaggaagctcaagggtttgtgacatctaaggcgtacgacttagcatctctgggggcagctaaagccttcattagtatatcagtgtgtgaagctcagtttgaaggacgggataatgtgccagtttatgtaacgaaactcaatatgttttttaagagaatgtgtaacattgatagggttttctccgacgttttgagaacttgattctttatatatcttttacctgcaagatggcagaaactattcaatgtcattcactctgttatattaacttaaaaacaaataaatgaataaatcctagtcaattattgtgtcttttggttttgggtcatgttttagataatagtttcacagt

SEQ ID NO: 6561 - DNA, 885 bp, Arabidopsis thaliana landsberg
  unsure (1)..(885): unsure at all n locations
cactatgatgcatcaagtgagacattgctcgagtctgcacgctcatcccaccatgagtgcgctatcaaggaagctgccatggctacctatgacaagcccattcacatgtagaagccctcaagtacatcatggtttggtgttgattctgtttcggtggatgactttcttggttcttcgggttttaatttttcttttgtgtgtgttgatgcgtatactaggagatgtggattgagaggtagaaggaagtaaagccgcctacgacaagccaaatcaagatgactttggtttaaacttttgatttttaatttctggtggatatgagatgagctgaaagaaaatactttaacggttataccactcttttttattcgttaaatcttctnnnnnnnnnnnnnnnnnnnntaggcccaactatagtaataatttgatatgctcaatgaaccaaatgtgattaatcaggtatgatcggtggttttggtgaaagaggataaccaaattcgatatgattttttcactgtatgattgtgttcagttttatgatttcagtttgcttccaaattttgggacatgattcgtttcttttcatatgtatgctcaagatacttaccattgtcaaaattcaaaaacgatagttgagtagtacgataaaaaattctcaaaagaagataaacaaaacacacagttcggacactcatccatagaattttcttatgttttagatttgggaattttgtatgatatgatttatactaataacccaagattttgaaatcttttcaaataaaagaatttccttaaagtaagattttctttagttattaaaatggcgatgaattataatttcgagatttttttcttaacttatgaatctatttattcaatttt

SEQ ID NO: 6562 - DNA, 555 bp, Arabidopsis thaliana landsberg
tttccgcagccaagacaatggcttatccttgcgtcaaaagaaacgtattttcacttcttcctcttctcgttcttctatcaatcacccctttgtcttcatctttatctccgagtgacaaaatcacaaaagatttacttcagcaactctgcgcaagtccgcacattgaccaccccttctgcatcacttggctaaccgctgatcctacaacattcaccctcgacctacaaggtcttctcgacttggtcttccaaaagacgcaattgttgggctataagagcctagcggcgatgaaaggcgcagtgagaaccactactgatccgacgctcaggacctcatatgagacttgcgtgagagattatgaaggagccattaaagcgatcgaggaagctcaagggtctgtgacctctaaggcgtaccagttagcatctcaaggggctgctaaagcctttgttagtatatcagtgtgtgaagctcagtttgaaggacgggatgatgtgccggtttatgtaacgaagctcaatttgttttttaaaagattttgtaacattgataggg

SEQ ID NO: 6563 - DNA, 515 bp, Arabidopsis thaliana landsberg
aacgcaaataccatcaattctccagaccataaggactcaaaaagatcagatctttcctctgaaaaagagatacccaacttatgtttttgtgtgtctgtatatagatgaacattacatacccatatttgtgtatagacataaaaagtggaaattaaggtaacaaaaagaaatgggaagaggaagagtagagctgaagaggatagagaacaaaatcaacagacaagtaacgtttgcaaagcgtaggaacggtttgttgaagaaagcttatgaattgtctgttctctgtgatgctgaagttgctctcatcatcttctccaaccgtggaaagctctatgagttttgcagctcctcaaagtaaacaactctctcactctttatcagtttcttgattgagtttttgctagatctgagcttagatctttgtctcaaggacttgttatatatagatcacacgatcttgatttctacgaagttgagttaattagatttcttgatttcaatttttagggtttttt

SEQ ID NO: 6564 - DNA, 745 bp, Arabidopsis thaliana landsberg
gaagctgataaactgaggtttgagacgcttaggaagatcgtggatgttgttacgccggttcaagcggcggagtttttgctcgcagggaaaagattacacatatcattgcacgagtggggaagagttagagaagagcaacgttttgggtgtgtacgtacggatgcagcggctgccacgggaggagcgggaaccgagaagtcaaagaggtcaagcttgttgatgtgagtttaaagttgaatatatataacttgtgttatatttgtctatgtagagataagatcgtgtttaagtgtctttatgtgtaatatgtgtatgagagagtgcggctagtttctagatgatgcaagcataagcttttgcttttgtcttatataataacaaaagctgaaaacaatcaagagagtcgacttttttatgaatacaaataaagttgtgatgctttcgctctaaacaccatgttatttttttctttttcttattttgttaacaccatgtctttgctcactatcaaatcactaacatacgatgtaatgactcacgagtattaatttctaactctaatcgtacaatttttgtaagtttaataaatattttagaacataaatgttgaaatatttcattaaataaatacgtggaaatcctaacccaaaccagtgtaaattgacaattcgaatttgtagggaattaggtgtcgggaagtattgaatctttacatcattcgaatattccttttttcaggttttag

SEQ ID NO: 6565 - DNA, 388 bp, Arabidopsis thaliana landsberg
catagattaataaagactctcatggtgtaggaattacatgggttgaacaatctatataaatgacgaacgagacgagattctgggcatcctttcgaatctattttcttcataccacaggcgaatagccactaaccctccactggattaagcatgtctgtcccgctaagccacctttacttagtgatacgcaacaatcccaaagcacacccttgaccctttatgcgcgtgatccctgtgacctgacccacctgctaacttggcatatcatcgcacgggtgcgcaaccgtgacctattctgtgctgcaatacacgactgggggctgatcacatacatatcaacgccctgtgtaaccgctctaagttcattggcttgcgagccatgactttc

SEQ ID NO: 6566 - DNA, 1514 bp, Arabidopsis thaliana landsberg
tctttcatcttcctcacacacaatccaatcaaaacacacagagagaagaaaaactcagaagaaaagccaaagagtgaaacaaaaatggcgtcgacgactctctcaatcgcaacaacaatccgttcctcatcttatcctactctcgcttccatcaatcacttcccttcccgaaccaccaccatcgaattcccctctcgcttcggtggtggttcatcatccacattgacccaccgtgcaacccatctccgtccaatcgccgccgtcgaagctccggagaaaatcgagaagatcggatccgaaatctcatccctaaccctcgaagaagctcgtatcctcgtcgactatctccaagacaaattcggtgtctccccactctctttagcccccgcagcagcggcggttgcagctccagccgacggtggcgcggcggctgtagtggaggagcaaacagagttcgatgtggttatcaatgaagttccgagtagttctcgtattgcagtgattaaagctgttagggctttaactagcttggcgttgaaggaagctaaggagctaatcgaaggattaccaaagaagtttaaagaaggtatcactaaagatgaagctgaagaagctaagaagactcttgaagaagctggtgctaaagtctccattgcttaaggtttttataaaaaaaaaaaaagaagttgttatcttttctggaatttgattggtcttttgtgttgtttagtatagtctgcgtctggaattgttgagaaattgttgtaatttgaatcacatttggtttcccattagctgatttcgccattgatgtgagctttttggtagctgcacataacatgtttgttgaaatgcctaaatgaggcaaatcactcgtagttgcttaacatgaaacagagttaaaaaataataagcacaaatgtcactgctacatttttttacttagtattgtaacactcatgaaatatttaggatatattataaacgagatcatgtatgaatacaaaaacacagcatattaacaccaagtttgaggcattgtccacctaagaaaccttgttctttgcagtgcttattgcagtccggaaattttgagcatagaccttccacaaggtaccaccctccttgagctttggccatagattttgcgtgtacttcacctatcgttttccaaagattgttgtaatattagaaaaaaagtcgttactcgtttagacataaaggcaaaagaaaaagaaaattcactcgacaagaatctcttgcagctggtaacaacgcaatatcactatgtattttattttattttttgtgataacaagttaatatcacaatgtattgtgaatcacaatgtattgtgaaaataatagtgtatacaatatgtatggagatatgatctaatgtctgatataaaataagtattcggttcgctagctagcgtagagagtcacctcaggaatctagctacttgagctatactttacacaatatgaaccacttgaacttacccagactga

SEQ ID NO: 6567 - DNA, 1859 bp, Arabidopsis thaliana landsberg
aagatatatgcacataaggtacgtctcagtcttcaccagataactaacccccacatatgttgtcaaagtcactaacaagagtagttgtttcttgtctgttgatgcagaaactctatgaatccttttgggcttggtttctagagaagataagggtatgtaaatggatttgattgattttaaaactcgatcggtcgatgtgataatcatagtcagtttttttttcttcttccagatttcgagtgcgtagtgttggttagttaaggtagggtagggaaaaatcgttggcttctagtgtgttgcagtgtgtgtatttgagaatatatgatttgtgagactaaaaagccgaaatcattatcggggtttattgtttcttctacttataatgatgttgatgattgatgtcttttaggcttttagctcatcggttagtaagtgtcaacagcaagagtgttcggctggactaccgtggcccattctgtagatttctttctagcccggcccacaacttccattgggctagatatgtttttctcacgtaaaagatatctgactgtcgatattgaagtaacttcttaaaacatttagatttaattgataatttaaatgtcaattttggttttttagatgacgattaaaatccttttcataacccaaaatattagttttgccgatattagaaatccgaagaaaatgacagaaaataggattaatcaatttagggtttaataaaaaatagtgagtgagagagaggctacagtgctccacattgacatcaacaaggttgaagaagaacaacatcattcaacatcagcatcacgaatattttcgagtcatggagagaagcgccgttgcctcaggttttcatagaaattacatcctctgtgcttcacgcgccgccacttccacgacgcgcctccactctttgtcctccctcagaaactttccctcttcctctctcagggtaatttaaaaaaatatcacttcttccgaaaacttatgttttatgaacaaaatctgattcgaatattctgattcttgtagattcgtcactgtccttctcccatctcttccaatttcatcgttagtgaagtttcccgaaaccgacgatgcgacgccgtttcttccaggtttgacttcttcgatctcaatggaaacaacgacagaatcagttttagttgacttgaattcgtacttgcgttgtgtttacaattctgtgattttgtgacttttgggtgcagcaccaccgatgtgactgaattagccgaaattgattgggacaagattgattttgggcttaaaccaacggattacatgtacgccatgaaatgtagccgtgatggtgaattctctcaaggtcaattgcaaccttttggtaacattgacattaacccagcagctggtgttctcaactatggacaagtaagtatatttctctaagtcatcacctttataactgatctatggaagtttgactatacctaacttgatctatacaagttgaattgtagaagttctgatactttgttttgttattatagtgatgccttgtatttgtgtgtgtagggtttgtttgaaggtctaaaagcttacagaaaacaagatgggaatattctactcttccgtcctgaggagaatgcgatccgaatgagaaatggcgctgaaagaatgtgtatgccttctccaaccgttgaacagtttgttgaggctgtgaaaactactgtattagctaacaaacgctgggtaatttggataaggcttttgaatttgcttcttttatgtgtttgggttacatcattctacgattgatcgtcttttgtttgttacagattccaccttcaggtaaaggatcattatacata

SEQ ID NO: 6568 - DNA, 1176 bp, Arabidopsis thaliana landsberg
  unsure (1)..(1176): unsure at all n locations
gccttctataaaatctcctctatatatttgtttgaacaggattaggaacagaccctgtgcctaccccgcctggactacatattccttgtggcaaaggtttcactagcaaagaatgcaataaatattgtacgggtgtaggttaccggagaggttattgtgcacccgacgaagaatacccacaaataagctcgtgttactgcaagtggcggatctaaagaaaaaaattgtttggggcactaatccatatttagataataattctctttttttgcagtaataaaaaatatcgaaaaataataatatgtaaaacaattgcaattagagggcatcgaactatacttactagacacaatattgagcgctacttctatatgagctaagatatttatactgatccattgttaataactcttatcaatgagtattcttatctagtatgagacgttggatgtgtattgttcgtcgtctgtttaattttaataaattttacataatcccatttcgtaatctcttttattttatttatattattattataagctcattatattaaagtagatgaaacttgctttgctgcgcaatttggtgtggtcttcannnnnnnnnnnnnnnnnnnaggcccatttatatccgggccttagggtgtttggcatgatttgggctaggatttaagaacccatttgttttgcgtacaggatgatttatagatacaaatgaaaatacagagcaagacaataagaagaggaatcaagaacagagtgaaacgaaccttcatcatcaggttcggacagaccaggaactctcccggcaagaagaccttttttcacgacagccaatctttcccctggaaacactaaagtctaaagccgtggacgagactaaccgatttttgtggctgatgcgcatgcctcttaacttcttttgtgatttgtggctaatcattttctagcctcacacgtgtcaatgtcacttactaggagtctacagaacgaataaaattcatattacagattttgccccaaaacaattcatattacatacagatagtagtctcttctgccttaaggttatgtgcatttacgttcaagaatatacaaatctatctttgttgcaagattgtgaagttgtgtattgaaatatgcgatcacatcctgtatctgagtttttggcgtactt

SEQ ID NO: 6569 - DNA, 1539 bp, Arabidopsis thaliana landsberg
tttactgttctgaaattttagaaatgaacgaaagaagttattgaatgtaaatatcgcattcgttagaatttagatttagtcgatgtaaccatgcaattagtttttaatgtttctaggcaataattaaacaaaattctaaggatataggtaaaataataccaattaaattacctttttttttttggtatcaccaactaaattaccttattctagaactagaagcaatctatttcagctacgtgtaaaagtcatttggaaaattcgattgattattctcgaccatatgcattatttcccccggcaaataagaaacccgcgtacatttttttgatacctttcgaaacaaacaatactcatgatcaaagttatatttttagattaaaaaagaaaagaaacatccatcaaaaagtcaataaacgagcaaaaaagtgttaagattcaaagtcgttgttcaaagttgggtctcttttataaaaaaaaaaaaaaaaacttcttagcttcacacatttttgaaaagctaaaataaaaagactccatcttccatttttgttccttaattcatatcttaagattcaacattttctaacattctttaattcattaaccaagtttgttctccaagtatttttatagatttaaaaacccaaaaatatttctttcgagttttctcaaaattttcagacaaagaactaaactaaaaaagctatggctggtccaagtcggagaagaagaagattacatctaagcaagatctattcctacacttgtggtaaatcaagtttccaagaagatcactctaatataggaggacccggtttctctcgtgtcgtttattgtaacgaaccgggttctccggcagctgaacgtcggaactacgccggaaattacgtccggtcaacaaaatacaccgttgcttctttcttccctaaatctctcttcgagcagttccgtcgtgtcgctaacttttactttcttgtcaccggaatcttatcgttgactgatctctctccttatggagccgttagtgctctcttgcctcttgctctcgtcatctccgccacaatggttaaagaaggtatcgaagattggcgccggaaacaacaggtccgatcttaaatactcaatctttaaatattctccgatcttgaaaaataaaaataaaatctttagttcaaaaaagatttatgtaaagtattaaaccctagaatcaaaatttgttttttaaaactattttgggaaactttttttcaggatattgaggtgaataacagaaaagtgaaagtacacgacggaaatggaatattccggcaagaagaatggaggaatctaagagtaggagacatactaagagttgaaaaagacgagttttttccggcggatcttttgctattgtcatcaagctactaagattcggtttgttatgtagagaccatgaatctcgacggtgagacgaatctgaaagtcaaacaaggacttgaagcaacttttatattggtaaatcaagaatctgattttaaagattttagaggcgttgttaga

SEQ ID NO: 6570 - DNA, 639 bp, Arabidopsis thaliana landsberg
ttgttctgttctcattctgttttgttctgttctcactctgttttttttattgagttgtaaataggtgatacagaattcaactgatccaccatcaaagagaagtaggatcgagaggaaaatggacaagatcatctacttaatgtttggtcttgtctttctaatgtcattcgttggatcaatcatctttggagttgaaacaagagaggataaagtcaagaacggaagaacagagagatggtatttgaaaccagatgatgcagatatcttctttgatccagaaagagctccaatggctgcaatataccacttcttcactgctacaatgctgtatagttacttcatcccgatttcgctttacgtttcgattgagatcgttaaagttcttcagagcattttcatcaatagagacattcatatgtactatgaagaaacggataaacccgcgcaggcacggacttcaaatttgaatgaagagctcggtatggttgatacgattctatccgataaaacggggactttaacgtgcaattcaatggagtttatcaagtgttctatcgcgggtaaggcttatggacgcggtataactgaagttgaaagagctatggctgtgagaagcggtggttcgcctttggttaatga

SEQ ID NO: 6571 - DNA, 2446 bp, Arabidopsis thaliana landsberg
acatctattgtttttcccggtttcaggcgagtcatctctaccgccgcgactcaggcgagtttccacgccgaggttgtgatgagtggtcgcgtctgccaccctatcattaaacatccgtcattttcttcaactctgtatccatctccggtagcgtaaagcgataaaagcatactcgcttgtttaaacgcgctagatccgagatgaatcgggtcaaacccagcggatttcatccgaatcctccactgtgccgccgtctcgtgccgctcgacccgatcggacccttccgccgcaacaacgttgagtatctgtctccctaagtacacttctgacataactcggtcttgactcggtaaactataactgtcttcgagcgagtcaaacaagctcgagtagtaatgaagcgcttcgttgaacctatcgaggaagacgattccgttgtggttcgcttcttgctcaaccaccgttacgatactcggtttaatagctttaaccgtattgagaagcttttcgattgaaccggatcgggctaataaccggtggagctcaaataccgaattaaccactaaggtttcagattcgggtcgggtttcgaacatttcgggttcaagatccgataaactctcagcggctaagcctttgaattcgaattcaacgcccatgttctgagcgaattgagctaatttccaacctaactgttgaagcgaatctgaattctccgtctgcggtggtccgattccggtgagacgaaacgacggaggtccaccgggtcggagagctaaagcttgcattaaagcaggccattgcatcccttgattaagccctaaatcaatgacgtgaactctacgcgccgtcgtaacagcttctagaatcgcttggttcgccgtgaaatgagcgaacttcaggtaagggcaagactcgtaaaagtgcatctccaaaacctcttcgaaagatgggttcaccgccgcgcaaacgtccgtctccgccgtgtaatcacggtaaatacgacgagccaaggcttgagcaaaatacgtagcgacttttcccatagctccagcttgagaacccgcgagtgttcccacgcgtttcaccagcgcgtcagctaagttgagattctcctggtgaatcgcctcagcgcacgccactagtgcgtggacaagtctaactccggtctcctgagagtcaacgagcaccacggaccgagttgactcgtccgacgattcgcaccacgatccgagtcggatcctcttgctgctagcttcctcgtcaaagacttcctcttcctttggaaacgcagaaagacccggaattgctctgagatcgtattcggatctatccacacaacttcgggtcgtgtcaagatccgaagaagccgggttgttcagctcagaaagcatgctctcgacccagttagagagatcagatgggttataatgaacagagtcgtttaagacagtagaaccaacatcatcattagacaagaccatctcaagttgttcaagcttctgtgctacttcagccatctcagaagatcgaaccttgtagccaagaacagcaagaagctcatcatccatgttgctgttgttgttgtcatcatcagccttcttcttatccgccattgaaggaccttctccggaacgagaagctggtagtggttttggtggcggatcccatgtttctccgtatcctctcttcatctttcttgttcttgtgatggtgagttaagagactgatgaagttgaaaaaaaaagaacaaaagagagtttataagaaaggagtttactttacttcatgggttggtaaggtttttattaatgggatttgaaaaagaaaaaaaaaagaattttgtgggtctttgttgtgatttggttacagacaatttttgtggaaagaaaggagattctgagaggagcaatatataaagcacgagggagtgagagagaggtccaattagagaagtgactgtgaagtgtgtttaagagataagaatcagagcatgccactattgtttggcatctgtttctctctttcattttttcctaactccaagaaatttactcctttttttttgtagtaatggataattttctttataactgtttagtagagatttctaaatctgtttagtagttttgaccaatggaactttataacttttaggttgtagtgtgctttcgtcatatttgttggtaagatgtttttaagttgtgaagtgattaaagtgtcttttaatgatagtgtcatagtcttatagacgatcacgacttaattgttcttaaatgccattgaatattgtcatattctcgcttacgacttcgttgttcttaaacccaaaccgcaccaaatgcgtgttaagataatggcacttaagggtagttctttttccttatgttggataatgtttaatttttcacttaataattgaccttttgataatcaaccttttttc

SEQ ID NO: 6572 - DNA, 3457 bp, Arabidopsis thaliana landsberg
cgagttgttgagaggtacatacaaattactttatacatttttttgattaacattctgtcaaacataatgaaatcattcgtctagatgggatcataaggggcttaagacgctacccaaatacatgagggtttgttttgaagctctagatatgatcacaacggagattagcatgaagatctacaaatcacatggttggaacccgacatacgctcttcgacaatcggtaattatcattcaaaacgtaatgtgtatatatattttgtatcatatagctcaactggttcaaaccctactaaaaatatgatgtctttgtttctcagtgggcaagtttgtgtaaagcattcttggtagaagcaaagtggtttaattcgggttacttacccaccactgaagagtatatgaagaatggggttgtgagttcaggtgttcatttagtgatgcttcatgcctatatcttgttaggcgaagaactaacaaaagagaaagtcgaactaatagagagtaacccggggattgtatcatctgcagctacaattctcaggctctgggatgatctcggaagtgccaaggttatattgaactactgataactaatgtgactagagagaatctgaaacttgatatcgaatcttagatatggtttttgttgtttaacaggatgagaaccaagatggaactgatggatcatatgtagagtgttacctgaacgagtacaagggatcaactgttgatgaagcaagaacacatgttgcccagaagatatctagagcatggaaacgcttgaacagggagtgtctgaatccatgtccattctcaagatcattctcaaaagcttgtctcaacattgcaagaacagttcctttaatgtacagctatgatgatgatcaacgacttcccgacgaatatctcaagtctctaatgtaaaaaagttccctttgacgctctggaaataagcagtctgtaaatctttctataagactaaaagaacttcgatctggtaaacaagtccttaaaggtcagtaaacaacttactcaggtacaacggataaaagacataaggttacatacactaaaaactactcggcgaggtatggactatctaacgcttgctatctggagcttactcacgtttgccctcttcaacgtcgtctggaagcccaaatagaagttcattcctttcaacatcttctgtactcttaattccactacctgtcaatgagataccttcctcttcaaactcatcccctgtttccgctaagtatgagtacctgaaaggtttaaaccaattagaggtaagctgagtgcaaaatgataatctctcggtgaagagcaaataagtgtcttgaatcttgacatctttggcagttgacccattgggaccatcggagtccaaaacatttgagtaaacgctaatggaagtattagaaccttgtaggattatttgatggagcccaaaggatgcatatgactgctaacagaccataagagagtaaattccaaaaagctggaatgatgcacgccattcgccagagttcgattagagggtcagttccgttgaagtatagctgatacagacacatagaagaatttgatttcagttacactcctctgactaggggtttcatgttatacacgagacacagtcactagagtagcgatttgttacctcaaaaccaatccaagcgatagagagcagaacagagatagcgagtgcattggtgaagttcctataaagctcaagcttggccatgtttctcttaatctgtagtgaaatttagacagataagcagctgaaaaaaagagtacgaagaactggatcgtcatagatggcttaagcagcaattgtatatgattttccctcgaataggctgcataaattggaatctaagtacgataacatggttaaaacccatgaaagcctatggtatatatacatccttctgatataataatgtgacggatcatgagtatccaatattcgatataagtgtggtatcttacctgaagtttctcaagtgttcttgccaatgatgagaaaatccacagaataaagcaagcatccagtaatgccacgggaataaccaaaactatcatcgtctttcccgaaaagtcattgatgtttcccaaatgctcaaccaactcaagagcctctgttgcaacaaaatatatgactccaagtagaagtatcctcgaggttataccaccaagggtaggctttacaacaccataacccatagagactaccagaagaagaagcctagaaagcgtcttctttatagaagaaaaggtcaccgcccatagggtaacatccattggcctcatcccagtggagttaaaattaacatactcaaagtatcgaacagccatttcacacataccaagagcaataaccaaagtgatatgataatgcaactgaattatatccttgcaaaactgaacaaacctcacaaaccaaactagaccaagcaaaatatacgctaacgacataaagccaaaaacgttcattaaaggagcaacctttccaggtaaataaccatcagggttcttccaaactgttctccccttgatcctagtaccatccaattccgggtcacatatcatgaaataaagataatacatcccagtcttattgataaccacagtttcaggggacatgttaacttcagtcttattccctttaaagaatgtcttgatctgtcttggccactcaacatcattagactctctcttaatgataacttccccaagactacaagatccagtatcagctagctccggcgtgcaacaaatcacttcggatttgagaaaagtaccaccgattctatcacggtcttttacctcaagtataattgcttccactaatcctgaagttgactgcattgcattctgtttactagcagattcctttgtcctcacaaatgttacatcatcaaacctaaaaggaacaaactttgaatcagtacgattccaaatgcacaaactttgaattatgaagatgattcagaaagagtgaaactgaccttataaaggacttgcctttaaaagaattatcagaagaagaagaagagtttagatcttgagatttggaagcgtaaagaccttcgctaccaccatggaagaagcgagcattgaattttgcagtgaacttttcgttgttgtactcatgaatcgagccttccgtagctccgatcaagcttccgatgagcaaaaccccgatcgcccaaaaccctaaagaacgattcttcatcgaaatatccgatctgattctagaaattgatcattcagagatgaagaaagtagaagatgctcgtcgaagatttttgttgggttcattcacctgtaacagacacgattactacttaaaaagacgagcattgaacatataaaaaaatagtcacaaattaatttaatttatttatttttctttatgtactatcaggggtgtcaaagtgggtca

SEQ ID NO: 6573 - DNA, 1047 bp, Arabidopsis thaliana landsberg
taacccccgaaactaaatcccaacatagggagacaagaaaagacataaaaactaaaaagatctaaactttattgaaaggatatgacgcagagaaccaaatttcttactacccgagccaaccgagaacgcaaaacaagcaggaggtcgccgaaggagctgacaaccaacccaaaaaattccgatctactagcctcacttgataattaagagtcttcagaagaaaaaccttgggataccttggatggcgggacggtggaatctcggcaaaaacatgcagagaccgtcggaattgccggaccggatgtgtcaaccaatggacgtgaaccggtaaaggacccaaacctaggcggatcttgccctagatccatttgttgaagctgtgtgaggaaacctaaaaattaggtcgcccaaaccgaatcaccacacatcgacaatgagtggcttagagccaacgcggttagggccaaggaggactcatgcaaagaagaaacaagaacctgcaacaaaatttaagcaacaaaaatctagatctaaaaagagaaaaaagtagagaaggaatcaaaatgaaaccaatccacagatctctccacacaaagacatgaaactagataactaaacaaaaactgaaaaaaccaaccgacgccgtgaccatggtggcccacacgcgccggtcggagacgaagaacacaagcagcggcgagttgaagagagaagggagaaaaataagagagagaaaaaaaaaaaggtagttctctaactcttgagttatacaattacattgtttagcacttatttacagttacttaccttaaaaaagttgttattttaaaaaaaaacgaaaaacgtaattttgatttagtatcttatattaaccttaagaaaaccacgtaaattcaactaaaatccattttcactcataaaccgtaaataatatttcagattattgtatataaaacatgaaatatattctaatatgatattatttaatttctatactttaataaaatcaaaaattaaattaaattctatggattttttatttatgca

SEQ ID NO: 6574 - DNA, 724 bp, Arabidopsis thaliana landsberg
atcccaggtttttcttctgaagacttttaattaccaagtgaggcaagaggatcaaattttcttaaagtgggtttctcaatctttgacgaaatctctgacgcctgttaattttacgatcttggtttatttggttaaagagagaactatgtttatgtgtaaaatcatcactcatgttttattttctctttttccgtcgtttccccatgtaggggcttagtgtttgggggtttcattcctcgccggcttgtattccggaagattatatcttcccggctttgtcgtcccgtaattcactcggacttatgtatctgatcatggtttgtgataataataaaactagctttgtgaagaaaaagaaaagctaaaacattatgttgctaagttagtcaaagctactcataaacccacctgtctagctaaacatcacaaactaaaatgaaaagaatttaaataaatttaaaaaagtacataacttaagcaatctttcacttccaaacaaggcatgtcaatcattatctgcgttaaatatctagtatgctgcttattcttaacatatttatcatgcaaagttatattattgagcgaaatatgcgtttttgttgtactcaataataaatataatttacatttatatatctattcccattaataacatcttatcatatactacaagatgatttatctataacgaaacttcaagaaaagaaaaaaacgttatatttta

SEQ ID NO: 6575 - DNA, 1260 bp, Arabidopsis thaliana landsberg
tgtaatataaaacacagtatgattgttgttctcgaaatcaaaacatcctaaagtgaaattttcgatcttttttgtgggtgcagtgcattagggacatgggtattctcagtcctaggcgcattggttgcaatcccggtaggcatcaaacgcaagtctcttgggccactcgtgttctttggcacaaccggaacaatgctcgacatcatcattggtgtaagtcaatgcgagagagaacacgcagaacaccaaatgaagttactccaagactctcaaaatgccacaacaacaaccaccaacacagagactgaagaaagctcttccatgtcctaatcttttttacatctttctcaataagactttgatgtaatttgatgccactcacaagttaaacttgttttaagatattgtgattatcccatgtatcttgagaaaacaaagaagaaagcttttcatgattacaactgattcattgacattgtcatctccaccaagaaattgcaacacacgaagcaatagaatttaatacgataatatatctgaaactgttacgagcaatgtatatgaatcgataaatcttggactccaatatcaaatggtattcaaaaactaaaaaggttcaaagtgaaaacttttatcaacaaactcttgttcaaactaatgaaacaaagaaagattattataacgataaacgatgaatctcactaaaacgacggcgttccaagtcgaaagcagagggaagattccggcgaacacaaactcatccgacgacgaagaaccgaagataagcggagaagcagagcgaaatcgctaggcagatagaacccaacgtaagtttcatgtccgtctcttctcgtagtctacgcatcaccaccggcgcaaacgtgagtccaagcatcgataaaccgattctgataatcaccaccataaagcacatatcggccatcttgttcagctctgatgcacagtataacgccacgtgtccgttcttcgtcgtctccgttagatatgaaccgtcgaaaccagaagctcgtttgcagattccggtgaaaatggcgagcgaaactgcaagaaagaaacgatcgtttacacgacgagtttcttctcttctctcacgacctccatcttcgtcatccattgcgatctcgtagtcttgcaggagaaaatggagattttgaaacgatgattgatgaaaaaatcagaatccgggaaaaagtgagaaaatttgtctctgagaggttttggagtttgttaaagagggaa

SEQ ID NO: 6576 - DNA, 692 bp, Arabidopsis thaliana landsberg
gtgtgtatgtatgtatacataaataaaatgtatttaaagcaaatgatacatccccgattgtttattcaaattcatagtcttgagagttgttgatgaatagtcattcttcctttgctaatatttgtttctccacaaccaaatctaaacgtagctttgttaggaagaactgatcagagcagcgactggcccaataaaggcggcattgatgtaagttgtgggctctgcatgagaataatctgttcttttgtcgttatactggtcggatgaatttggtccgcccacaattgcgccggtatgcacattcgggtttggtgtatcaaaattgtagtatgaaaatcctccattacagtcgattttctctggtttagattggattgacggtaatgacgagcctctatgatgaggttgtgtaggatactttgttccaaatccaaccatgtaagacattttcaatggattatttccaaggatgtaatcaacctgaatatcaaaccggttggttaaaaacatggtattggtatatagaaccagactagcgggataatttaatttctttacctgtgacttggcaaaatttcgaatttgagatacggtaaactgtgtcgacccacactggattgaaccaaccccggctttggttagagtttttgagtaataagaaaaaaatagtttgtagccgttgttaccatact

SEQ ID NO: 6577 - DNA, 649 bp, Arabidopsis thaliana landsberg
cgtcccttaaattctaaattttgccaaatcccaggtaaataaattatttccaccttgtccggttctgtacaccattttcatgttcttaatcaaccggtttaatattcaggttgattatatccttggaaataatccaatgaaaatgtcttacatggtcggatttgggacaaagtatccaacacaacctcatcatagaggctcatctttaccatcgatccaatctaaaccggagaaaattgactgtaatggaggatattcatactacaattctgatacaccaaacccgaatgtgcatattggtgcaattgtgggcggaccgaattcatccgatcagtatagcgacaaaaaatcagattactctcatgctgagcccacaacttacatcaacgccgcctttattggacctgttgcagctctaatcagttcttccggataaactcacgtttagattggttgtggggaaacaaatattagcaaagaagaatcattactcatcaacaaactattatgactacaaacttaaataattagtcaggggatgtatcgtttgctttaaacatatatctctatatagatgtatatacctacacacatacacacactcacatatatatcattgaatcgtatatcttagctaaaatgaaaacta

SEQ ID NO: 6578 - DNA, 3478 bp, Arabidopsis thaliana landsberg
tggatttgtggaaaagacggcttatatagctttgattctaggttacaataaaccctaatgagcgtgacacctaaatgggcctctactattttcaaagccgacttagctgggtaataatcaatgggcttataatatagaacatacattatttgttgggcctaaatcatttctatgttttcttaacgagccgtaactcgggccgataatatatatttagtacacattaatgagccatatgccttaggcctccagcttggtcttaagtttttcttcaatgtgggcttgaatatattttacatttttcacctcataaaaaggaccaaatcgtttctaaaagtgtcactcactcgtattgggggatttaaaacttattatcttttgtggaatgctacatagggaacaaaaactctagagaaatcgagacatcctgcttaatttatttcctctggatccattaacctatcgtgatattcaaaccttgcatttgtgttctggacgatgagtaaactcaaagtcaatatggacaaaagctctctcaacctcagagagttgctccagcttctcctgaagagtttctcctatgttgtgagcttcatgcagcctcatgtcctctggcaacacaatgtcaacttccacaaagtagtgtgacccaaacgtgtaggctctcactgtgtcaatgtgttttatcttctcgtgatggttccatatcaagaacgttagtttcgccaagaaatctggtggtgctgagcgtcctatcagtgaatggacattctctagaactgttcttgcccatgtgctgattgtatacagagcaatctgaaaccacaaagaatatacgttttctcaatctatctcttatgtatcataattaagtcacaaaagacatttcaagaatggataaggttggtgatgatttacttactagtatagccccagaggggatcaatccaccagtagaattttacagctaaaacagctgttgctaaaccgactgaattggtgataacatcaaagaggtgatcttgtgcataggccctgacaatttcgttctggaaacttctgcagtaaagcatgagcagaaacttgacgactgtagcagaagccattattccaatcatccatttttcctcggtgctactcatatgagaaccattctatacaatgagaaatatcaaactagattagattacatcatataactggtgttaggagtttacgagaaaagatggaatgtggtcctcggtgttgtaccttggaaacaagtagcctggttgactctagtatcacttgtagtccaagagttgccatcacagatgcaaacacaataattccctgccaaattttaagcaatatggcttttagtttcgtgagtgttaagcgaaccagagagagaattacagagactataccacaggttgcattcgtcgttttccaattggatagcgaaaattgttaggtgttctcatggcattagcagtaaaccatagaataaatccagacaagagatctaagagagagtccaaagtggaagcaatgacagccatagacctactctccacagaagcataaacttttgctacaaaaagcacaaggtttgctgcgtttgagatgtgaactgcaagcctctcgctctttgcaagcttcttcagttcttcctgttgaaatcaacaagatgctcctatatatgaagaaaatggacgaaagatctcagaagaagcctaaatgaagagagcaagagtggtacctcagttggagctccagatacaaaaccagtttcgttaattgtctccatctcattgaaaccctccagaagcttctcttgctgtttgtagtactctgagactttgcgttccttttctgatttttcacaacagaaaagagtaaaacccatgttaagttttggtacctgattattactaatgattcaaagtttcaaacgtgtttaacaatcgatccttaatggtttttatcatcctcccagcaaactacaatgcgtgaaaactccgaagaatatgattctgtgtccctatcacactagaaataaagaaatgattatgtttcttgcaaaaccaaaagaatattcccagattcacaatggaatctcatatatgcttcaagttgtaaacagagaattggatcaatacaaatgcttttagacagaagattcgataagatcattctacaattttcatagggttacatattgggaacaccgtacatatatatatacttaattgcggaaaaagttcgcgtagggttaaattctcaatggaagaagagtaatcgcagattagagtgacattccctggcgtgaatcatgtaaacacgtaacagtacatcgataatacacaggcacacgaaacagaggaacggagatttaagacaaggacgaggaatagaaacttactcggagtacggagataacgagacaagcgagtacggccgttgtgacgtcctgatgataacggtgaagaagaagggagacggaatgtgtccaggctgagacgccatcaagatggtggcgaatcgtcttggtcaattggtaaaaggtcgacattgtagtctcctccactgaggccgcgatgctccatcgccgccataaccgatcgctctcgctctcgctctgctgattttgtgggggaagttacgagagaatcaaaagttgttgcttattttttggcctcttttttggaacttttggtgttggccaaaaagggccacatgtatttgtagtagaaaggtccaaagtccaaactccttttccttaatcaaaccttgattagcaaaaaaaaaacattattatttccaacatacaaatcacaaacgatgcaaagcgtttaattatatacacatatatctattggaaaacataaaaccatgagctaactggattttcttatgggtattgttgagtttaaaacgtactaattaagaatatctggtattttcaagagattttgtttgtttctctacgcaacaaagcagtatctttcgtttgtcgtagaaacgaaataattagtagattttaatattcataagaacacacgtggctgcggatgcatggtgatgcaaaagttgtggaccggaaaactggtattgtttttcttcctggtgtagataaacaagtacctttttgtccatattctgattagtttacccttacgtggacgtctctgatgaacaatatcacactctattatcctttttttgtaagataaattttgaaataattgtaggaaatgaaatgccttccgcgttagttgttacgtatttagagaaagaagagagaccttgaatcactgacgaaatcattggagactatatatctttctgtgacaaacttgtttgatttggaggttttaggtttacatcaaaccatgagaggttcagcggaatctgtaataaacaaaaacttgagggttcaatatgtaacaaacaaaaatttatatatatttgtcattgacaaattttacgtgtg

SEQ ID NO: 6579 - DNA, 584 bp, Arabidopsis thaliana landsberg
  unsure (1)..(584): unsure at all n locations
aaactagtacctgcacatggaacttgactcacattgacaatgtttacttagccaatttatttgtactttccaaagttggngatcaaatctattatatggccacaaagttgtttgaaactcaacctagatagaggataaaatttcgaaagcttcaaaatttagagagaggaaaaccactttctcgttaaagtcttttccttgcttcacaagtttgaagctttccactacagagagaccctgattcagtttaccagtaaaagagaagaagcaaatgtgtgtgagaattggtgattagggtctcacctccacttacattgtattctagcaccttcaacgaaagaaagggggttgacttgagatccaccaataaagaagaaaaataaagctcctcactttgtatagagaagacggcaaagaactcacttgaaattgcagagatcccgacgacatgcttcaggtctgttttggtttgtagccgattaaaaaagctttcgaagactgagtgagatgggcttcggattgggcttatgtattgggcctaanagtttgcttatttttcttaccaaaaccctctatgagacaac

SEQ ID NO: 6580 - DNA, 1067 bp, Arabidopsis thaliana landsberg
  unsure (1)..(1067): unsure at all n locations
gcttggcgaaactgacattcttgatatggaaccatcacgaacaaattaagcatattgacacagtaagggcttacacttttgggtcacactactttgtggaagtggacattgttttgccagaggacatgagactacaagaggctcacaacatcggagagactcttcaggaaaagctcgagcagctcgctgaagtagaacgagcttttgtccacatagactttgagttcactcatcgtcctgaacacaagtgtaactagattttaagtagtaatttgtagtactataattagttctttagtttatgtactcttcgtgtcgtttttgtctatatagatacttgaacgttgtgccgtctctgtttatcgaatgcgcattgtgtgtcgtttgaagctaatcgtcgacattaatagcgtttcaaacactaaactcaaaataaagataaaatcatatataataaaataatgaattttaaatgaaaaccactcaaaatggtttttatctatcttccgacaaaattccgtgcttcattgctcttctccacaagacaacatttctctggctcagaatcgacgccatggaaatgtaaagaagaaacaaagacgagctctcaaatccagcagcaatggcttttcttctttctaatctatcatnctccgtcaatccaaatcttcaaaccggaaaatacccaaaccttaaacccattttcagtcaatctctatcgtcttcgtcttctgttagctacgaatttgtagaagagaatctatctacactctctctattgagcatccagtctcctcctcttaaagacacgcaagttcagacaagacacagttcgcaagataagcataataaccacgacagagatgaattctatatcaatcttggtgtcgctgtccgtacacttcgtgaagatttgcctttgctcttcactagagatcttaattacgacatctacaggtaaatntctcgtttgggtatttgataattgatgaaagaaagaatctttggatgctatcttcagaaatttatcattnntggataaaaaaggagcttcctttgatctctct

SEQ ID NO: 6581 - DNA, 2184 bp, Arabidopsis thaliana landsberg
  unsure (1)..(2184): unsure at all n locations
atgtgataagttaattaaatatgtcttgtcctggagacaatagtcttttgggatcaaacataattttctttctcaaaaaatcatcccattttggtccaaaatgtttaacccaatcttcttttcttgtatagtgcatcaaatattccttaatcttaattcccgagttctcacaaaactgaataaccttgtcgttgagattttcaagttcttgccaatttnnnnnnnnnnnnnnnnnnngcagtaatccgatcacataaaaaacatcttcgtccgatgtcatcgttgacatgcgattgttccatctattaataaaataaaatcttgttaacaatttaacatacattaatgggatataatttcaactagaaatatatcaaaaagtaaatacttacttgtttcggtttgtgggatagaagagagtaacaccagaagttgaggtttggtttagaagaaggccattaataacaccatcatgaaaatcttggattcgagaccccgggacaaagatgttaagccatggatgaggaacttcccatagtcctaacgatctgagtttatcttcttcgtttcggacacggttcaagaaattcgaaatccggaacctcttggtcgcaacattaacccctgaagcgaacccagaggttgtcttacggtgtcaatcacctacaacaataaatcctttattttggagcgtatggttatatatggtcacggtgattcgtagatgtgtatgagtaatgcttgaaaatgattcttttattctttaaacaaaaagatttgaacgatttatttatatcatgtgatttatttactttggatcatatatgacaagtgatgatggtaattggtgatgatactgattgtgtgaagataatcatcatgaatggattttagtacctggtcaataatgggaagggtggttctgtcataatacttggctacttcgagaacatatatgatccggtggtcattcacaagagatgcgactcttgtttgatcggagagtgggaagaaagaggtgtctacgaagccgtttgacatcataagttgaccttccaaaaagtcaactccaagatcattggtcattgatattaaacgctcttggtctcttttaaaagccgagaagtcactgtagagtatgcgagaccatttcacctgcagaattgtatatcaatttatatccataaattagtccatttaagatcatcttctttagattgtatggtctattttttcataaagaaaaaccaagaatcatatatagaactttaatcactatagcgatagacatataggtccaagcgaccataacttttatctaaagtctatacgtacacaatttatagcagtttaatataactatatctaaaacttacgtagggaaatataataaaaaagattagatattgacatcaacaagatttgcaagcataagacaagattacactcgagcaagtcctaggatttattacgcagaatctaataaaacgtaagcaatatcagagttaattcaacaaaaatatataaattcatcttcaaactcagccttttgacttgttatatatacgtacgttccaaccaaatcaaatcaaattttggatttaggaccactacattaaaattataaattgattacactatagatgatacatacccttgtgggtgcatgatccaacgcaatcctggccctcgttataataccgaattgacccaaacctcctaaaactccatagaacaattcagggtttaactttggagagcaagtcatcatttcaccttttcctgaaatttagtattgtgaacaaactccggagttatttataatcacaaattatagcataactactgttaatgaaggatatgtatttctaaacaaaacgtattttttggagttttatactggttatggcgtgtgagttttaccttgagaatcaaatttgtaactaaaacattatatattatcatcaataatacacatgcatgtgatatatatatcgctgatgttactacaattaaagcttgcagacaaaaaaagagcatctagaagatcatagatactgtttcattcttaattaagagttgagccgtacaaaatttatattaccaaaaaattaaaaaatttgtacgagattactngagtttggtatttacgtaccggtatgacgtcaagctcatgacgttact

SEQ ID NO: 6582 - DNA, 448 bp, Arabidopsis thaliana landsberg
  unsure (1)..(448): unsure at all n locations
nnnnnnnnnnnnnnnnnnnnnnnnnnnnnnnnnnnnnnnnnnnnnnnnnnnnnnnnnnnnnnnnnnnnnnnnnnnnnnnnnnnnnnnnnnnnnnnnnnnnnnnnnnnnnnnnnnnnnnnnnnnnnnnnnnnnnnnnnnnnnnnnnnnnnnnnnnnnnnnnnnnnnnnnnnnnnnnnnnnnnnnnnnnnnnnnnnnnnnnnnnnnnnnnnnnnnnnnnnnnnnnnnnnnnnnnnnnnnnnnnnnnnnnnnnnnnnnnnnnnnnnnnnnnnnnnnnnnnnnnnnnnnnnnnnnntgccaactaaagcgaggccacctttcttgagctaatagtcgatcttaaagggggcggtacattcgctaattgagtaacatataacacatggggcgtgtttaaatacccaagagttcgacgaggttttggagctggataattacttgcgcttggaat

SEQ ID NO: 6583 - DNA, 1198 bp, Arabidopsis thaliana landsberg
tggagcatttcggttttcttagatttgtgtagtatttcaaatatatcatttattttttttcgaataaagaggtggtatatttttaaaataggaacatttcagaatttttctttgaatttacactttttaaattgttattgttaatatggattttgaataaataatttcagggaaaggtgaaatgttgacatgctcgcgacagctaaacccagaattgttctatggagtgttaggaggtttgggtcaatttggaattataacgagagccagaattgttttggaccatgcacctaaacgggtacgtatcatcatattttaccatttgttttagtcagcattcatttttcattagtaattccgtttcaatttctaaatttttttagtcaatagaaaatgattcttatgtcagagcttgattatttagtgatttttattgagataaaataaatataacctaacggaaataattattttactaatcggataatgtctgattaaaacattttatgatattacacaaagagagttagagacgtatggatcacaaatcatgaagctttcttagatggtatcctaaaactaaagttaggtacaagtttggaatttaggtcaaatgcttaagttgcattaatttgaacaaatctatgcatcgaataaataaataaaatggattattttattaagtatagtccttgtaatcctaggacttgttgtctaatcttgtcttatgcgtgcaaatctttttgatgtcaatatataatccttgtttattagagtcgagctccttcattagtcaactactcaaatatactccaaagtttggaatatagtcttttgacaaataagaatcttacaactgataaacgttacaatttggttatcattttaaaaaacagatttggtcataatatacgatgacgttctgttttagtttcatctattcacaaattttatataattattttcaagaaaatattgaaatactatactgtaatatggtttctttatatatgtgtgtataaattaaatgggattgttttctctaaatgaaattgtgtaggccaaatggtttcggatgctctacagtgatttcacaacttttacaaaggaccaagaacgtttgatatcaatggcaaacgatattggagtcgactatttagaaggtcaaatatttctatcaaacggtgtcgttgacacc

SEQ ID NO: 6584 - DNA, 775 bp, Arabidopsis thaliana landsberg
ctaccataatagcctttagatgttagacctcacaaatgacatattaacagtttcacattttgttaatcaaaagatgtcttgccctggagataagagtttcttgggatcaaatagatctttcctcttcgaaaaatcatcccattttgatccaaaatgctcaatccaatcttctttactagtataatgcattagatattgcttaatcttaatacctgaatccttgcaaaacctaattatcttctcgttaacgctctccacttctggaagatcctttggggtagcggattgtagtagtccgataatatatataacatcttcatcgatctctggtatcatcgccgacatacgattgtcccatctaacaataacagcataatcagttcatagaaatttatttactttggttcttgaagataaatatgaatgaagagaagtatgtacttattccggtttgttggatagagaagagcgagtcccgaagctgatttttgcttaagaagaatgtctttgacaacaccgttatgaaaatcgagaatccgagatttaggaacgtagaggttaagccaaggatgaggaagttcccataatcccaaagatctgagtttattttcctcgacatgtacacggttcaagaaatcgaagtaggccacgtcgtgcattgatatgaacccgggcaagtaacttaatgttttcgttaatgtgtcaataacctacacaatagtagattatgagaagcataagatgcaaaaaaaaatgtaacgatgatgatgatgaa

SEQ ID NO: 6585 - DNA, 2617 bp, Arabidopsis thaliana landsberg
  unsure (1)..(2617): unsure at all n locations
agatataaacacaactagagactttcgaagaagcttacaagctacgagcacgagaagctagtttcccgttaccggtctccgtagtgtccatcactaacaaaaatcaaacaagaatcttaagcagatgaagaaacgagtatgtaccaaaccaagacgcgaatttactttactaccttgaggagtagcttcagagacgctctgagattcagaaacgtccatggaagcttcctcgtctctattcttcttgttcctcttcttcgtcattgctgattaggtcagacgcacgacggcacgaagcaaagcaacgagagtagagagacggaaatcaatcgaattttagaatttcacctaatgctctgtgtcgggtcaatttactaattcgtgtctacttattgggcccatagttttggtaaaggcccatttatccactaatggataataaataaataacagccnnnnnnnnnnnnnnnnntacctaattagagtttcattgtctctgtattttcaaattctctctcttatgttatgtattccgttggaatggcttctccttggcgaaattcagtttctttatttgaggtttgttgctgtttttagtgttattatttttagcccttcttgaatttctagttacatgttacaatgttgagagagattattattcaataaaattttcagattttctggtttcgagattcttctgctggcttttatggaactcacattacgcgaaaatgggtattgattcaagacaaaaacgaaaaagtttgaatttttgttggtgggtggattttgaggtttatcggcgtctcctccgactacaatgatgaaaagttcagtgaaggaaattttggagtctcttcgcctgcttgattcaagcgagaggtcttcgtcgcttccctctccgtctactttcagggctccaatgccgttgattcgtcaatctcttccggcgaagtttcgtaatgcaatttcgctggaaagcaaaaccatagagaaagaagacaaggattggagcactgagcagatcacacaatctgcagagaaggagaaaactggaaatgaagttgtgaagattagtactgctcagatgagtcgagcgaagaactcgcatgatcccgaatggatcaatagcgctgagtatttcgtcagggaggtaaatgattgcttctttgtgttatcttttatgttgtatttctatattcatcattgaggagaaactgaaaggtttgaacttttagtgattcattattgttttaaactaaagtatgcggtttctagtttctccaatgacaagaagaatacagtttttacattgcatctattttatgccagaaactttgtgtttggtgtcgagttgctgctaatgggcagtggcacttggggaagatacattctacttcttctagtgatgatgtgtgtgttatgctgtccgctaacgacgatgtaagaagttctttgagattgttgaaatttcttaggatatggaaaaggccttatgctgtagttttgtgttatctaaggctgtgaaagttgcaatggaggagattttccctgctaacccagagattttagaaggagttgaagaccttactcagcttagttatttgaatgagccatctcttctctacaacctccgggtcagatactcacaagacttgatttatgtaagttaaaaacattctggtttgttcgtttatatttcagtgtagcagaggtatataacataattttaatgttttctgttttagagtaaagcagggccagttttgattgcagtaaatccttttaagaatgtccagatctatggagaagagtttctatcagcttatcagaagaatgctttggatgctcctcatgtttatgcagtggcagatgcagcttatgatgatatgatgagaggtgagtgaaagcatacactttctccctttttggtgttgagatagttattgtatgcatttacatttttgaatttttctttacgcagaggagaagaaccaatctattatcataaggtacgatgctttctattctgaatgctttttgtgcactgataatttgactatgcatatgtgaaggtgacttctgatattcatatcatcaatcaaatgaataaaatattatttcttagtggagaaagtggagctgggaaaactgagacagcaaaatatgcaatgcagtacttggaagctcttggtggaggtagctttggggtggaaaatgaaatcctaaagacaaattgtatacttgaagcttttgggaatgctaaaacatcaagaaatgataactctagccgattcgtgagtaatttgtacatcctttttttcttcaaatttttgcatgattgaaagttttcctttcatttgaatactaaaatcgtttgtataaatttgaaagtttggtgtcagccgtaaattgagaagtggtttggattcaatagtaaatctgaattggtgcagggtaaactgatggagattccttttagtgcaaagggaaagatatgcggagctaaacttgaaacttgtaagacttgaacatttgtatgattgtttgtcatattttcttgactatggagctcacgtcttttattattttctcaccatgtgtgtgtgactac

SEQ ID NO: 6586 - DNA, 5722 bp, Arabidopsis thaliana landsberg
ttcagactaaatattgaacaaaagcctatcacctaagctctcgaatatcatgtcgaatgtagcccctgctagatcaccccgtccagcacacatttggaacatggcataggccacggtcgccgattcatcatcaggaactatttcatttagcaaagcaagggaaccttgtatatcccttttacgggtcaccaaacccaaagcttcataatacgagcctgacgattctgaacggccaacaacgctttaagaagcttctagctacaccaccaggatatattttcggtggctcgagacatagagcagttagatttgctgactttacaatgtcccgcgagagtgcaatgtcccttcctcgtttgtttgtgagtatcaccggagctaagtaatatgcgtcgtcatctcccagcttcttcacaataatatggaagatatcatctggtaaatctgataaagacattacttttgaggtttatgaagtttaaaaggagtaaggaaaatgaggtgtggatgagtagacgaaccactgaggacatatttataggaaacaaaaacaaaactgactttcattgtttaacctaaacctatctgggctatagtactaatcaaacatccgtacacgaaaggcgctgtacagatacccgtccgtaaaacatgtatgctgtacagatactcgtccgtacactgtcttacggtacactacgatgctgttcctatagtacactacgtatgctgtacagaaaacaatccgtacaccttcatgtacactacgtttgctgtacagaaaacaaactatatatgttctcttccagcatgtcataataattagttctttaataatcaattcaaacaataatcagttctttcataattaaatcaaacaatatgttctttaacaacccattcaaacaataattaggtctttaataattaattcaaacaacatgcatgctgtacagatacccattcaaacaacatgtttactatacaggaaacaatccgtacaccttcatgtacactatgtatgctgtacagaaaacaatccgtatacctactgtacactaagtttgatgtacagaaaagaatccgtacaccttacacggtgtacagaagcaatctgtacaccgccgaggatatacaaaataataagttataagtcatattaattagttggcatcttgacaaaaaacattctttcggttttataagtcaaaaacataagtttaaatttaataattatacaaatgcatacttcgctcgcaagtcctaaatataagttttaagtcataagccttgtactagtttagaaacacacaaactataagtttaggaacaagtaactagtactcgtcctcacattcaacaaaagcagcatatgtatccatcgcataaaccttccgaatcctaatcaccacttcatccgttatagtcgccatgttagtgtaatccattccatgagcatgcatttcaaggaacttgcatgccacaggcccacagtctccatcgcctttgttgtcgtacagtcctgttacccgtgtacagctgaaagggtcagttgtcatatcagcggtgagagttgggcagcaatacttcttcaggagccaaggaatgctactgacgactggggtcatttggaattcgactgcttcttctggagttggggagatgaacgagtctagaacatctatgcttcgttgcttcaagtttatcaccaatccaacccagtgagaacacccccagttcattggaacgtagacaacatcaacatgtttcaggaattctgatttcatgtgtatcccagtcgacttccctgttacgtatcccttgattgtttttccccactcgtactttgccttgtcctcgcatttctggaaatcttcatagtgtgtggacagaagcgttgcaaaccatgtatcaatgattgccacccttctttgactgtatgctttaccccggcgtctcatcagcattcctgtaattagctgcatatgctgcagctcataatagagtaagtcatgtcaccaaacccaatttagctatgaacgcatgaaatattattagttttgcctcataatacctcagtgtttacccatgtctccttcgttgcaatgtccaagaagtggttgttagtcactgtgtgcccagtgcagatagtgtactcgctgtttagcttggatgttagatttaaaaaacatttgtgtctgtttctaataaaactgagaataacaaggatcaaacctttgtggatcatctgcaaggagccttttaaatgtctggaactctgcatcatccaactttgggagaggtgtgtatgcaggttccttggttctgcttttaaacagagcactgatcctgggatccatgctatacttagttgtgtcgaggaagcgagaccgtattggaaaacgtttacccggcactggctggcgtatattggttctctccttcacaaaataagcaggtgaaacagcaacaatagaagtgtcgggtataacctaggatcaaaacatacaacctaggtaaactatttgtatctcagatttgtgtatgtaatctactactcgcaatatagacctgagcaataggtgttactcgtgaacaaagtgtttgccttggcgacccagatcgatcccccaaatccaatgcttcttccatagtttctattggattggtgtccataggcttgtcttgcgtggcggttggcactggcgaagtagggctccctctacccctttcctgtggcttacaaaaagaaaacaaaagttatgcaataacaataaaccaaaaggggtagctttatggttaacacacaagcagctacatgtgctcgcgaaattaatacctctgcacatttttcattctgggctgtttctgattcctcctcatttatcccgtcttttggaaggggagatggtaatcaaagggtcgctaaggtctcttgaccatctgaggttgccatagctgatgatgcaccgtcctcttcaaagagagctcgaatcttgttggaggtgcgccctgcggctgacctggtcataattgactaggaggtcgctcctccaggagaagcgagggtggaactcatggcttctagcctggaagtttctgtgtcagtggacatgtgatcctcgggacaatcccaaggcggaggtcgaggatcaagaggtgggggtagatctgcttctcaagtcctgactcgctctcaagaggtgaggccgacttccaactcgggtggagggtccgcgggcagcgaacctttccactggtctgacactcatgatcgtgttcatccgatcattgaggatgaagctgggctggcgaatctgctctgccatatcaaagggcagaactaccaggtccctggtgtgaagaacatggcaaaggcgacctatgctgatatgatggtgaaggaggcccatgtaacaatcgattaccgtttcttgccaattctactttttgtgctagttataatatccgtttcgttttcgacaggcgattgttgcaacgaacaagctggttgctttttacgagcaacgtcttagcaaggtttctccggcgaatgagctcaaagaagggaagaccctcatccaggaactgaaggcgactgggaagtcaggtcaggagcgtgaggcttcgttccaggtatacttctgttttttttttttttttatggtggaatgattctaaccaagctacaatttcaggtggagatcgacaggttgaagatggagctgtctacctcgaagggtctcgagaaatgcttgttgatgtggaaattcgaccataggtatccagcgtccaaaagacgttcaaatgaatgtctgatctacgaatcccagagatttgtaaattctagcctaaaagattggatgtttagactgcttattgattttggcagattgttgcttaaagcctgctctgctatgtttcatcaacgagagttgagattaggaagtggtagagttatgagagtctctgtcacgagagtggattgaccttgttttgaatctatcgtctagggtatctgtctttcgcctgttagccacctgataaaccctagagttgtccttatcaatgaatccatccttaggacttctattcttcttagatttatttgtattcacccccttattgcacttttattcacttgttatctgtgcaacttgttgattgcattttagttctatttgtcacttgttggttctactcgatccaatgatcgagtagggttcttaaagttctgatttttgttgtttgaatcctgatttaggattgttactagaaatcccccatcactataacctgacttgacttagttgcttctgtatacatcttgattgctagcaataacagtggactagattgacaccccctatagctgcatcgacatgttagtgtttaaagggaattcaactgaacctcacttcagtacataagtaggcgtaaaaatctacttattaatttagcgccggtgcccattcattgttgcattgttacatttcagatatcacaaaaacttaagatcaagttcttttacattaatcaagttactaactcatcttttcgtctgcttgtttttgtggaataggtactaatctttgtgcatgcaaactcgtagaagtagcagttcacgctcaattgcttaataaggaaactgaagagtcattctctatctcttcaagtttttttacgatcgttgaagcttcttagcttcagatttcaggtcaaaacagagcatctaacacttgtattgatatgttatttgttgctacacataaacaatttaatgttttaattttgtttgattgatttgctagtcttgactagtttttgtattttcttattgataggatccgtttgattcctctgatgccgagtatttaagatcattagatgtggaatctcggagagtcattgagttggaacttgctagatatgaacaacaacaagctaatgatgaagcaggaggatctaaaaagttgaaaagaaaactgagagatgaaacaggaacacctaagacgcagaggaaaaaagtgtgtgaaccagaagcatttaaaacccaaagaagaagcaagggtgatgaagcatctaaaaaaccaaaaaaagtgtttaagattagtgatgaagacgaagatgatgatgatgaagaagatgacgatgaggacaatggagatgatgatgttgatgatgatgaggacaatggaaagtcatcgaaaccaaagaagagaaggcaatactcaaaattctggaacgatttcatagtgattaaaaaggttaatcatttgggaaaaagtgaagaaagagctatgtgcaagcattgcaaattggattatgcgtacaatgcacacaaaaatggtaaaaatacatatcgtcgttatttgcaaatatgtaagctcgtgcctagaaatggtgatgttagtaagatgatggtgaatgcagaagcgaacttgtaggctagagagatagaccagtctgctctccgggaattggtagctgtgaccattatccaacatgatcttccattttcttatgtggagtatgagagagttagagatacgtgcatgtatttaaaagcgaatgccaggttctttagtcgatacacagctgtagcagatgtctataagttctatgagtctgacacgggtaagctatgcagttagatcaactttctgcaaggattagtttaactacatatttgtggtctacgctcactcctgaaggttatatg

SEQ ID NO: 6587 - DNA, 3914 bp, Arabidopsis thaliana landsberg
aattgtgtttatctatttaattttgtttaaaaaggatttcattaaatctaaatggatacaaagttttcggtcaaaaaaaaactagacctaattacaaattatagatatagattgaacttaacctactcatggctgacttgaaacgaatgtggaatgtgactgatccttgtaatcaaacttgtagaatctctgaagcttttagcggcaaccaatgactcatcgatgagacattgttgcgaaaaggtatatcgatcttcttaaagatttgagctgtgtcgagactctgcaaaagtgtgagtttctatctagagctcctatatagtcgcttcccaagcaatggtccatagataattcaaaatttaacaatcttcccggggtaataatgaggtgttttccttttactttttttgctactacctttttttcccctccttttgttgtaacattcaatattggattaagcaagtccttaagtttcggaactgaagatgtgttttgtcatagatctagagatttgagggagacaggtttggcattgatggatgctgcaaaatcattgtgttaactgtaacaaaagaacccaatcatgagtctttgaggcacaggtgaaaaatcatcaaaaatcatattactaatgtcacttcatagtcaatcttcatggattaataatccatcattattcatttagttagaccaaaccaacctaatgaattggagagacttgaaaagcaaaactcatagtacagcaacacagtgttatatcctcacaagtcaatctttgattctctcttgtgttcttcaactttaagcacctaattctgttaaatgcaatttatcagatttaaacagaggaccccacttgcagtggttggttaggtaaataatctctccatacaaaattcacactttactcttttagtggttaaaaaaagtcttgccaatgagtctcttcgaaacacaacataacttttatatcaattttggtgtgtccaaatatatgcaccaatgcaggatcggattctgtcaatatgaccaataaaatgacaacacgagacagatcatttggttatttttttctgttaattttgatacattattgttgaattacttgaagaaatcgatcactacctttttccttgatttgcatgctgtataatgcaaagaaaagaaaaagcaaaatattcctttaatctgtagtgtcttttgtctcttaaagaacaaatgaaagaagcaaaaaatgggatgcttttgctttctttccctcctttctttacggtgtcttgctttttattttcctttacatagttatttgaatttgaatccactttttgttatattaaaaacaacccattatgtttacttaacaatggattcaaaccaactaatcattgttttttatcttatttgagctcacctcttctttttgactctctttacccacatgaaaacaaacactaagaacaaaactttcataagaaactcaattttctctctttctcagatcatggtgtgagtcaccaaatagctcaaccatgaattcttctcacactgccttcgttgctgcttccttcttcttcctcttactcgccgcaaccgcggttttggtttcagccgatttagcatcagacgaacaagcccttctcaactttgcagcatcagtcccacatccaccaaaactcaactggaacaagaacctctctctctgctcttcatggatcggcattacttgtgatgaatccaaccccaccagccgcgttgtagctgtccgtcttccaggagttggcctctacggctcaatccctcctgccacattaggcaaactagacgctctcaaagtccttagcctcagatccaactctctctttggaactttaccttctgatattctctcactcccttctcttgaatacctttatctccaacacaacaacttctccggcgaactcaccactaattctttgccgtcgatctccaagcagcttgttgtcttggacttgtcttataactctttatctggtaacattccttccggtctccggaacttgtctcagatcactgtattgtaccttcaaaacaactcttttgatggtcccattgattctcttgatctcccgagtgtaaaagttgtaaatttgagctataacaacttaagtggacccatccctgagcatctcaagaagtcaccggaatattctttcatcggaaactcattactatgtggtccacctctgaatgcatgttccggaggagccatctctccgtcttcaaatttgcctagaccgttgacagagaatctccatcctgtccggaggagacagagtaaagcttatataatcgccattgtagtcggatgctctgtggccgttcttttccttgggattgttttcttggtttgtctggtgaagaagacgaagaaagaagaaggaggcggtcaaggagtgcgaacgcagatggggggagtgaatagcaagaaaccgcaggatttcgggatcggagttcaagatccagagaagaacaagctcttcttcttcgaaagatgcaatcataatttcgatcttgaggatctcttgaaagcttctgctgaagttcttggtaaagggagtttcggaacggcctacaaggccgtgcttgaggacacaacagcagtggtggtgaaacgtttaagagaagtcgtggcgagcaagaaagagtttgaacagcaaatggagatagttgggaagattaaccagcattctaatttcgtaccactcctcgcttattactattcgaaagacgagaagctattggtctacaagtacatgacgaaaggaagcttgttcgggatcatgcacggtgagtcataaagagaccaaaccctaacttttttggtaatgtaaagcttgtgtgtgggtcacgaaaaattgttcctttttggattttttggacaggaaacagaggagacagaggagtcgactgggaaacgcggatgaagatcgcgacagggacttcaaaagcaatctcttaccttcactccttaaaattcgttcacggagacatcaaatcatcaaacatacttctcactgaagaccttgagccatgtctgtccgacacatctttagtcacactcttcaaccttccaactcacacaccgcgaaccattggctacaatgctcctgaagttattgagacgaggagagtcagtcaaagatcagacgtttatagctttggtgtggtgattctcgaaatgctaaccgggaagacacctttaactcagcctggtctcgaggatgagcgtgtcgtcattgatcttccgagatgggttcggtctgttgtgagagaagagtggactgcagaggttttcgatgtggagctcttgaagtttcagaacattgaagaggagatggttcagatgcttcagctagcgttggcctgtgttgcaaggaatccagaatcgaggccaaagatggaagaggtcgcgaggatgattgaagatgtgaggagattggatcagtctcagcagttacagcaaaacagaacatcctcagaggctacttccaatgtctctgaatgattcctcattccgaccaaaagtttctttgatcaattctacttctatcttattacttttgaatcccagttaaaaataatttctctttgcatcgtagtttagtgcttatgatcaaacgtaattgctttcactaatgaaaattgaaaaatcataaccactgctttaactacagaaacaaaaaaatattcgctttcactttaattataactttccaaagtaactagagtaagatatattctacacataaatttatgacaccaagacagaagaacgaacagacagatacacacaacaaaagtaaaaaagtgaacaaataaaacaatgaaaaataatttaaattctgtgttttttttaaccctcaaaacag

SEQ ID NO: 6588 - DNA, 1304 bp, Arabidopsis thaliana landsberg
tgagcagctttcgtttgggtatcaacacctactcgagctacatcagggcgataaaccctcatttccccatcaataaaaccacgatcaaggacacgtgagagaagttcgtcggtcgcagcatttgaaggagcacaaacgagcatccttggtttagcacacagttttggcagcgtacgaaatagattctggtccatgttttgtaggacttcatcaatagaccctgacacaatattatctgaactgctctcattaacttgtttataactttcaggagctaatttcttcagcaaggaagtgtaatactgctgatactgaaccaaatggataacattcaacattccccaaactgtgtgtgtcttgcctgttcctggagggccctgaacaagagtaaatggccatggatcttgcctctttaccccactgctcgtaccagctgcagtatgcattgcggcccagtgaattgctgccaactgaggagcattaaagcttctgtgtaaatggccagcaaagctcggagtgaaacaatcgggcactgtaggagtctgctccccgtaattaggaaactgctctgggctaggcttgagaattgcattttgcatctgaaggatatatgagtttcaacagcgtcagcataactgaaagcatatatgaaatatttgttggagaaaacaaaaccaacctgtgggttaagctgggaaaacgcatgcaaagcaacatattccctttgtgtggttgcaatcgaaccaagcacagtcagatgccagatttccttgggtttaagcttccttaaaatatgattgtcgtcaatcttgctggtaaagaaaattaaaaagtaaagaaatgagaggcaggaaataattacttccagtaagaatgggtagaaactcagacatggtattaatagctaaataattaaacatatgaaaaagcatgtacctgccagagtcataagcatctccaacatagaaatggagaattgctccatgaggatctcgagtatcaaccggtatatatctcctaactgtaccagctacacgcccaacatcatcatgctctccttctaaacataaaaacgacaacattccagaatatacagagaagcaccagcaatatacgaatcgaccagacattctacaagttccaccacacctgattcaggcacaggatttgatagaacagcaacatctccctccttgaaagcccatttacattcatttactgagttaagtatcacatcccaccatcctataccagatcaaaacaaaggctagcagtcaggtaacaagagaacagtcagcagagcg

SEQ ID NO: 6589 - DNA, 903 bp, Arabidopsis thaliana landsberg
tgttctttctttatctgttgatactctgtctgtttttttatcctttcttctatttttcacaaactatcagaaattgaaagcaaatatttatagtctctcatctcttctccatgtatttgcatggaacatttattttggcagcaagattgatgatagtcatattttacggaagcttaaacctcaggatatctggcatctaacagtgcttggttcacttgcaaccacacagagggaatatgttgcacttcatgcgttttctcgacttaacccacaggttggtttttgtttattctcctacagatctcctataggtgctttaaaatatgctgatgttggtgaaacttaatgtcttttttagatgcaaaatgccattctcaaccccagtccggagcagtttcctagttacgaggagcaaacccctgcaacgcctgattgtttcactactagctttgttgaccatttacatagaagctttaatgctccgcagctggctgcaatccactgggcggccatgcatactgcagctggtactagtagtggggtgaagaagcaagaaccatggccattcactcttgttcagggtccgccaggaacaggcaagacacacactgtttggggaatgttgaatgttatccatttggttcagtatcaacaatattacacttcgttgctgaagaaattagcacctgaaacctataatcaagctaatgagtgcagcagttcagataatattttgtcaggctctattgatgaagtcctacaaaacatggaccacaatctcttccgcaccctgcccaaactctgtgctaaaccaaggatgctttgtttgtgctccttcgaatgctgcaactgatgaacttctttcacgtgtcctcgaccgtggttttattgatggggagatga

SEQ ID NO: 6590 - DNA, 2445 bp, Arabidopsis thaliana landsberg
  unsure (1)..(2445): unsure at all n locations
aaggtcattagcatgctttttagtttcgttaattggtttggaccatgcatttcttcgcctatactattagtgtgtttattccatcttgctacttctctctttttttagattttcaacgtatgttatttgctcaataatatttatgaatttcttaaataaacagtgtaaagacatgcatgagataatctaccgatgtgctctagcaaacatgcaaaagatcgttttattttttttaatttttttttggtaaactgcatatgatcgttttaggtgttttttttatatacttcgaattttagtagaatgatggtttgaaaattggcagtattttttaaacgtctgatatgccttgaaaaaaaatcggttgaacaaatattagcaaaaaaataaagattcggtgagcaagatgttaaaactaataaagtaaactacggtcaaagacttgcgcaaaagtaatgtctccacgatatttattagaactcacatctacaagtgggtttaaagctcaagtataaagtggctattagacatttgacaaaaacaaaaaagagagtacttattagacgaatatatgttctatgaaaacacagaacaaaaaaacaaaagaaaaaaaggtcgcaaaagctttaatcacttttgaaaatattatattttctttgagataatttttccctcttagctagcaatatataaaactcgtataaacgttaacaatcaacaataaaaacaaatagaaagaagatgaaaataaataaaataaagagaagccaataattcatatagtatttgtctataaataaagagattcaaacccacagaattataccacattagaaacttcccactctctctctcgtttgcttcttcttcatcgcttcacccactcacttgattctctctctaaaaccttcactgtctctatctatcttcaaaacaatgggaaacctgtttgacagtagcaaggctttatggggaaacatgaaccatggatcgtcacgttactctctcaacggcaaaatcatgcttgcttccgtcatcatcctcttcgtcgccgtcattttaatcctctgtttccacagctacgctagatggttatttcgccgtcaaaaccgccgtattcgccgccgtatcagtgctcacctccgatcactcgccgccgctagagaccccacccaatcatcatcctccctctctcctcttgatccgacggtgctcgagaagatccctatcttcgtctactccgttaaaacccatgaatctccgcttgnnnnnnnnnnnnnnnnnnnnnnnnnnntcgaagaagacgacgaagatcgtgtccttccaaaatgcgcaaggctgaccacgtcgagtctctcaccacgttgtcgactggtgcatctgggaacaagtttctattcactaacgagaacaagcttgtggtctcgtggtggccagattccgttaataagatcttcccttcttcaatgcagacgagctccaaagaagaagccaggaagctgaggatgcttctttcgcagttcatgaagcccgaggctttgaggaggtatgttggtgttatggatgagattgctcaaagacattttgagacggaatgggccaatcaagatcaagtcattgtcttccctcttaccaaaaagtatgtactttgcttctcatctttttaaagcaaatttaattttttttgtaaatgcaagaaaatgggaagaaaatattagaatttcaccaaactattttatgactaagatatacatataaaaatctcaatcaggttcacgttttcaatagcatgccgttcgttcctgagcatggaagatcccgcaagagtaaggcaactagaagagcaattcaatacggtagcggtagggatcttctcaatcccaatagacttgccaggaacacggtttaaccgagccatcaaggcgtcgaggttactcagaaaagaggtttccgctatcgtaaggcagaggaaagaagagctcaaagccgggaaagcattagaggagcacgacatattatctcacatgttgatgaatataggagagaccaaagacgaggatttggctgataaaattattggattgttaatcggaggacatgacacagctagtatcgtatgcactttcgttgtcaattatcttgctgaattccctcatgtctaccaacgtgtgctacaaggtactcgcctctctctacaacctctagtgttattctttgaatacattaatatgtttaggtacaacactttttcaattaacttgtactttcctacacgacagcttcctcaataataaaactaaacatagcttatgactggtttgttagctaggaattaggatcatatcttatgacttctttttgggataatgaataaataaataaaaatactatgtgagaaacattacatatgataactaaatatgaaccgacaatgcttgtaacata

SEQ ID NO: 6591 - DNA, 559 bp, Arabidopsis thaliana landsberg
cctgaggctttgtgaaggtatgttggtgttatggatgagattgctcagaaacattttgagacggaatgggcctatcaagatcaacttattgtcttccctctcaccaaaaagtatgtaacgtgcatctactcttcttttatatgttgcttgcctttgtttatgcgttgaaatgtttatgtaatttgtttttgtttcaaccaggttcacgttttctatagcatgccgtttgttcctgagcatggacgacctcgaaagagtaagaaaactcgaagagccattcactacggttatgacgggtgtcttctcaatcccaatagatttaccgggaacacggtttaaccgtgccatcaaggcgtcaaggttactcagcaaagaggtttcaacgatcattaggcagagaaaagaagagctgaaggccgggaaagtatcagtggaacaggacatcctatctcatatgttgatgaatattggagagaccaaagacgaggatttggctgataagattattgccttgttaatcggaggacatgacacaactagtatcgtatgcacattcgtt

SEQ ID NO: 6592 - DNA, 2791 bp, Arabidopsis thaliana landsberg
cgaccttgtacaacaccgttgtgttggacgcccgtgggcgaacgtcggttgtttggacctacgatcgtggatgaaaccactgagagaatgaagttcttaaaaatcaagttaaaggaagcccaagatcgacagaaaagctatgccaacaaacgtcaaaaggaattggaattccaagtaagagatttggtgtactaaaaggcgatgacctacaaaggggcagggcgattcacctcaaggaaaaagttaagcccaaggtatgttggcccgtacaaggtgatcgaacgagtaggggcggtggcatacaaacttgaccttcctccaaaactaaatgcgtttcacaacgtcttccatgtgtcacaattacggaagtgtttaagtgatcaagaagaaagcgtggaagatgtacctcccgggttaaaggagaacataacggtggaagcatggccggtacggatcatggaccgaatgacgaaaggtactcggggaaaatcaagggatttgttaaaagtcttgtggaattgtggaggccgtgaagaatacacttgggaaaccgagaataagatgaaggccaattttccggagtggttaaaggagatgggtaaagatcaacttgatgcggatttgaggacgaatccaattcaaggggggggagacttgtaacgcctgcaatcctcaataggatcgttgactaggacttggtccgagagaaaaaggtggagtctcggacaagtgagaaggagctggccataagctcggacaaaggggaaatcatgcaggctaagctaggatcgtaaagaaatcagctgggtcagctcgcccaaagctcaagctcagctggaaggagtgacggttactcaggtcgagtgacagtccagctcgggcagctggacgagtgacggttgagctcgaggtagctggacgagtgacggctgagctcgaggtagctggacgagtgacggatgagctcgaggtagctggacgagtgacggactagctgggcggttatgggcgaaaagatacaacccttcggaaaggtgcaactcttcggaacggcacaactcttcggaaaggtgcaactcttcggaaaggtgcaaggaacggatgtgttgattcgggaagcatccattcgccccctatataaggaagggcgcccaggaccattccactcaccacaacacaccgaaaacacaagaatccgggtcatgtgcatcctacacaagactcggtctgggtagggatcggctgaggcggggacgcggctcggcggaggaccggcgggtcttaactgacctgccgagaatcggccggactgatgcgcgatcttcccctctctgaattctctccacggattcgagtagtgtatggcatatagagcattgcatggacttgcatatgattaagtaaatgagattacttatggctctatgactttcaggaatgaatggtgatcgtgggaaggacttggcttaggcgcgagagattcaaggtcgggatgatgggtggtgatagttcggatatctagggatagattatatgacttgtaatagcttatatgcaaactcataggttgtatcgaatcctttgcttaatcaataaagtatccgattgtttgtttactctattcgtctcatatattgaatcacggaatcatatggaacggattagactaggaaagaacctcataaacggttaaggccgagtcacttagtggcttgggtcgagagaactcgcccggactttaggcagtccggatcggggcctttcaagttggtatcagagcatgcttggttctaggactaggtgttgggttaaggggtatcaccactcgtcggcttgagaatctcgcggtagatgttctttactcttttgcgattttactaggagttatgtggattaactttagaggtttcgcagatgggtaagagcagcaaaacgggaaagagtaagaaggacaagggcattgtcgaggagactttggttgaggaggaaacgatgatcaacgagaaaaccagagtcgggacgatgttcgatgggacagactcggccggacctgaggccgggaagaagtccataaatggggaagcaccggagagtagcggtgcaagggacagcacggataaccggaacaatactccaacggcccaagaacagtgggatttgatgaaaggaatgatggcgcaactagccacattaaccaaggccattgtagcagatccggtggtccaaagagtggataacaaaaaggacgatgactcggaagttgtggaagtgaatccgcaaccgaatcatgggcgaaaaaggggagactatctgagtcttctcgaacatgtctcaaggctgggcacgagacacttcatgggcagtacggacccgattgtggccgatgagtggaggagtagactcaagaggaacttcaagtctatccgctgccctgaggattaccaaagggacattgcggtccacttccttgaaggagacgcccataactggtggttaaccgtcgagaaacgcagaggggacgaggtccggtcctttgcggattttgaagacgagtttaacaagaagtactttccaccggaggcttgggataggcttgaatgtgcgtacctcgacctagttcaagggaactgcacggtgcaaccattgtttggtccggacattcaactcggtttccgaattggttgaaagggcaacaatgattgaggaagggatcgaggaggagaggtacttgaaccgggagaaagtaccgatccggaacaggggatcctctagagtcgacctgcaggcatga

SEQ ID NO: 6593 - DNA, 1993 bp, Arabidopsis thaliana landsberg
  unsure (1)..(1993): unsure at all n locations
cattggcgccctctttgggtaaagaagatgctggaatcatccggtttcagataccatcttttcatcacgccattctggaaatcatctctcgtccatattccaaataaaactgaaccaaaaaatgctaatgaaaataccataaggaacatcaggtatataatcttatccatcttcctctcgatcatgcttctcttagaagggggatctgttgaattctggacaacttttgtatcaggtcctgtgaagataacaaccccatagatgtagtctgtgttcctgagttttgagcccctcagaagaagctgctgtggtgagagagggtacttttctcccttaaggtccatagtaccaacaaacgagtataagttagcattcgggtcctcacatttgataaaagcctcaaaatccctgannnnnnnnnnnnnnnnnnnnnnnatgttacttctagtccttgtttaagtttcagatttgtttccccgtcaaggttcattgtctctacatagcaaacagcatcctcgtagctagaagaaagcaggacaaggtctgccggaaaaaactcgtttttctctaccttcaatatatccccaactcttagtgtcttccattccctaagatcaaaattcccattgcctcggtgcactctaacttttctgttattcacttcaatatcctaaaagaatgaaaatttccaaataatgagaagtttttcgatcaacaaatgaataataaagtgatccaaccgaatgcagaagcaagacaactattcgtaacaatttagcttaatccagttctgtgtaatgtagcttaatccaacatagaactccagatttcgtaacaagttatcaaacaatgtctagacacagaccatcctattaagatcatctaatcaaactctaatcaaacaacaaccactcagacaaaatcaatcagtcaaagtacctgctgtttccggcgccaatcttctacaccctctttaaacatagtagcgagaatgacgaacgtcagcggaacaatggcgctcacagcggtatatggcgccagaggagtaaaagacaagatcccaacaacaaggaagtagaaattggcaactctcctgaactgctcaaacaatgatttagggaggaaagtggcgagagtatacttagtggtcctcacataattgtcacagtaattccttgattcagcttcaggggaatcaggttggttgcagaaaaccacacgagagaaaccagatcgtccaattttcgaatggtcaggcttgaaacaagcttcagcacctgttaatgtgaaaagcttgcttaattgtatcttccttttgcgtctccttccactcactgtcgccattgtctctcaattcacacctgatcggaaaaaagattcagactttcagaatctctaaaaccctgaatgtctatacgaacaagaaaggccaaattttgtaaagtctcaagagcattacactgacgaaagttggattattcttctataaaatgccgattgatttgcgaaaccgacgagaacatatgaaaacagagaaacccagaaaatcaaattgttgaaaggataaaactttgtggggaaatggagaaagagagaagaagagacgattcatttacctttgattgagtccgacgttgtagtttatgagtcctccaccttttgatttcccgagaaactgacaaattttctcggaaaaatctggtgaggaatctagtgggggtatcagagttttagatttttgtccaaaatttataacagaaagaaatctgaatgctaaaaatctgtaagaattaaaattgcaatccactaaattgggaaactggggttttaacttttaaatgtatgaaccaaaagtctcggggttttcttaatgcatgaaccttaatgtttgaaaccagagagtatctaccatcaacatttctagactttttgaatttctgattggttgacctttcgaaggagactacagtttctagaatcgaatttgttctca

SEQ ID NO: 6594 - DNA, 519 bp, Arabidopsis thaliana landsberg
acattttcagctcttaacactgatggtgttcttctgcttactttcaaatactccatcctcactgaccctctctctgttctacgcaattggaactatgatgatgcaacaccatgcttgtggacaggtgtcacatgtacagagcttgggaagcctaacacaccagacatgttcagagtcacaagcttggtacttcccaacaaacaccttttgggttccatcactccggacttgttctcgattccatatctaaggatcttggatctgtctagcaatttcttcaacgggtcactcccggactcggtgttcaacgccactgagcttcagagtatctcccttggaagcaacaatctctctggtgatttgcccaagagtgtcaacagtgtgactaatctccagctcttgaatctctcagctaacgcatttactggcgaaattccgctcaacatctcacttctgaagaatctaacggtcgtttccttgtcaaaaaacaccttttcaggtgatatttcagtggtttcg

SEQ ID NO: 6595 - DNA, 3451 bp, Arabidopsis thaliana landsberg
gattcttcttaacactattagccataggagccttccctttctccttggtggagatgggagtcttatggcttgttaagctcttggcttccctcttgaagccaagcccatccttaattgaggggtgtctaccaatagtgtaggcatcccttgcaaattttagtttttcaaattcactcttggctagtcttaagttgggcattaagactagctaattcatcattcaattttgaaatggaaactaagtgttcactacaagcattaatatcaacatccttacacctagtgcaaatttcaacatgttcaacacaagagttggatttatgtgcttctactagtttagcatttaagtcatcattaatgctctttaatttagaaattgaatcatggcatgtggacaactcacaagcaagcatttcattccttttaatttctaatgcaagggatttttgagcttctacaaatttatcatgttcatcatacaacaaatcctcttgcttttctaacagcctatccttttcattcaaggcatcaatcaattcattgattttatcaattttatttctatccaatcccttgaacaagctagagtaatctatttcctcatcactagattcgtcttcacttgaagaagcataagtagagtctcgagtacataccttcttctccttagccataaggcatgtgtgacgctcgttggagaagagggatgactagttgaaggcggtggcagcgagtccttcattgtcggagtcggacgaggagcagtccgaatcccactccttgccaagatgagcctcgccctttgccttcttataattcttcttcttctctctcttgttcccttggtcctgatcactatcattgtcgggacagttagcaataaaatgactaagttaccgcatttgaagcatgagcgctttcccttggctttggtcttgcttggctgtcccttgcgacctttaagcgccgtcttgaatcttttaatgatgagggccatctcttcatcattaagaccggcagcctcaatttgtgccaccttgctgggtagcgcctccttgctccttgttgccttgagagcaatgggttgaggctcgttgatcggttcattcaaggcgtcgtctacgtaccttgcctccttgatcatcattcgcccgctgacgaattttcctaagacttcttcgggcgacattttggtgtacctgggattctcacgaatattattcaccaaatgaggatcaagaacggtaaaggaccttagcattagtcggacgacgtcgtggtccgtccatcgcgtgcttccgtagctccttattttgttgataagggtcttgagccggttgtatgtttgagttggctcctcgccccttatcatcgcgaaccgtccgagctcgccctccaccaactccattttggtgagcaaggtagcgtcatttccctcatgagagatcttgagggtatcccagatttgcttggcgttatccaagccactcactttgttatattcatccctgcacaatgaagctagaagaacagtagtagcttgtgcattcttatggatttgctcattaatgaatataggactatccgaactattaaagtgcattccactatctacaatctcccatatactaggatggagagagaataggtgactacgcattttgtggctcaaaatccgtagtcctcccatcaaagtgtgggggcttgcgagtggaatggaaacaaatgcgaatttgaactttgcggaatacgagagtagtcaaaggaaaagttagaattaaccggtttccttttctcgtagtcgttgtggtcgtcgtccttttgggaagaagaggattcgtcgctgtcgtagtagacgatctccttgatgcgccttgtcttcttcttcttcccatcttttcgcttgtggcttgaacccaagtcggtagacttgtcattcttcggttcgttgaagatggactccttctcgttgttgtcgaccaccatcccctttcccttaggatccatctcttcgggcgattagtccctttcttgaagagaacggctctgataccaattgagagcacctagaggggggggtgaataggtgatcttttaaaaacttaaaattatagccacaaaacttagattaagcgttacgacagtaattgccaagtggctagagagaagtcaaaacacgataaccacaagacagcaatcacagagttgacacggtggttatccgtggttcggccaagtacaaaacttgcctactccacgttgtggcgtcccaacggacgagagttgcactcaactcctctcaagtgatccaatgatcaacttgaataccacggtgttcttcttttctttgctcttttcccgtttgcgaggatctccacaacttggagtctctcgcccttacaatagagtttcacaaagaagtacggagtaagggagggaagcaacacacacaaatccacagcaaaatgcgcacacacacggccaagaatcgagctcaaaagactatctcaaagttctcactagaacggagctcgaatcacttagaatgacaaacaaatgcgcaaagactgagtgttgatgatcaagattgctctaaggttgcttggtgtattcctccatgcgcctaggggtcccttttatagccccaaggcatgctaggagccgttgagaacaaatctggaaggccatctttgccttctgtcgtcgtggcgcatcggacagtccggtgcacaccggacactgtccggtgcccgatttccttccttaaacagcgcagtcgaccgttgcagatctgggagccgttgcgcaccggacatgtccggtgcacaccggacacaccggacagtctggttccccccgccgaccgttggcttggccacgtgtcacggcagatcgcgtggctgaccgttgcgctggccgaccgttggctcaccggacagtccgtgcacaccggacagtccgtgaattttagccgtacgccgttagcaaattcccgagagcgcctcttcggccgaggcagcctggccgacggacactgtccggtgcaccaccggacagtccggtgcaccaccggaccgaagcagccccagaccgaaacaacatcttggccaactctcctcttctcttcttcttcctgtttctgatacttagacaaatatattagtacacaaaaccaatgtactaagtcttagaaacataccttaacttgtgatttgcactttgatcatccttgggcatattttcacatttaagcacttgtgtttgcactcaatcaccaaaatacttagaaatggcccaaaggcacatttccctttcaatggtcgccttccaagggggtcaccctccttttaaaggcgactctccctacttgcgtccccagccgtcgtgggctgagtcttctccaacacactccaaggtcctccctacggcgcgggctgggccccacacgtca

SEQ ID NO: 6596 - DNA, 1485 bp, Arabidopsis thaliana landsberg
gttccttgatatttttttcctctcttcacggattaggggttgtaacagtttgattctgggtttttgatttccttttctgtttgatgctaatcagctgttcctacgaaatcgatggtgaaattcgaaaatgggtattcagtggaaacggtgtagacggaagcaaactcggtatcgaaccttattctattcaggtcttatccaatggcgaattgcttattctggattctcagaatagtaacatttaccagatttcatcttctctttccctttgtaagtattctattgtactattgattttgcgtcagacttggtggatttcaatatttgctgattttcttaaggattttgaatacggatgatgatgcagtcaagcttttttctttttctctgctttcacgtgatagttcacatggactataaagttttgctgtatatggaaatacagagattttaggtaaaagttatttgaaaatcaggagattttctgacgtttttcttttgtttgagaatttggattcaatgaaagtggtcaagaattcaaatcaatgttttaaatgcagcatttaacatttaacacctgttgcattttgatcgtggactgtgtgtgtatgtatagttgatgaattcttgaacagcaaattgttactctttgaacaatggtagatagcagaccaaggctggttactggctcccctgaaggatatccgggccatgttgatggtagattaagagacgcgaggttgaacaatcctaagggactcacagttgatgatagaggaaatatctatgttgcagatactgtgaataatgctatcaggaagatcagtgaatcaggtacgtttatctttggtttaatggttttgccttttggagaaatgtggtatgagtcggatttaagaaagaataaaaatgcaatggcaggagtcacaaccattgctggggggaaaatggttcgtgggggaggtcatgtgggatggtccaagtgaagatgcaaagttttcaaatgattttgatgttgtttatcttggaagcagttgttccttgctagtcattgaccgaggaaaccaagccatcagagagattcaactccatttcgatgactgtgctgatcagtatggaagtggctttcctcttggtaatatttacataccataatatttcctcttggtttgttgcccatcttgcattcttcagtcatctctatttccgttactctttgatgtatatctctgattcaatgctttgatattgcagggattgcagttcttatagcggcagttttctttggctatatgctggctttgttacaacgtagactcagctctatcagctcatatcatactgcgagtgtccattaacgttcgcattgtaacatcattctcttcagctacactataattgagttataaccgacatttctgcctgttgtgtatatcgtataggatcaagaagtgtttgaagctgtgccctgatcaagatcctata

SEQ ID NO: 6597 - DNA, 362 bp, Arabidopsis thaliana landsberg
aatggttcagaatagaaacaaaagcttatattggtttgcaaaagtgtttctttctactatttggttgagttttatttatatggaaagtattggaaacacttgcagatagcaggccaagactggtcgctggctcccctgaaggatatccaggtcatgttgacgggagattacgtgatgcgaagctgaaccatcctaaggggcttacggttgatgacagaggaaatatatatgtggctgatactgtgaataatgctatcaggaagataagtgaaggaggtaatagcttgttcataactgcattcatagaagggttatatatacgtttgcatcttgtactgagtcttaaatgcctatgatgtgaa

SEQ ID NO: 6598 - DNA, 1956 bp, Arabidopsis thaliana landsberg
atacaacatctagtgatgagggttgctctagtgatgatgaagatgatttacttgctctatttgccaacctaaacatgcaacaaaaagaaaaactaaatgaattgattagtgttattcatgagaaggatgaacttttggatatccaagaggaattccttattaaggaaaacaagaagcatgttgtcggcgttccgagaccgggggggtccctaagccgacgagtgagtgtgccgcgtgccccaccccagatgggtcgagcgcgtgggcgagcgcgaaggggggaagcgaggtggccggagacgggcgtgagagaggtggaaatcccgcggccttcgtgttcgtcccgcgcccaggtcgggtgcgcttgcagtagggggttacaagcgtccacgtgggtgagggaagcgagcggccccaagagagcgcctgccccgtcctcgtccccgcgcggccaaccttctctaagaaggccctggtccttccttttataggcgtaaggagaggatccaggtgtacaatgggggtgtagcagagtgctacgtgtctagcgggggagagctagcgccctaagtacatgccaatgtggcagccggagagatcttggcaccctgctggtgtgatgtcgtggctgtcggaggagcaatggagccctgtggagggacagctgtcggagcggatgagtccttgctgacgtctccttgcttccgtaaggggctgagagctgccgtcgtcatggagcatgcggggcgccatcattatttgtttatcggggctagccagatgggacgtcggtcttgtcccccgtagcctgagcgagctaggggcagggtaatgatgactccccctgtgacatggtcgccccgagccctaggtcgggcgaggcggaggctcctccgaggtggaggtcgagtctgtcttccgaggccgaggtcgagtctgagccctgggtcgggcgaggcggagttcgtcgtcttccggggccgaggccgagtccgagccctgggtcgggcgaggcagagttcgtcgtcttccggggccgagcccgagtccgagccttgggtcgggcgaggcggagttcgtcgtcttccgggccgagcccgagtccgagccctgggtcaggcgaggcggagttcgtcgtcttccggggctgaggccgagtctgagccctggggtcgggcgaggcggagttcgtcgtcttccggggctgagcccgagtccgagccctgggtcgggcgaggcggagttcgttgtcttccggggccgagcccgagtccgagccctgggtcgggcggagcggagttcgccgtcttccggggctgagcccgagtccgagccctgggtcgggcgaagcggagtttcctacggtgcctgaggccgggcctggctgcctgtcagcctcactctgtcgagtggcacagcagtcgaagcggcgcaggcggcgttgtccttctgtcaggtcggtcagtggagcggcaaagtgactgcggtcacttcggctctgtcgactggaggacgcgggtcaagataaaggtgtcaggccccctttgcattaaacgcgcctgcgatttggtcggttggcatggcgatttggccagggttgcttcttggcgaagactgggcctcgggcgagccagaagtatgttcgtcgctggaggggggcctcaggcgagacgtagatcctccggggtcggctgcccttgcccgaggctgggctcgggcgaggcgtgatcgagtccctcgaatggaccgattcctgacttagtcacacccattaggcctttgcagctttgtgctaatgcgggttacagctgagaattaggagacttgagggacccctaataatggtccccgacagtagcccccgagcctcgaagggagtgttagcactcgcttggaggcttttgtcgcacttttttgcaaggggaccagcctttctcggttgcatttcgttccggt

SEQ ID NO: 6599 - DNA, 786 bp, Arabidopsis thaliana landsberg
tcaccttcagctcttataaccgcagctctcctctcttgatcagccttcatcacaacaatcttagacctttctgcctcttgctgagccacttgtttctgctcaacagcccttgaaaactccacaccataggacaaatgcgtgatagctacatcatcaagcacaatgttgaagtccttcgcacgggtgattagtgactcccgaacaagtgctgagacgtgaggacgctcagtgagaagctggtcagcgttgaactgtgcaaccacagctttcaaaacctcatttccaatcgaaggaagaaccttctcgtcatactctagacccaaagtttggaagatgtacgggagacgcgacaccttcacaacaattcacatcacataaacacaccaaattaataacgattctacaatacctagtcctcgaaacaaattttgaaaatcatagatcatcaaaaccctaaaccctaaatccaattcgcaaatgaatctgaaaaacctcaattcggagaaatcaaacgagtctagatcaaaaatgaagaaccgttatgcgttatacctcaggacgagagagaacacgaagagtgagattaaccatctggagatccttagtaccagagattgaagagaacgtgtgaggcttcgtgcggatatcgaagatgtgaggcctctgaagaatcgggatcaagaaatgagtcccttcacccacagtctgatccatcactcccctgaaacgaaagaagataacagctctttctccgccgtcaacggtgaaaagcgatgtatcagcacc

SEQ ID NO: 6600 - DNA, 936 bp, Arabidopsis thaliana landsberg
tttctgtgcttgaggcaatgatattgatagtcttagtgaactctgaaccatccatgccaaactccatcttcaaatcacaaactttgagagagatcctacctttcttcacatcaatcctaacaccaactatagttgggaatgctcttccaaggataagaggatccttgggttccttatcgtagtccaggaccacaaaatcagcagggattaaggagttacaaaccttaacaggaacatcctcaaggattccttcagggatgcatttggaacgatccgcaaagaggagagtgattctagtcggcatgtagttagtcatgcctaatctctctgcaacagacttaggcatgaggttgttacttgataccatgtcacacaaagagcggctgaacctgcttgtggagatagagcaatcaagaacaaagctacctggatccgggagcttctcagtggtctgatcaagagtgatggtgcggatgtactcagcaatgtccactctttgtgccttctctttcttaaccttaggcagcatgattgcattgatgtcccttgtcagcaatttagcttcatctgagctaataccattgtcaacaagttgcttgacatacctattgagtggagcagaagatgtctcagaaacattcttaggaagagaagtgaggatcttctccatgatggctgtgcacttagtagcatgaatctcctgcttagatcgacacaaataagtcgcattatctttcgtaatagggattggctgaaaggaactgaaaaaaggaagtttggtatacttataaaacgtatatagaggatttaggtactagctaggcgaagatacatacaaggacattccatatataatcaattcattgccaagtgccttcttctaatgcagacttttaaaacatgctcttgcatagaacttgttattcaaatctgtga

SEQ ID NO: 6601 - DNA, 2184 bp, Arabidopsis thaliana landsberg
catcatattatttctttggtaatttatgtttccttcataactacgagatggcaataccttgtctttttccagggttgtaattggttatgacaaaggatccataatggtgaaacttggccgtgaaataccagtggctagtatggataccagcggaaaaattatttgggctaaacccaatgagatacatactgtaaacatcaagagtgtgggcgcagatgaggtttggggtttaacactttttacattgttgccttgtgtatttgaaaattagctcatgtttggcaatgtttatcatttggttctgagcctacttaggtcactgatggtgagagacttcctttggccgttaaagagctagggacctgcgatctttatcctcaagtaagtggcatccttcttattgtataattgttactccctttaaacaatgaaggaaatgtggttttgtatctctggattgtcatttctacatttatggaagatatattggatatgtagtgctaatgtttttcttgaattgctgcttcctgcttctagttatttatttttgggcagtttgatagattactggtattagtaagaaatatgaccttaaatcatttattaattttgtgactacccactgtcatttatgtttctattatttaattttttgctttttcagagcttgaagcacaaccctaatggtaggtttgtggtagtttgtggagatggtgagtatattatctacactgccttggcgtggcgaaataggtcatttggctctgcgctagaatttgtttggtcatctgatggggagcatgctgtcagggaaagctcgacaaagatcaagatcttcagcaagaatttccaggtttgtaattccttttggcacgttccttttccgactgattaactctaaagcttttgttttttgtgtcttattctgttatctgaaatacactaacctatgctgatacccttgtttaatttgcaggaaaagaagactgtgagacccactttctcagcagagcacatttttggtgggacgttattgacaatgtgctcaagtgattttatatgcttctatgattgggcggaatgtaggttgattaggcgaatagatgttactgtcaaagtaagtgcttatataccagaagtagatccattagtttctacaagaaaatagtttataggttacgttttcagtaatatttttattggagaaatacaaaagagttccttatctgaaatttaaacgcaaaagcagattggtactgctcgcttattcacttttaacgtttttgtttattcaatgtttcagaatctttattgggcggacagtggtgatctagttgcaattgccagtgatacatcattctacatccttaagttcaatgtgaggatcttttttaaaccttggtagtgagccagaactcttgtacatttccttagtttattttcctagtactgttgctgttcgagacatggttttaagctgttttcttactgttctgctgtagcgtgacattgtttcctcttattttgatggcggtaaacaaattgatgaggaaggcattgaggacgcatttgagcttctcaatgaaaccaatgaacgtgttcggactggcttatgggttggggattgttttatctataccaactcttcttggaggcttaattactgtgttggtggtgaggtaaggctcatttctaggtttttggaaagaaacgttttatgttttttattttgttgtaattgagattcagtactcctcttatattacaggtaactacaatgtatcatctggaccgtcctatgtacttgttgggttatctcgctaatcaaagcagggtttatttgattgacaaagagttcaagtaagcagatgttttactgttatgattgctaacaatgttttgtaacttactgacttctgtgtccactttatgattacagtgttattggatacactttacttttaagtttgattgagtacaagactcttgtgatgcgtggagatttggaacaggctaatgaagtcttaccttcaattcctaaggagcaccataataggtatgagaatgtgctttccctcgcattatggttacagctggattatggtgttagtaaacatgtatccaaggtcacataatggtttaaattgttttcctaaattcacgcattcctacttttctgattct

SEQ ID NO: 6602 - DNA, 1578 bp, Arabidopsis thaliana landsberg
  unsure (1)..(1578): unsure at all n locations
agaagagcaccatctgtagaggtagtgactaaccacaccgcctgcgtgaagcacgtcagatagtaaagatgatagacactggtgaagaggagcctcctcctcctcttcctctccatcttccccctcttccccaacctgttcacaacaaactgaagcagcgacagtagaattaatgatcctaccattgtccaccatggccaagaccattggattggatatcatgggtaaaagacaatcctcttcaatgcatgtaatgtaaacatgcatacctcgtcgagaacatccccttgctcaagtcgaccctcttcctctatttgcataattctaaaagcatccactaaagttgtatgatctctgtctgcatgactacaataatccccagcaggaggatggacgcccctgcaagataagtcaacaaaaatactttgtttatgaggatcctgaaaaaatgaaatcgacattcggcttatgtttatacgggtataaattcaaattataagcaaatacatgacggctaccttgctatgtaatacagacacatgactctaaatggcttaagtcccacaattcaattaaaaaggtttcctcataagcactgtttttaagaataagctaatgacggcaacgacgaaaagatacctcgtctctgcagctctattttcaagggacagggcgacttgccactcctcaaagagattgggatactcttcgggatcagccagagattcagcagcctttggacttatctatatccagattgacagaggatgaagaaaaattgtggatatctcaacaggcaaggtttgaaattcaatcacaaggtgcatcggatgtgtctaccactaaccttggtcaaatcgtttctccacaatgccactatttcggagaccttgcttggaaggtacgatctcgccatcagagcggcttcaggtattcgattactgtaaccatattaatatcagcatagacgtaattagttgcgggaatatatgttccacatgtaagaaatagtaaacaatgtacctttccaccaacagatgcaggcagtcttctacttgacccaacatgaacaagcaaagaaaagcgacattgttctttccttgctcttttgcatttgctgccagcttcatcattccgtctgcatggcccaatgaagaataaagcagcagcagaccactcaaatccatagcatgcctcatgcattcctcagccatatccagctaagtagtccaagcatgggaaggaaaatgaaaagaaaaatacatgttagctttaacctttgtaagaatcctagaacactgattgcagctaaaaaatggtcaccttcccacttgacatagctaattctccaagttgcttccatttagattcattttgtgcctctacagcaatgtcctgtcaaaaaaaaagaattcgagtaaaaacatatcggtaagtcatggaaataaagcttctcacatggtaaaaactacagactaacctttgcgacagccaatctaccgagctgtatggccaactcanatctgtagtcaggatcagttgctccttctagagcatcttctgtcatgccacgtgact

SEQ ID NO: 6603 - DNA, 2955 bp, Arabidopsis thaliana landsberg
  unsure (1)..(2955): unsure at all n locations
cgaagacgtcggcgtttgcgcggagaaagtcgacgagcactgcttcctatttggggtcgagcccggagccgatccggatttgcttggagacgtcgccactggggtcgagggggacggccttgaccatctccactggctcgaagttgccggcatgacgcttcacgtctggcacctctttggagaggctttctaggtcggcgatgagggcctcggactaggcgagggcctcggcgtactccacgcactccacgtcgcattcgaacgcgtgcttgtacgtggggccgacggtgatgaccccgttggggcccggcatcttgagcttcaggtaggtgtagttggggacggccatgaacttcgcgtagcatggccttcccagtaccgcgtggtaggttcctcggaacccgaccacctcgaacgtcagggtctccttcggaagttggagggtgtcccgaagcagacgggaaggtcgagtcgccgagggctgacgcgcttcccaggatgatcccgtggaaggcgcagcgcctcctcggacggaggacggatcgacgcgcatgagcttgagggtctcggcgtagatgatgttgaggcagctgcccccgtccatcagaaccttggtgagcctgacatcgccgacgacggggtcgacgacgagcgggtatttccccgggctcggcacatggtcggggtggtcggcccggtcgaaagtgatgggcttgtcggaccagtctaggtagactgcgccgccaccttcactgagcagacctcccggcgctcttgcttgcggtgccgagccgaggtattcgccgcatgccctccatagatcatgaagcagtcgcggacctcggggaactcccccgctgggtgatcttcgttcttgtcgtcgtcgcgggccacntgcaccctcggcgggtggcccggccctgtggaagtgacgccgaagcataacgcactcctcgagggtgtgcttgacgggcccctgatggtaggggcacggctccttgagcatcttgtcgaagaggtttgcacctccggggggcttccgagggttcttatactcggcggcggcgacaaggtccgcgtcggcggcgtcgcgtttcgattgcgacttcttcttgcctttcttcttggcgccgcgcggagcagacgcctcgggagcttcttccgatgggcggccctggggctgcttgtcctttcggaagatagcctcgaccgcctcctggccagaggcgaacttggtggcgatgtccatcagctcgctcgccctggtgggggttttgcgacccagcttgctcaccaggtcgcggcaagtggtgccggcgaggaacgcgccgatgacatccgagtcggtgatgttgggcagctcggtgcgctgcttcgagaatcgccggatgtagtcccggagcgactcccccggctgttgccggcagcttcgaaggtcccaagaattcccggggcgcacgtatgtgccctggaaattgccagcgaaggcttggaccaagtcgtcccagttggagatctgccccggaggcaggtgctccaaccaggcgcgagcagtgtcggagaggaacagggggaggttacggatgatgaggttgtcgtcgtccgttccacccagttggcaggcaaggcggtagtccgcgagccacagttccggtctcgtctcccccgagtacttcgtgatagtagttgggggtcggaaccgggtcgggaatggcgcccgtcggatggcccgactgaaggcctgcggaccgggtggttcgggcgagggactccgatcctccccgctgtcgtagcgccccccacgcctggggtggtagcctcggcgcaccctttcgtcgaggtgggcccgacggtcgcgtcgatggtgctcgttgccgaggtggcccggggcgcaggcgcggtgttgcgcgtgcgcccggtgtagaccgaggcttcccgcatgaatcgggaagtcgcggcatgaggttccgagggatatccttgccttcgggaggcagtgctctcggcccgtcgggccgcagcgccttccaggagattcttgagctctccctggattcgccgaccctcggtggttgatggctctggcatcgcgcggaggagcatcgctgcggctgccaggtcctgaccaaccccgccggatgcgggtggcggcctgtccctagcatcgttggcgatgcggtgctagagaccctggggcaggtgacgtatttctccggccgggggctggcccgcccatacctgcccgacgtcccggcggatcgactcgagcgctcctgcctcctcgtcgagcccggcctgcgccccgcggacttgctcgagctgtgggtcgtgaccccccgccggaacggggaccacagctagctcccgtgggatgtcggcgcgaggcactggcctagggagatcaccatcctccggcacgcgagacggctgcctccggagggatcccctagctcgacgtggaaacagttccggctcgggccgcagtccttgtcgtcaaggctgcggctgccgtcggaacagtcggaaaggcagtagtcgcatgcggtcatgaagtcccgcatggcactggggttgccaagtctagagaaatcccaacagatgctgggctcgtcgtcttcctcggacccagagggcccgtaggtcgagacgtccgtcagccggtcccaaggtgacctcgtacgaaaccccagagggtttggacttgcctctacgagagcacccaccaaagcgaagcgctaggtgggtcgaggctgaatccgaaagacgtgggatgggaatcggtcggtaccttctggtcgacgggcggcgatgaggtcacgtcgtggactgactgcgccgtcgtctcaggtacaaggttgacgtccagcaagcttttcgcgagcgtgctggtgtcgtccgcttgcttgagattggcgtgtcacggggagaaggcgctcgccttcgtctcaaacgcga

SEQ ID NO: 6604 - DNA, 2155 bp, Arabidopsis thaliana landsberg
attcataaactagtaaagattattgaaaagcagaccagaaatataatcacaaaatcatttcaaacatggacacaactacaaattttcctcaatgctagcatctacaattatcatcgacgttctaacgcaatttcctgaatcaaaatcaaaatgaaaaaggagtttagatagctcagagaagtaccaattttacctgatcacttcaggttccttcatctgaggaaccggcgccgctaaactaggaaaatccagaagcgtcaagaccgaaccaaatccagacagctgcataaacatccttctgggtacatgtacagccgagaccgaagagaatccaacacgactaatcctagaaacgctgttccttgattttcccgcgctgataaataaaataaaaaaggttcaatctccagcgaccatactctcaaatcgacggagatagaaaattatgagattccaaaacatacgaatctaccttaaggccatggatgatccaacgaaaggaagagaaatctccatagccatcgccatcgccgtcgtcgtcaacagtcttcttcttcttcttctatggatagtggataagaaaaagagtgagagatgagattagctacggagcaacccaccactaaacttagtggacctgtgggacccacactgcttatgaattttgttgtgaaaaaaatacgcgctacggtaacgcgtgaggatctatttttccttctttttttgtttattttgttaaatacatccggttcgatcaaaccggcgatttcaattttgacttgagaattcagattagagcatagccgatcattggtgttgagttcttctctcttttttttctagcagtttgctctttcaatgctctagcagtttgcttttacatgtctcaagattagtagtagatctacagatgcgaggagaaatttaggaacggatttcggttttttccacacaaaggaacaacaaaatcttgaaaatgttgagagagattgaaaacaaataaacatgatacataatcagaaaacaaacacaattcccaaacagtctcctctgctaatatgctattgtttttctcaggtatcttccacttgcgagtgtaacacaaagctcggaaatgtagttgtgatatccctgcacacaatatcagatatcatggtgttaataatacgtgatgcagaaaaatttgaagttgcattggctaaacctcgggttagtctttggtttaggagctcacttgagatactggagagtcatgttcttcagaagaagaggatgtctaaaaactaggtccatccactcttcctcatcgatcatcccttcatgttttgtgtcagcttgcacaaatgtctgcctcataaactcaaaaatcactcttcacttcatattcatcagctgcttaaacttagttggctatactatagactagagtcgaaccaaaaaatagaaggaaggaaaacacaccttgtcgattatactctctacgatttcgtctgactggctcatgccggacgcagcaagagtagccaccaccagttgtttcaccccctgcctctcgataaaaccttgctgcttaagatcatatagctgaaacgaaactgccaaataatgttccaggtaaccgttaataagctttcatggaatatatataggtagcatgtgaacagtttgtttgtagatggttaatatatcgggtctagtttttgagatcagagacgtacggtcaattttatcatctataggagcagatggatgaaagacagagagagctcgggcaaactcctcaaacccaagtaatccatcatgatttgtgtcgaacaaatcgaagacctgtgtgatagggtaatgtcattgtttgcaaatggattacaaagactttttttgttgagaacaaaaataaaataccctctctgaaaacaagctctcatttttgtcagtctggaatatggctacatgaaactgttcctgatacaacagaaatacaacaggacacgttatggaaaatctgtaagacttgttgaaaagaaggagtgcgtggcaagaaagacatatatatttattatataattccaaataccttgttcatttcaccataataacacgttacgccttctacaacgttaccctgaacgaagaaacacagatttatatcatatgc

SEQ ID NO: 6605 - DNA, 756 bp, Arabidopsis thaliana landsberg
  unsure (1)..(756): unsure at all n locations
tttccgagctttgtgttccactcgcaggtggaagatacctgagaaaaacaatagcatattagcagaggagacaatttgggaattgtgtttgttttctgattatgtatcatgtctatttgtttcaatctctctgaacattttcaagattttgttgttacttgtgtgaattaaaagtaaagaaaacaaatctgtatttttgctactcctgattttgattgatgattttctcctcgcatctgtagatatactactaaccttgagacatgaatcctatgaataaagagcaaactgatgaagtgataatagagagcaaaaaagagagaacccaacaccaaatgatcgggtatgctctagtctgaattctgaagtcaaaattgaaatcaccgatttgatcgaaccggatgcaacattacaacaatcggatttgttagtcttgtggttgactttgtcagttagagttgacaaagtaattagcaaagttagtgacgattgtgttctgcataaacacgtttactttgaggaataaattacttactctttcggtctttcctaatatatatgttttccctgtctcaaagatctgaataggtatcagagcgcgttgacaatctctttttttgatcatcgatttgttctctctttcttggctaaaaagtttctatctacacgactctccatggattcaacaaggaattcagcttcttccaactccacgggatgctntacggatcagaaaaagcgaaaggcactctatga

SEQ ID NO: 6606 - DNA, 2254 bp, Arabidopsis thaliana landsberg
acattttaagatttttctcatttatctaatgaacaagcaattttttttggttctgttcatcctaatctaaaatatacaacagatcacgtcttagcgagatgacattcttttgactatttctcttttgtgtcatcttcgtttacccaattgaaacgattttttcaaaaactgattagccacacgatcgtctctatagcaaagaactcgcaaaatcgtgtttggatccgacctgttccatcgtccagtcgttggaggcattggaagtttttgtcctgtcccaaccaaacccattccgcttgactcgcatgtcacgatgctaaagtcttccataagttgttctgttggttggcccataagctgaatcactccttcaactgtctctgcctctctatccaccacttcctctgggattagtccttcgccgcaagtgcaataaaccttcttcaaactctcgaaatcttcctcgatcaaatcgtgatctgttcgacagaaaactcgggaatgtcctcccgcgagaagaaccgtcaaaacgacttcgaatgaagccttcatgacttctttcatcgccaatgcttgcgctttgtccgcaagaatcgcggtcattaacgttaagttctgtttcaagattcgcaacgcgggtttgatcctcccgttcgcgacatctccggtgtataggctttcgtagaatacagagtatgagtctaggaagattaaccggtaagctgcaacctcagagacatgttggcatgcagattcgattcctgcttgagtgaattcgaaataagacgatgatttggtccgttcgcggcagcgtttttgcgtcgcggggaggaccctcgggttgagtgagagggatttgttgagagagtgaagttgtgagcttaggaaatgtaaagtgttgagacgaatgtagaggcgttgggttcctcggctagtggaaggacgcgggtggttgccacctggagcttcacccatttggttaagttcttctcccgaggcagcacatggcgtggctttcttccaaagcttcacgaactttgagtctcggttacatcttgtaagtggaggaagcgtaggaatgtaactctgttttgaacctgacaaaaaacaaaacaatcaccaattagtaaccaatggtttgtatgaaatgagaaatttgtatcctttcacttaccacaagatgctacgaatgtggtgtattcttggaagagtttttctaatccttcagcaagatcatgaacaagatcctctgtaatcccaatagggatctcaaagaactcctcgattgcatcattcgctagcttcatcaactctccagcagattgtgcatagggttctgattttgatttcgggttccatgtctacagaaaaaaatattgagtgtatagatgatacattttgtatacttgaactgcaagtaaagctttaataaacatacttcagcttcttttgctctgctcaaacattcttgaactgtttgtaacttctcttcaatccattgccttagtagtcgtaagataatcgaatcgacttcatacggaaccatctctctaacaaggcctttaccgccatcttcacattcatctgaattctctgccaccatctgcacaagaaccttttcgagcttccccgcagtttgcagaacttcaacagtctctttagtgattgtcgatcgaccagctaagtactgcatcaagatggaaccataacattggtgaagcgaaaccgaggcgactccagctgcaaccaagtgccatctcttaagtatcgggctaaaacactcgctctcgcgcaaagcaagatcctctgtctccttagctagccgaagcaacatagttgccgcttcttcttctccttcctctgtttcttcgatttcggccttcatgttttctattacctttgagaaggcgtttttaatagatgctcttatatagtaatcgacgcgatcccctgaagaatccaccaatttcacatcacctttctctagaccattcatttgagagattgtcacgtcctcccccaagatcttagaagaagacaacgctaatggcagaagattctcgatcaatcccacgttccctcgttgaaaataatcatgatagctcaacaacctataatcacacattcacaatcagattcagttttgtgtgatcaagtccatttacaaggcaaaaagaaatacctttttttaatccatccttgcatagaggccaatgttcaagtcaagagcttcacgtaaagagccttgcgatca

SEQ ID NO: 6607 - DNA, 1762 bp, Arabidopsis thaliana landsberg
cagtccgatactcaagagatggcactcagttgctgctggtgttgcctcgggtcacttcaccaatgttatggctcgatcttgatgcaatatttagctggaagatcgtttatctcgagagatactgttgaggttttgcaaacggcagggaagcttgagaaggtcttggtgcagatggtagctgaagattcagaggaatgcgaggacggtggaaaggggcttgtacgagagatggttccttatgaagtcgattctattatattgcgtcttctaagacaatgggtcgaagaaaagctcaaggcagttcaagagtgtttatttagagcaaaggaaactgaagtaagttttagagattttacttgtgatccaagaaacattacttcatctaatggtgtttgctttctatctttgtagacgtggaacccgaaatccaaatcagaaccttatgcacaatccgcaggagagttgatgaagctagcgaaggacacaatcgatgagttcttcgaaatccccatcgggattactgaagatcttgttcatgatatcgctgaaggattggaacaactttttcaagaatacaccacatttgttgcatcttgcggtaagcaaaacatccaaatctgtataccgcaagaattgaatttgttatctctaattcttgtcttgttcaggagcaagacaaagttacatccctacattacctcctcttacaagatgcaacagagattccagattcgttaagctatggaagagagctacaccgtgtactacttccaacgaagaccttaaatacaccacatctgtcatatccgacggccaccatccacggccatccacaagccgcgggacacaacgtctatacattcgtctcaacacattacatttcctaagctcacatatccactccttaaacaaaacactctctttaaacccgaggatacttccggcaactcgaaaacgttaccgccatagaaacaacaattcatcttcttatttcgatttcacatacgctggaatcgaatccgcttgccaacacgtttcagaggtcgcggcttaccgtttgattttcctcgattcaaactctgttttgtacgagagcctctacgtagagaagttgcgaacgcgaggatcagaccagcgttacgaatcatgaaacagaacttaacattgatgtcagcgattcttgcggatagagctcaatcattagcaatgagggaggttatgaaatcatcattcgaagcgttcttgatggtccttctcgccggtggatactcccgagtgttctatagatcggatcacagtattatcgaagaagatttcgagaacttgaaaagggtcttttgtacttgtggtgaagggttgatacctgaagaagtggtggacagagaggcagagacagtggaaggagtgattcagcttatgagtcaaccaacagaacaacttatggaagattttagtattgtaacgtgtgagacaagtggaatggggatggttggttctggacagaagctacctatgcctccaactacaggacggtggaaccggtctgatccaaacacgatcttgagggtactttgtcatagaaacgaccgtgttgctaatcagtttttaaagaaatcgtttcaattgcctaaacgaaggtgaacaggtaagaagtaagaaaggaaaaaagaaaaattcaacaaaaaaatatgttggtgttggtgaaggatgtgaacttgattcgttgtgtaaatgggttaaaagtaggttttcgagtttgtgg

SEQ ID NO: 6608 - DNA, 5736 bp, Arabidopsis thaliana landsberg
gtacccgaatgggaaacaccagattctacacccagacacgcgtcgcctggatcaatgtttttcgataactccaacgagagttacctaaggtcctgatcgcatatcccaacacaatcttcatcgctcgaaagaaaccatgaaaaccatacatttggattccagaaccaaggagcccctgagacacaacaaaccttagacatcattgagagtctattaggtcatatgattcaacaacagcagcagcaacaacagtttcaagaaagccaacgagaggagtcgccatccgttaaattcctaaagcttgtaatgatgatgagagactttggaattcgtagtttaaaggagaacaaaacacggtcatggcggacaagtggttacgagacctcgagagaaactttaagatttcttgatgctctgataacttcaagagacagatagaggtcaacttcttggacgaagacacacgaatttggttggaaacctttagaagataattcaaaatgaagtactttccaccaaaggcatgtgattgattagagcaacagttcatgaacttagagtcgggaacaaggagtgtccgaacctacgagcaagcattcacgcgacaaaggagatacttatacaatggagaagacaatgaaggtttgatggtgcgtagattcttgagaggactcaggccagaaatctggggccaactacaagctgtcatatataacagtgttaaccgaacgggcaatgaatgttgaggagggcattgaattggagaaaaacgtaaccaacaaggaaagcgatcgaccgggaggatggatgactaacaacgcggagaccaaaaaccacactcctaaattcacaccgaattttgagagagacaatgatcgaggaagagcaaggacgagccatatcaatgatcgaaggagagccgattttgatccaagggcatgttacacgtgtggaaaaatgggacaattcgcactatcttgccctgtggttacacaaccaacaaaggcatatatcgcatgttattactgcagcaaagaagggtgtcgttccaatggatgcccgaataagagaacgggccaagtgaatccgaaggggccttgttattgttgcggaaaccgaggccactactctcacacgtgtctaagtaaacccacaggaccggctactcagagcaacacacgacccccgcctgcatcaggagcgagaggacccccggcgaaacgacaagcaacaattgctaatgtgtacgcattagacttagaatcggcagaaaccccaagacctcttaaagaccccgtaacaggtttgtatgggatctaactcccttttaaagtattttttggtttttgtgtgtgaattgtgagaatgtattgtctggtgtgtgcctgaatgcgttgccagggactgtacctattggtggtgtgcccacgtatgtgttatttgacttgagagccacgaatagcttcattacgcctgaggtggtcgcaaagttcaccacgaattatgaggaaaaagaagttaatatcccgatccataccgctagtgaccaaccaccccttcaacatgtagaatactagtaggagtacccgtagtaatccataggacaaccttacccgcaaaccttttgattatgcccatgaggaagtttgaagtgattttgggaatggattggttatccggataccatccccggatagagtgtgctaagagtagagtggtgttcgagttaggagaccaaaccaaattagtctatactggagtgagcccgagtgtcagagcagtttttgaatcagcccttcgtgtcgagagtatgctaggccaaggggaagcatatctagtaacccttaacgcggttggaggagacagtgatgaggagatgaaagtggaagacattccaaccataggtgaattcgtggatgtgtttaaagcattagaaggcttgccaccgtcccggagcaatccttttgccattaatctcgaagatggagctattccgatagccaagtccccttagagaatggcgcctgccgagttagcagagttaaaacaacatttaggagatcttcttgaggaaggattcatacgcccgagttcatcaccatggggagcctaggtgttgtttgtgaagaagaaggatgataagttacaagagatagttacagagttgaaaatgctagacggacctaatgctagcggttatcacatggcggacgatggtaccctgttattcaacggaagaattatggtaccagatcgaggaaacttacgacaagagatccttcgtatggcgcactcgtctacactgagtattcatccgggcagtaccaaaatgtataaggacatacgccgatattatcattggccaggaatgaagaaatcggtagctaaatgggtaagtcagtgtgattcttgtcagcgaataaagattgatcctcaggttccaggtggactgctttagagcttattagttccaatgtggaaatgggaatcgatctctatggacttcatcaatggattacctacaaggaaggggcagaggaacgatttagtttgggttattgttgatcgattaaccaagctgactcattttataccagtgaggagcatcgatcaagctccaaatctagcggagaggtataaaaagaagtgatcaagctccacggtataccagccaatctcgtgtcagatcgagatccgaagttttcggtaattttttggcaagatctccagaaggccctaggaacggatgtccacatgagtacggcgtttcaccccgagaccgacggacaaactgagcggacaattcgaaccattgaagacttgattcgaatccgtcccttagaatggggaagaagttgggaggagaatctaccattcatcgaattttcttaaaacaacagctaccattcaagtattggtatgtcaccattcgaagctgtgtatggaagaccttgtagaaccccgctcaactggatggaagaagaaagaaccaaattcgatcaatggatagttgatgaggtggcagagaaaatccagttcatacgcgacaacatgaagaaggcacaagatcggcagaaaaagtacgcggatcggaaaagacgagaagtagagtttcaagtaggagatatggtctacttaaaggtcacaactcaaaaggggaaggatcgattcggaaaaatagggaagctggcagtacgttatattggtcctcatcaaattgtgagtcgagttggtgaggttgcatataagttagatatgccagagatcatgcgacttaacaaggtgtttcatgtgtctcaattaaaagacatgtaccaaatcctgatgttgtaatttctgaaccgatacccgaattgaagactaacctcacttatccggaggggccactcgagatcggagaacggcacattcgaaagttaaagcaacggttaattcctcaagttcaagtattttggggaaaacaaaaccgacggtaactacatgggaggatgaagaaaagttccgggcaaaatatcctcgactagtcgatgctgaggaagaagatgacaatgaagccggtccatccaatactcagggaattcgggacgaattcctataaggaggggcgaatgtagtaccccgcgcattcaccccgggcaagaaagaagggcaagagaagaagaagagagaatggtgcatgaaataagaggaatggccgagtattttataatctgtggaagccagagtagagcccaagtctcgaaaacatggggctgaatccattcgggcagagccgacttagtgagcaagttttgtcccgagccatgcaagccaacttcgagcccacgccttagccaacttggagccgaatccacccaggtgagccaacatggtgagcaagtttcgtcccaaagccgacttggtgaccaagtctcgtcccactcctcatgtccgaatcttgagcctataaataggaccttaacccccgtagttaaaccttagaagctttcccaccaaaacactgcccaaaccgagagagaaagagagatcgtctgaaccttaaaccccgagagagagagagatcgtccgaacccttaaccggagagatagagagagagtccgagctagaaatcaccgagccttaggatagtccgagagagagatcccaagtagaaaccatcggtcgagttaagaagattcatcggtgattatgggttccgtttttgttttgcatgtttgattatccttcttgcatgttctcgattctcccttctcttagttttgtggttgttgtggttgaatttgttgaggttgttaaccgaatagctggattgttgaaaccgaagcaccttcccctataggagtggttgtgatagaatagcaccattcgcttgagagggatggttgcgttgtcaagacactactcgctagtattcgggagacttttagagagaactttatgaacatgtgtgttgaaaacaaaccgcatgtttcatagtcttgattgggaaatcgtagtgtatggagcttggagagtatccaagttaactccataagcatgctacggttaagtgggatgtatcttaccttgccttgtgattccgttctttcgtggggtgtgtttgacgagatgcaagtgacctcaaggggttcgaaggacccggagagactaggttagctacccaagggccggtgtcgcttacacgacggtgtaggcaaggtgatgttccggttatatgcctttgtggttataactcgggtgttcacaatatgctgaggaaggcagtgcattcgggtcctagttaaaactttaagaaacgttatcttcttgttgtgttgtgtgttgcttgctaccttctctgtgtactctgattatttatgttatgcatgtgggattatgagtggggattagactaatgtttccttggggaactcgagctcattgagtaatgctagattactcatgactctacttgttttgcaggtaaccttagaggggattagagggagtggtgaacactagggaacccgcagtagtttttcagtgtccttttgtataacttaaagtatgtattttcgtatcatgtacttttgggcctcatgccttggccataaaaacgatgtttatgttgtgatttttccttgtattttcgtaactctatgatattgaaatcggtatttatttaaaattatacgggtttcaaactgataaaactttgtccgagtagacacaacatttgggtgaagtgagggttggcaagcctaagtggatctcaaatggggaaatgagtaaccttgagtgggctaaggatcggaatgtgtttttgaacctcggctactctatgggaattcattttcattgtggcgtctcggggccgtgccggactggccgagttctagtacggaccgggggcgttacaacaggtaggtatatgagcatggttttgatgcttttgggatacggtttttcaaaagttttatcgagtaaatagtcacaaaagacacataggataatccgggtcgttcaccactattaggatagaggggggaaatattagaaacctaagatcgttgttggattggatgcagatatcaagggaggggtcggacgagaaccaatagagagatgtgatgtctagtcgtggaaattttgcgcagtatccggagtcggataattggatgccgagtgagagtggtgagataaacgaagattatattcacttggagccgtatggattacctgaatgggaaaccccc

SEQ ID NO: 6609 - DNA, 1621 bp, Arabidopsis thaliana landsberg
ggcttaagctccattgcatgtgttagattagcatacttctcctcaatttcatcgcgtctgagtctactacttaccatctgaattaactacaaaaataggcacatttcattttttgaactgcacacacttctctgtaatatgtatcgaaataaggtacgtgaggtgatctttaattatatggatgataataccttcaagcgacgtaaaatatcaataagcatcgataatctcccagttgcaagagtgtccattagaagcttatactcttcaccaggaagctcagaaagacgcataacctgtttacatttcttcatcatatcatcagctttctgagtagatccaacaacttgtaaaaacagttcgagtggcatggctttaaaagcatcttcaagtgcaaacaaattgtcagatttctgatcatgtatagacgaaaaggcattgtcccagctagacaaagaactaaaatagtcccaaaggaaacaatgtaagagcttcacacgaaccatctttgcaagcacaaacccattggctcgcatggctcctgatttgctagcacgcgcatccaaatccacattcgtttgacctctctgaatgtcattcaatattggaattagctcgttgcttttcctctttgataagttctggccacggagtcccagttcaaaagacctaatcctatcatgaatttcaccaactatgtctcgagtcaaactttgaacagatggatgaaaaactaccacagagctacgattgcgaccacaattagtaacatttgggacactaatgttcatgcaattgcagagtccttcttcttgaagcctatttagaattctgtcaatggttttcctatccactttggagctcctgtccttctcaagactgagaagccatttatgtagctcggctcttacaacaaacttctcctcctatggccagcccagaaagaagaaacaattattcagttggaagggaaaaggagaaataaattatggcattcaatgtcgagaaaagagaacagtaagtacatttaagcgctcaagtattctccgctctcttcgagagttttcaacagtaatcggctgaggttggtgcacctttggtttagctggcttcggtggagcgagatggttcatttctgacaaagccaaatcaggggaccccattgcagtatcaacaaccttatcacagatctcatggaatgattcttgtaagttacggcgtgtaaggacatgtcttcttttggcatcagatggggaacaatccggaactcctgaattgctttcagaatcagttagccttccaggtgtagcaaagtggagaactcctgaattgttttcagaatcagttaaccttgcaggtgtagcaaagtcagcatcagaaattgcaatactgtgttcgatggaggtctgagtcaatccaccagtatcatgaggtgtgccaaaatcattaatcggtacattgttttcccagctacgattttcagctttctcaggaaaccgatcagaacattcggacccagcattaccagaagtccaaactcgaaatactctagtcttcttgtgactttctgcctgtaaatgcatcccgacttttaaacaaatactataaagccgagagtagc

SEQ ID NO: 6610 - DNA, 804 bp, Arabidopsis thaliana landsberg
cacttgaaaatgttgagtggcatagctctaaagcatctttaagtgaaaacaaattctttgatatttgatcgtgtatagaagaagaggcgctgtcccagccaggcaaagaactaatatagtcccaaaggaaacagtgtataagcttgacacgaaccatgtttgcaagcacaacccctttgcctcgcatagctcctgatttgctagctcgcatagctctctgaacgtgattcaatactggaactgtcttatcgctttccctcttcgatgatctctggctacggaatcctaattcaaaagacctaatcctatcatgaatttcatttcctatgtctcgagtcaatctttgaacagatggatgcagaactatcacagagcaacgactacggtcacaatcatttacatttggaacacgaataccaacacatttgcagagccctttgtcctgaagcctgtctagaattctgtaaatggttttcctatccaccttggggctcctgcccttttcaaaagtaagaagccatttatggaactccactctcaaaacaaacttctcctcctttagccaaccaagaaagaagaaacatatagtcaattataaggaataaaaggagaaaacgtatatagcaagtaacgtggataaagagaagatgtaagtacttttaaacgctcaagtattctctgctctctcctagagttttcaatagtagcatgaggttgctgcacttttgatttagccgactttaataaatcaggggacccttttgcagcattaacaaccttctgaccaatctcattgaatgattc

SEQ ID NO: 6611 - DNA, 6647 bp, Arabidopsis thaliana landsberg
ttcttagtcgactcccacaacaccagacactcaaccctgacgagaccaaaaagaagcttggaccctgtatgtcgactggtcttctttgtcctgatgatccggaattggcatccgtctcgtctcaccaaccggtgaaatacttgaacagtctttttgtctacgttttcctgctacaaacaatattgccaaatacgagtcgctcataaccggactacgcctggcacagggaatgcggatcaaaaagattcacgccctcgtagactcgcagctcgtcgctagtcagtacaacggagattacggggccaaaaacgataaaatggaaacatatttgaagatcgtccaaaaactagcaggaaatttcgaaaccttcgagctgaccaaaatcccaagaggggataacgccccccgtttcgcactggcatcactcgcttcaacttcagatccggatctacgacgcgtaatcccagtcgagagcatcgaccaaccaagcatcgacgagcaggcagccccagcaatggtaaactcaatcaaatatttttgagcacccgacccaacagacgaaacagattggcgagtagaaatccgggatttttatccgacgatgcaatcccacatgataaatgggcggctcgacgtctacggataaaagcttctaggtacaccttgttaagggaatttctgtgaaaagtcagcgcttctggcgcaatgctcaactgcatccacggtaacgaagtcactgaaacaatgaaagaaactcatgagggagctggaggcaatcattctggtggacagtccctcgctctaaaaataaagaagctcggcttctattggccaaccatgattacagactgcaacaaattcgtagccaagtgtgagcagtgccagcaacacgcgacgacgatctatcaaccaacggagatattacgcaccggcgtcgcaccgtacccattcatgagatgggccatggacattgttggaccactacccgctttacggcaaaaacaattcattctggtgatgaccgactacttcacaaagtgggtataagccgaattctacgcaacgatccgagcaacggacgttcagaacttcgtatggaatatagcatctgccggcatggcctcccctacgagatcatcaccgataacggctcgcaattcatttccttaaccttcaaagacttttgcgcgagctggaaaatccgactcaacaagtccacgccgcgctatcctcaaggaaacggccaagctgaagcaacaaacaaaacgatactagccggtctcaaaaaatgactcgacgcaaagaagggagtcagggcagacgaactcgacggtgtactctggtcgtaccgtaccacacctcgcgccgcaactgagtataacaataagaaggttcaaaaccgccacttcgacgtcggtgacttggtcctaagaaagttttcgaaaacaccgccgagttgaaggcgggcaaattaggagcaaactggaagggccgtatcagatttctaagatcgtccatccaggaaactacgagctgcttactatggctggaactgaagtcccgcgcacctggaactcaatgcatctcaagcgatactattattaataataataaaaaaaaacagctcggcctagccgatgcagcacttgtaatgtgaactacgaacgacttgatccctccgatcagagggtacgtaggcaaccctgtttacagggcacaactattacaataagaaaaaaaaaattatctttctcggtagaaagtataaacgaactccacatcgaagctctggcccgactctcgatcgaaatacacccgagcagttcaccaataaccattaaaggttttggaaaaaacttactctcgggtataagctgagctccgcgctcgcatcgaaaaacgaacaaatacactcatatttattacaccataaacgggtcgacgacgacctgtcatgcaaacgagcaaagatccgagaagacatatgcaaacaaaatgacgagtttcaaaataaatagaataaggtcaacataagtggcataaaaagatccaaacacagccaacaggaatggcaccgacgaaaaacaacttagccaacagaagtggcaattcaagtttgttttacaaaaagaaaccgacacaacggtgagaccttacgcgttaacatcatcgacctgagtcggctcgacagctggcacttcgggctgaacagccgtcgctccctctgtaacatcccccaagatcaaagctcggttctgttcgacctgttcgagcggccccacctcttctccatcctggtcttcagcttgctcatcaccatcctcgggactagggatcgaagcagagaagtgaggaacctcgacgggactgtcgaacaaagtgtaggcatcgaagtcgccggtttggatatcggtaatctcgtgagcacgcacttcgtcgttcaaagctttgagatccttttcgagcctctcaaaaacgacaggaaatttaacttcaatctccttcgtctcgaccagagcctccagcatcttgatattaccgcgaacctgattatattccaagtactttggttcgatggctttggtatcatcaatattcgccttgatacgaatgagacgcttctggacgaggcgggccattttcgccaaacctctgctctggcagtagctgtcgtactcgtcacgacgacctcgaagcccttttttctcagcacaaagatggtcaaccagctcattgaacttttgcttcaggtcgttaacttcatcattcagacgatcccgctctgcaagtagcccggtacgatgatgagtcaccttggacacctcgtccaataatcttctcacctctctcttcgattcatcgaacttccgattcacctctgcggtcttctccttttcaacgtccaacgtagcacgaaaatcgcaagagttcggattcccaacagatatcctcttgacccgcctgtcataaagttggacgacgcggttccatgccgaagaagcctgaaagatgaacgaaatcaatataataagcatgaaaaacaatgcaaccaaaatacgagagcttacctcgcatgactatctacaggcattctcgtacgcgtccctttccttcaaagattcaacgtgagggaagaaaccaggtcccttccccatctcgggaaacatcatcgcgcaagcttcagtgttagacacaaagggaatatccctttcaagatacagaaagccccagcggtgatcgacccgagcaatcttcgaggaatcaggccgttcttctccgagagggagggatctcttccgactcggaggatcggagggactggcctgaacgaccaaagcttctggagcgacggtctgagaagcaacaatttgagaaccagccaaaggacgaggatcgccttacgcgcaaccaccaagacgagctagtgtcacctctctctttttctccttctcagaattggggctgagaggacgagacgggccggcctgaaacgcatgtcgaccaccttggtcttagagacttcgctttttggccagctcgagctcccgctctttagatgcagacggctttgggggatcaacggcgggatgcttccctctgactcgctgagagtaatccgggagcgcgtccaaattcttcctacccatttctttaactaacaattcacgaggaaaaagtaacttcaaagattaagaacgaaaggaaaaacataaacgcatcgagacagacataccttgtttcttcgaacgaagggacaaactttcctgttgatagctcgcgatctttgaacggttgaatcaacggaggacggccagatgtaagggcaaacaacgcgtatattcttaatgtcttcgaaaagttgatcgggatacggatccaaaatcttcggggagcgaactgaatatctaacaaagaaaaatcagagattcatccgtagattacaacatcaacgagacccataggataaaacaagctcgaattataccggggaaaatcctccatctagtataattcttgaccgaggtatctccaacagaatccggagagatcttgacaaaaaatatcctccagcccagtcatatgtctagctcttagcgtcaagaaccagcttcggcgttccagaagactgagcatagaaagtacccggtttcttcccaacctccttgaacgacgtcaactcctcgaaatccgaacaatgaacggtcataccgcatagattctaaaagcgacctccctccgagcgacatattctaaaaggaaccccggaatcggaaaagataagccgcattcagtaaaaacatctcatacacacaaatgaacccttcgagagtagtctatggccgttcagaagccaacggaacgcgaaactccaaagagggcggtgcgtcacaaaatcgcaacacatccactatagacgcgctatctgcacgggtcggacctaaggaatcgacgacgtgaggggcaggacccgcaactccgaagggcatgagaatgacctcaacctggaaagagacatcttcgggatcgtctggctttatatcagctaaatcctcgtccaaaagcctaggacggaacggatcggctacataaatcgcctcgacatcatcccgttgtgatgaggactcgcgacgtcgaagctcggcaacaatcgaggagctagcagttgaagagcccgcataagctgcgtggatctcatcatcgagagactcgttcaaaaatcggtcagtagccgacgcaccaatttgcgaaccgctaggagaattgcctcgatggagataaaaggaggaatctcaagaactcatcgacataacaaaaagtaaacgaggacaaaacgaaaaatcaaaacaagagatagagagcgagagaataccttcaataggagagaaagatgtgaaaggagaagaagtctcgtaatatttatagtgagctcgacaaaacattaggctaaccaaataggtgcaatgattacatctaaagcgtagccgcttcgtttccaacaccctaaaggtggtgcggtcaaccaataaaaccaagcgtaggtatcacgcgcctcgagtcgaacgaagagacgattcggctaagttccaggagtaacttcacgcgccatgagagaagacgtacgaggatcgtcgaaatcccgggcccaagttgcacatgggccgggattggggggcaactgttaggggtcggttttggccctaaacataataagcccaaaccaagcccagtaagtgatagaaaagatctggagtgttccatcgaccaaaggaagagggcaaagaggacagatgtacggtgtagagtggaaaaaggggtaaagacgtacaagcacaaaaaggaaaccctaaaaagacaggtcctataagtacaagaatggaaaagaatgaaaggacatgcgcaattcccgctgacacagagaaaggacagcagtacaaccattgacctcgcctcgtcttcaagacctcacctcctcttcaagacctcacctcgtcttcaagacttcgcctcgtcttcaagacctcacctcgtctccaagacctcgccttgtctacacatcaccgatatcatcctgtttcgatcatcccgtcacaataccacgtcccttagtcaagaaattctcgtctagtcatcgacctattaaccgagacagattctttaactattcctagagaaacatcgtacttgtgtgatccctacatcaacactcatgactcttgtttgtaattgaattgaaaattagatacaaacacattaactagagcttgttttgatacagagcttttagctaactctgttaactcactaacggtcttcaataaatctggaaccgaatccggtttaatccctaattcacatgtaccgagtcttcttcattaaacacataccacaaccctccacacaaaggagagtctcttctatgtttatagttcaaagatatccgtcgaaaaggaagaacgagcccacgaccagacgaaaatgaacgcactacgaggagcaaccgccactacatctagtacaggaggacaaacggtgacaccgatcccagggaagtttcacatgtcaacctcgatacccgctaaagcgtcagcacctccgacgccccacggatcgttgctcggagcactcctcgaatcaccgccacctccgaacgacgaccggcggcccgcaactaaagagccgcatcaagtaaccccataagctggggcgccaggagatcaacacgtcgagactggagttcgcgtagaaccaagcgaaacgttccagagtatcatgaatcatctcagccagtaggacgagcgaataaacgctcgctttgcaactctagccgcagcacaagcatattcactagacgaactcaatcgactgcataatagccgactttcaactcaccagtcagctaggggaaatccagaacgtcgtccaccacaacatccagcgggctacacaggcgagggtgctcgcgatgcggaagtaaccgagctaaaaagaaccatcgccaagatgaactcaaggatccaccgagctacgagcactgcgcccgaactggatcgcgttctagaagaaacacaacgaaccccactcaccttgcgaataacgaacgtttcaatccggggcgcataaaaaatcatgctcaacagttataatgg

SEQ ID NO: 6612 - DNA, 1215 bp, Arabidopsis thaliana landsberg
gtttcaatggagagttattgtatggtcatttgcggggaatgggaatgctcggatattcaagaatggtattttgaaattaacaaaattctaatgtctagaattgttccaattactgcagggatgaatctttctggtttggaagatattgtttagaaagaattcatgaataaagatttgacattaggaacccctaggtttagttatttaccgttcatttcatggattacacgacgggaagaagacacctccgatattgattactagtgaagttggtttgaagttcttcattgagatgtttgggaggaacaagggtttaaacttgtttgttactttcagcggaatgattgaaataggaaatccttgttagaaaattgttagagaagaagaagttgctggttcatctgaaatgaagagtaagaaaagagcaatttcctcatcatgtgaaggacttgcaagaagtgatgatgacttttgatgggaagcaccaactgctggttccaaagccccaaagattctgacaactcaggatgagacggtgttatagcgaaagttgaagtacaagaagccatgtataacagacgcgatgaacaattactagcagtggcagcgagaggaaaagtagaactagtcccagtagtgatgaataggaagatttattttgggatagtgaggaagaggtcgaagatggagaaaatgtagatgaagttgctccaacaggttttgataccgaattttggggtcactttttggatgatgagttagctggttctaatgcacctgagatcatgtgtagtccacgagtggctagaactcaagaagataaagattgcaatgatggcagaggtagtagtactgactccgaaaccatgccaaatggaggacagagaaatcgagagacaaggaaaattgatgatattgaagatgaggagtttgatattcctccgctttttgatgatattgaatatgaaagggacgaaatcccgaatcttgatattgaagatgatgagaaggtatctacaaaggaagggtatgtgcaagtaaacaagatttccaaataagcttagctatccatgctatcaaggagttattttactttaagcagtctcgtaccaagcgacattactttgtgatcacttgtgctgatgaaaactgtcagtggagaataatgtcacatgagatgaagacgtgtggttactaccagataaggaaggctga

SEQ ID NO: 6613 - DNA, 716 bp, Arabidopsis thaliana landsberg
  unsure (1)..(716): unsure at all n locations
cgtatgagactaatgtataaattttgtgaagattactacaactaaaagaaatttacattcagcattgtatctacatgatctatgtggtagataaattctaccggtagtctttaatttacgtgattgacgacgataatgtaataactaggattaatgaatgttgagataaagtgaggcaaaatcgagcctctaaaaatgttgtttcgatgatcaaaaacgttaaaaatgagacagaattaaaatcaaacagcaaaaacagagaaacataatcatcgatgtggttttagatttaacctgnnnnnnnnnnnnnnnnnnnnnnnacatgaaacgagtgatgatgctggttttgccgacagattgatctcctaagaacaccagtttatatttcgctaatggtgacaccgacgccattcttcttcttttgaaagatcgaaaatgttggattcagattctcaaattcctcggagaaatgtttgaagagaagatgaaagctggaggaagaagaaagaatagcctatttttggaaagttaagaagcctccgagcacgttgacaaggacggcttgtgagaagtcaatagtacccgttctctcgtattatgtccgttgaaaaatccacacacacaccacagcctctcgaaccgtggaagactgaaacaaaacaacacagaaataaagagcgcgtgacagtaactcgctaagcatgcgaatgggccta

SEQ ID NO: 6614 - DNA, 631 bp, Arabidopsis thaliana landsberg
tctaacgttggatgtgttgagaaatgagagtctattggctacatcataaacaacaactgcaacagaagaatctcttatgtaacttggtattaaactcctgaatctttcttgtccagctgtatccctaaaaacgaaaattcacattattagcttcctcattgcgaatattacattgcgagaagccctagaaaaaacagcatttcttaccatagctgcagacgaacagttcgatcttcaaggtacattgttttcgataagaagtcaattccaatagtagcctgtgaatgaaacaaagatttatgagactaatgtataaattttgtgaagattactacaactaaaagaaatttacattcagcattgtatctacatgatctatgtggtagataaattctaccggtagtctttaatttacgtgattgacgacgataatgtaataactaggattaatgaatgttgagataaagtgaggcaaaatcgagcctctaaaatgttgtttcgatgatcaaaaacgttaaaaatgagacagaattaaaatcaaacagcaaaaacagagaaacataatcatcgatgtgggtttagatttaacctggtaggtgtgtcgaactatcatacatgaaacgagtgatga

SEQ ID NO: 6615 - DNA, 1785 bp, Arabidopsis thaliana landsberg
ttcaactgttcatgcaccatattgttatgatgaagggtagttatcttgaaagaaatataaaaagacaaaatagaagaagaaggcaaaaagcaaatttgagtaagattgctcgatagagtcatggtgagtagttcattttcatagcggacaacacgtggaaacattttccacgggaggaacaacacatggatatatcagaagaagttaaacacacacaaaaaaaaagtccaaacacatcgatccactaccaagaacaaaaaacgttggacaatggatatgaaaaatttgggttgcgtaaaatatctctaatattcaatttaatagtatgctattcatttagaccggagtcagaaaattcggataatcataaatttatggaacatatataatattcttagtacaatattcattatttttgggtggatactgataacaaaatgagaattacccaaaaatattacattcttaattaaatttttagtctaaaagtattattactaatttatttttccaattatgccaaaacaaaattgtatttccaaccaaaataaattacaaattacaaataaaattaaaatttctatttaggttctttctgaaatttccattagtttctgtcagttccaccagcttcattctcttttatctattcgacaactaactagtcaacgtttaaaaaaaatctagtcaacgttttgtattaacttcctcgacaagttcccataactctacctactcaacttttatggagaccacgtcttcgcgtcattgtttaattcatttcacaaggtcaacgcatatatttccctattttttagtctaattcaacgaagagttctttatcgttccccaagtttttttcatttggatccattcaatcttattgattgtagcgcttctctaaaaacagttttgatcaagacaatggaaaatggtttctcgttggtgcccaaagaagaggaagaagaagaagattatagtaatgagaaatctgaagatcagacgagttattatttgtcaacagagatgatgaagaaggtaagcttcatggctgcaccaatggtggctgtggctgcttctcaatacctccttcaagttatctccattgttatggctggtcacttggacgagctttctctctcagccgttgctattgccacttctcttaccaatgtcaccggcttcagcctcatcgtaaattcctcctcctcctcctcctccttctctctcgacttatagacctgtccaaaggacaaacatgctaagcaaaaaattagggtcgccaaattttttttatttttaaatattaatgcaacttcactttttttagtagttatatctttaggactaccaattttttgttttgatagaaacttacaccttttcaaagttatgggagtgtacacatttcttgtttcataactaggaccactatttttattggaccgactttgctgacttagatcgttagtttggattggcaggtgcgttagagacactgtgtggtcaagcttttggagctgggcaatttaggaatatcagtgcatacacttacggctcaatgctatgtcttctcttggtctgtttcccaatctcacttttgtgggtttttatggacaaactcttggagcttttccatcaagatcctcttatctctcaattagcttgtagatactcaatctggctcataccggctgtattcggatattctgttcttcaatctatgactcgatttttccagtcacaaggattggttctacctcttttcttgagctctcttggagc

SEQ ID NO: 6616 - DNA, 2994 bp, Arabidopsis thaliana landsberg
  unsure (1)..(2994): unsure at all n locations
ggaacaaacaatcatttgggaagaatcattaaagagaacacttgttttttagactcaccttgtagccgccatgacaatgtgctttagcttcttcttaggctctacatcggcactgagtatctgaaatgtttttggtctattagtaatatgacaaaagagggataatgaaagtttattagtaacctgactgatcatgagatccgcatggctccagtggtaagcaaagtaactaagaatacatctctcaaactcttcaacgagcttaatgaagagagaatcagcaccaggctcttcagagaagaagctgtatatgtcttcctcacagctgcctgattttcttatgtactcattagctaatttgcagagatgaggacattctctcctgtccttgaatcccatctgccgcactacaaaagacacaaacaacatttccttaatatgcatcataatctaagatcaggaagatttcaaggaagctatgtagattgattttaccaacatagtgagagaatctctcaagcttctcatggcctttgtgtttttgagacgatctgagacgagggatgttcttggagtgacgtagcttccttagacggaagtgcagtgcaagggctaagagtaagccaatggatgagattactaaaatctgtgcgaaggtcgtcgtgttgttgttgctgttaaactctggaacacacattgatctggatttgctttggggatcatcaagagacatgagattaagattgttagaactctaagattgggtccattcttgagtttgttttctgttacgagacaatgtatctgctttctccacgtgtgtttgtactaaaatagctttgagtcctattactccggaagtttcttagtttgctttttgtgtgatttgactcaccattttgttttaataaccaaactctcattcccaatgtatgatatactagtgttttggcaatggttttataaaatctattcgttaaggctataacataagaagaatctgtcattggatatctattggaaaaatgagttacagagaaaggctttgaaaataatattctaaacctaagtataagaaataataaattcagatcagagaagaagtaaagaatctaaagagagatgtcatatgtttttcatataggagctgtgcaagttgttctaaaatggccagcctgattacaccggctacatcgaacaacccgcttttgacgtccacggtcctctccttgacttctcctcttctttggccgtggtggttgtcttaaatccctaggtggtcttataacaatctcttcaccatcctcaccactttctctggcaggttctgttgttttccactcagttttgtctggaactggatgtatggtttctgcgtaagttcgccggtaatttgctacagtgaagtaactctctgtgaacctgtatacgttctgtctacaagcgaggagggctgcaactgcgtggctacaaggcaaaccgtataactcccatccacggcagtaacacgtacggcatctaatatcaactatccattttccttcactggtcatgacctcgaattgtgcttcgtttgctttgtgaactgggtacaaacgacattcttctatagcctcaaggacatgtctctcagcagatggaactagcataccagaccattgcatgcttgtttcacggcgttcattgaacagagtcattagttggcgacgaatactctccaacatttggattataggaagacctgacgcatcttgaacccaactattaagtgactcggaaacatttgcagtcagatgtccaaaccttgttccttcnnnnnnnnnnnnnnnnnattgactgtgctggatgttacgaatccacgaggcagcttctggggatatctgggctatctctcccatttttccttcaaattcaaagtcggtcagacattttgctgcttcccaaacaaggttcacaagaatggagttgttgaactgagtacggacgctttctgtgagacaatggacacacaagccatgaaacgccgttggaaaattagtatctactccatcgacaatggattgatctctactagataaaattgtcagctttggcatgttttcggaattaacttcaagcagctgacgcaattctgagaggaaccactgccagctactatcattttcttcactaataatagcgaaagccaaaggaaacactgcaccttctccatcaaacccagtggcaagcagcaatgtccctacatatttgctcttcaaaacagtcctgtccaatccaataagaggtcgacaagcatttagaaaaccacagattgatgcttgaaaagaaatgaagaattgttggaagctcccatcaactgggcttccatgaaccacagcaacgctcccaggatttgttctcctaatttgatcacaatatcgaggaagaaggcgataatcttcttcatatgacccgcgaacagcagccattatacgttcttttcccctccatgcttggttgtatgttagtgtcattccatgatcttgatgaatttgctccagtatctccatgggtgtgcaatgaggatttactttcagcctttctgtcacagcatcagcaacccactgaactgaagcttgatggtgaccaaggtgtgaaataccaccacatgtgtgactcccatgaatagtccttattgtaaaggttggtagaccaggaagctgggcacagtgaattctccaagggcaaccctcactattgcacttagcagtgaagcgagttgtgtcagatttaacagtctgcatctcaaagcgtaaggcaattgctgcatctctgagtgctctcctacacgcaaggacatcagaaaattccataccaacgatcaaattgtgctcaggagctgtttgcagagaccggcattgaaggataggaggagccaactctagctgctgagaaaggcttatgttcaggccaggtaagggatccctattcatgcaatgacccaccgccaactgt

SEQ ID NO: 6617 - DNA, 1686 bp, Arabidopsis thaliana landsberg
aaagcatgttacgatctcatatcaaagatgtaaaataagaaacactagtatataagacacatgagctattcaagtcgttgtgtattgaaaagacaaatataattcttcatgcagaaacagagcgagcagacaaagataacttaagtgtcataatgcaatgtatttactacacgtttatggttttagtgttttaatttttaagattaccttgaaaatgttctcttcgtttcctaagagaccaatccacataaatggaaactaatcttagacattgatatcactgaaagctatctcaaactgttaaataaaagctgcacgaatctgactaggttccaagaactagtttacattaatttgcaataaagctacaaaaatgtatagcctagctagtttgataattgtttaagcatgattgctctaaactcatgaattgcataagtactttgtcatttcttgtaccttgaaccgatccatcatacaacgatacatcatacaacgtggaatcccgtcttaattcccggtctaccaatacaatttctgaaccggaacaatctagatgaaaaccaaagaaagaagaataaaaagcggaaaactaaatccaattctactagacccggagaaccaaaccttaacgtcatcaatcacaggtccacacaatgaagtcatatcgtccgtcctcgtattgtaataaatgctgtagaaggcgatcctcgtacgttcagctttcgcagtgaagttcaactccgatctttcgaaactcgagtttgcttgcgccatataatgaaagttctgtgcttgatctccagcaaaagccattacagccaaaggttccttacacttgtcccctgcgtgtcccaaagagaaagacatcttgtacggaatgttcgcctttgtctcaaccatttgagaaattatgccttctttgcccgataaaagttccaaagctcgcttcccctcggggaccgagaaatggtctgagtcaataaaccgtactgctcggttcgattcgacggtccatccaggaagagacgatatttcttcatcgaggtttgttggaagcagaacacctaaggtagtgttcctaaacatccatggaccttcttcaaaatctccattaatcactgcattgcctgtaaaaagtacaaaattttacttttaactttactctaaatctcttctattggatgatttataaaactttggtatcgaaaacctaaatataacgttacctttgggtttatcaggagtaaagagcttcttaacggcaatgtcgtcaatgataggtccacaagtaggatcatcctccatgccagggttcttaaaaaccaaccggacgcgatccacaaccccttcaaacgcccatgcatatggatcccatccttgaacgctgtacaccgtttgcaagtcaatggtttgcgatgcgataggttcatcagaagaagctaccgaaacattcagcgactcgagttgtgcacatgtgcgggctgcactgaacgtgacggagtagatagagcctttctccaccgtaagttcttggctgatctctgcatcgtttcctaatctaacagcgtgacggccctcaggcacgatcaagatcatcccaccttgtttttgaccggacttgattagctccaccgtaccatcggatcgccagctcgggatcttagaggtgtcctttgtgattgc

SEQ ID NO: 6618 - DNA, 579 bp, Arabidopsis thaliana landsberg
  unsure (1)..(579): unsure at all n locations
tttataaagataaccaaaatggacggacaacaataattaaatcaaatataacatgtatcaaagattgttccaaacgtatttttttataagagaaagctaatacatgaaccaactcattttgattatctattgactacatttttgtctttggattaagttgcaaacaagaagagctcatgacttaggaaaacttgttagaaaaagccagaagaatatgtgcaaaacgaaatatattatcaattgatattatttttttgtcaaagggttttcattttcattgagtatttagggatcatatggtggatacaaacacattgggctaaccccatacaagatggttacaacttacaaaacattaagaatcaattgatatttacctaaatggatatatcaaaacatttaacgcattaagtgatcatatagaagtaattactagaaccccaaaacaataaactgcacatatatatgacggatatataaatttattccagatcaaaatggttatataaaaaataatatggntaaaaaaaaagaatgcgctaatgtatttgatgaattatacgtcacgtaaaaataata

SEQ ID NO: 6619 - DNA, 1496 bp, Arabidopsis thaliana landsberg
  unsure (1)..(1496): unsure at all n locations
gctagtttcaaaacaatcttgaaacgtgatcatttggcgtttcccgtgattttgtctaaccaaataatccaatgtacattattattttaaaattgtctgtaacctttatttttggttatgacaggtttagtgatcaacggcgacttcgaaacatcaccgtcaagtggctttcctgacgacggagtaactgacggaccatccgatatcccaagctggaaatccaacggtacggtggagctaataaattccggtcaaaaacaaggcggaatgatcctcattgtcccacaaggccgtcacgccgtccgattagggaacgacgcagagatcagccaagatctaacggttgagaaaggttttgtctattcagtcacgttcagcgctgctcgcacgtgcgctcaactcgaatcgataaacgtgtcggtagcgtctgtgaacgcagacgcggacgatatgctggcgtcgcggaacgttgatttgcaaacgctttatagcgttcaagggtgggacccttatgcgtgggcgtttgaagcggaagatgatcatgtacggttggtttttaagaatccgggtatggaagatgatccgacttgtggaccaatcatcgatgacattgctattaagaagctctttactcctgataaacccaaaggtaaccataaatttctctatatttctattttcgactccaaagttctaaaatgtgcctatttcaccctgatttttttggttacattttgtagataatgcggtgattaatggagatttcgaagaaggtccatggatgtttaggaacacgtctcttggtgttttacttccgacaaacctcgacgaagaaatctcgtctcttcctggttggactgttgaatcgaacagagcggttcggtttgttgactcggatcacttctctgttccagggggcaaacgagccgtcgagctactctcaggcaaagaaggaattatttcacaaatggttgagaccaaagcagataagccgtacatattgtctttctcactaggccacgcaggtgataaatgcaaggaaccattggctattatggcattcgcaggtgatcaggcgcagaactttcattacatggcgcaagcgaactccagtttcgaaaaggcgggtttgaatttcacggctaaggctgatcgaaccagagttgcgttctacagtgtttattacaatacgaggactgatgatatgagctccttgtgtggacctgtgatcgatgacgttagagtgtggttctccgggtcgaagagaatcggagctgggtttgggttttgggtttttgttcttctcgttgtcggtttggtttaagtaactcaaaatttagatgttccggttttattctagtgtaccagtaaaatgttgttgcaaaccaagaagaattctgtatggtttatttatccatcgggttaaagcanattcgaaggtgtttatcgttatgcaaaagcttgtcccaacgaanatcgagagttttttctatagt

SEQ ID NO: 6620 - DNA, 1417 bp, Arabidopsis thaliana landsberg
taaagaaggattagctaactcctatgcatttactttgctgctatggtcaaaacctaaccctatcatcatcctaagaacaagacttttgtatgcaatgtcaccacaatactactacttacaagctcagtcaccatctgaattcaaggcctctgtttattatttagatctcaaacttaagatactgatgccaagaacaaactgtatatgtaaacattatcagactctgaaatttggctttacatgtattagaaaagaatggtcctagttcgctgctgcgagcgattcacaagctttagaagtaattaactgagaagttccatatcctattatctacaaagcaggcaagaacaacacacaggctgcaaaagaatatggcagtagaagactcattgtataaagctacaaaaggtaaatgggtttataagcttttttcatttatcctcaagtctccaactaacaacatcttccaactaagaacacacctcagaagattcatctgaatacaactattaggagcatgttttgtacctgttaatggtgatttctacattttctctgctcctatctaggcccactttcacttgcagatgggacattgctggggaaactagatagatcaatgtcaatgagcgacatatcatacattgtttcaagagaatctgaggcatccaccagcaaggaagatttcacagcatcagagcgtgcaggatcagaagttacgctggagcttttaggtgagcttgcctctgaagatagactacttgagactgaaacaccatctatcttgtttgcatacacaggtttgttttttctcattgcatccatctcttggccagttggcacaaaggttctcgatcggtacttctttgtcccctcgtcaccaccatcttgatggttatagagcacataatcgtgataggtaggagcaaactgcaataaaacaatcatcagaaaaccaatatgaaaaaagtatattatctgaagtaaagatggcttcaagagaaaccatttacctggtgaacagtgtcatggtaaaagtcatttagttttacagcatgtgataagcttcctgagaaactgccagatccaccaacattggcaccagcatactccttgtatggaaaagcatagaaatgacatgctgcagcaatgagcatctcgacacatattataaaattttgaaaatgagctgctgcctctgcactctttatgaatccagattttgcagcaaggaaaacgagaacaccctgtgcaaagaagagggtcatggaacacaatcagaaaacacaactatgcgtggaagatagcaaaaggcaagagaggatatcaaatactctgaagtagtaagcaaatttaacctgccaataggttagaaagaccacagactttatgaacacaaacctttgggactggattg

SEQ ID NO: 6621 - DNA, 3253 bp, Arabidopsis thaliana landsberg
gcccttatctttgtacggtcgcacagacgaacttctttgccttgttcgttcgtagagtccaactcctttttttttaatataaatctttttttatttattaataactaaactcgtttccgagctgcctacgtacccattttgggagcaagccacaccgtagttcatgtaaaaaaacacgtgttactttaaccataaaatttctttaagttcaccactttccaaggacgttggactggcctgtcttctaaatcctttaatctgtaaacaccattccagaccatttcggtaacaatgtagggaccttcccaatcaatgccgagcttgcctgctccttcttccttcttgttatcaaacacacgctttagaacgtagtcacccacaaagaatggtctgcttttgatttttgaattgtaatatcgagctgctgcctgttaataattctgaattcgcattaaggcttgatctcgcctctcgttgatgatgtctaacgaggcgtctagcatcgctgaattttcatcttcatttaaagcagcttctgttcgacgaagtccaggcaccttgagttcggccggaacaactgcgtccattccgtataccaatgagaatggggtttctcggatcgaacgcctaggagtcgtgcgaaacgcccataaaacaggttgaagttcatcataccaacctcctttcaaatgattcagacgtttcttaagattgcttataattgtcttatttgcagcttcggcttggtcgttcccttgtggataccgtggagtaaaataactaactttgattcctcaatccgaacagaaagcctcaagctcatgtgagatgaattgcggtccgttatttgtaactatctcatacgggacaccgtgtctacaaatgatgtttttccaaatgaaggtctttaccgccgagtccttgatgttcacatacgcttcagcctcaatccacttcgagaagtaatcagttaaaactaagagatattgtacacctcgggtcgacctgtgcaatggtccaatgatatccatcgaccacctcataaacgggtacggggcagagatcaaagagaataactccgaaggttgatggatgagaggtgcgtggagttggcaacgtttacactactgagcatacttaacataatttgtgataatagtaggccagtaatacctcattctttgaatcttgaaatccatagcccttcctgaagaatgactgccatacaaaccttcgtgtacctcgttcatcacgatctcgacttcgagtccgtaaatgcacagtaaatagggatcgcttacaccacgtctatataaagaatccttttatagacaaaatttcgcgctaacgattctcattttcctagcctgccacttattctttgggaggtcgcctgtcacaatgtaatgttttattggctccctccaatcagccccccaatctttagccagaatttggtcaatttcatgaaatattcgtgcttctggctcgggatgctcatttggttcgaggatgtcttcttcaactagcggtttgtctttggcttcaacgatgttttcaggaactgtgtcttctgtttgtccgatgttttcctcgatcccattttctgcttgcacggtgggctcaagtatggctgccttttttgattttcttcttttgattagtggcaattcaaacacaggttcaccgcgatctcgtgccacagctcgggatcttgtaatgacgagggtttctttctcttccttaatgattcgttccaaaatgcattctaccggaatgattctttttacttccggatctacgtcgacgccagagctgcatgtgcgtacgcggttctattctctcctcgtggtatgcgaatgagttcgaacttcctgaaattcctagccaaatctttgaccatttcaagatatgcttccatccttgagtctttggcttcatagtctccattgaactggttaacagccagttgcgaatcactataggcgaccacttcaccagctccaattccatgtgccaacctgagtccggcaattaatgcctcgtattccgcttcattgttagatgcagtgaataataaacggaatgattgctcaaggatctccgaggtgggtgactctaatttgatcctgactctggatccttgttttgacgaagacccatcgacgtgtaacttccaagtttgattttctggttgctcttgcgtgccaagtactgataattctgttaaaaatcgattaaaacttgagccttcatggcgactcggctcttgtactctctatcatattcacttaattccattgtcgactttgccaatctcccagacttactcggactatgaagaattgttcgaagcggctgatttgttaacacctcgactgcctgagattgaaaatacgggctaaaaatccatactgaagttactactgcgagtgcaagcttcttcatcatcgcatacctggcctacgagaaagatttcataatcacattgtcggaaaacagaagcgaaactaagactgaagataagcaaaattaaccatcacgcctgcttaccaactcgtggtgactgttgtgatgaagaactgtgaaccgttggagtctggtcccgagtttgccattgataaaaatcctgaaacccattcgcagactcaatccataagcctttcgttgagtatgtattgagtttattggccatacgaggtaagctttagcgcatacctggcccagtgtgtttgagtttaaagttctcatctgcaaatttatctccatatatcgactctccacctcgtccatcgcctgtgtaaaatctccacctgaatcatgaagccaggaatgatcctatggagctacttcctttgaaataaagaggtttccccatgtttccaactcctttctctcctgcaccgggaggataaacatcaaacgaaaagagtctcttggctcagaactcagaagaagaaaaactaaacgccaggagacaagagttttaaaggggaaaacaaaggttacttggctacccgtgcaaagtgaccgaaagttctctgcgaaagaaactgaggattcagtaaggaagaaacaactcaaggacaagtagacaatacaatgtgaaggtttggtcgatctaaatttaaaactttacctgcagttttaggaactatatttccaaaaaggccgatgagaatgcgccctgtacatgaaagaagatgcaaactttactacaaactctatttgcataagctgcagaagatttctg

SEQ ID NO: 6622 - DNA, 529 bp, Arabidopsis thaliana landsberg
ccatatctcacctttctcaaactcggaacgttagatatttccatcaatttgttgcaattcattgtcccaggttgcttattgagattgtgatcgctacaactttctcacaactcttttagtggttttggaaaatcatcacaagttctagatcaagcacaaatgcaagtattgcgtcttgagtctaattcattccaaggaccatttccacattggatctgccagtttagatcgctggagtttttagatttgtccaacaatagcttcagtggctcaattcctctatgtttaaggaatatcacttattctttggaagtgcttaatctacgaaacaacaatttcagtgggattcttccagatgtgtttctcaatgctactcgtttatacacacttgatgttagccgcaaccggttggaaggtaaactcccaaaaaccttgatcaattgcacatccatgggacttttgaatgtggaaggaaacaaattcaaggagacgtttccatcttggttgggttctatgccatatttatata

SEQ ID NO: 6623 - DNA, 2094 bp, Arabidopsis thaliana landsberg
gtcgttgagcaatgacaagattttggcttttgccacatcataacttaaagacagacccgatcgttattgttcactgccgctctgtaacacttctgtctctgttgatctcatcaaacgcaaacgcactctcttgtcaatcatcaactattatattcgagtggattctaatgtagcgtatgaaagtagagagatttagagatagtatgtgaaggagacttaaatggttttcatcttatttctcacttaatcaaccctattacattaggttcttatatatagtgtgaggattaggttttacatttcatcctcatcctctaaacatttgaacctattggtcaatataggatcttgacttagacagctgaagatgcttttcattgacgttctcttagccacataactaacttgtttgtcttcttgttttgttgtaggtgaccgttgctcttggatgggctggatgggcttctgatcttctttgggcttccagaccatcttattgggcttagtcatctgctttagtaatgttggctcaacgacaccgtttggagttgtgtcagaaactgagctgagtgttttgtcttcttcaccttttcgcatttcttcaatctccttctcaacagatctcgttgcttcttgattctctccattaatagcgtattctggtttctgtgagacatttaatagttaggttacaattttaatcgttggatgaagtaaaaaatatataatatatagttttatttccatataaaaacaaaaatatgattgtatcttccatttaaaattttataattcttgtatttaattagtctatcactcgaacgtatttaatgcaggttattgacaaaaataaaacaatatatattacaaatttatagtaaaatataattgtatgatttcaaacttagttgataaccggtacattgtatcaaatatagcgacataatttattactttcatatttgcttctgtttctcactgctcacggcaaaaggacaaagagatcgagcgtgtggaatgtggatataaaaacgatcatcgacgacaacaacagcaaaaaaaaatatattttttaaaaaactcttattttgtgtcatttaaaataaaaaagaaaagaagcacgaaaaaatgaaaaataaaacccaaaaagaagatagataagaagacttggaactattactatataaatatggaccaccatcacgtcctttgcatcacattcatacaactcagttttcataagcaaaaaggcaatggaagagtcacgatcctacagaaaggagaggaagcagacaaagaagaaaacgggtcgtgggtcaggatccaggtcgatccatataaagatgaggaagcttcgagtgcttataccgggtggacgaagattgaaccaaccggatctgcttctatcaaagactgctgattatattatgcatttggagttgaggattaggtttctcaaagccatctccgatatctactcactctcttaaaattgattcttgtttttttattcttcatcttctttgattcttctggttaaatctaaagtaaaccaattgatatctgttttattacaaagtgcacgtagaagatttataactttgtatggagaatctcttacgatttagtgctgaagtttattagttgggcctccgttagcaaagatgatcatatatgggcccttatagcccatgaaatgttacgtatattctctcaaaggggtgatgagtgatgacaggctttttcactatttttttttaccgattccaaattccaatgtttacaatctcgaaactttttaaaaacattagttgacattaccatgtgattaatcgttacctccaaattcaaaagttaaatccgtttacaatattttttctttctgttgcttcagtaaaagtcctcaagtcccctagatattgaaaatctactgacacaaaaaaatagtaagactgctactagtgtactactatttaacttcactttaagttgagtgattcttttcagggaactaatgccaacaaacgatgaacgattattgtggattgtttcccgtttttccgttgtatttaacgacccttgagacctaccact

SEQ ID NO: 6624 - DNA, 4413 bp, Arabidopsis thaliana landsberg
aaattttctgtctttgaagttgaatctgaaaaaccaactcatttttttagttggttcctttagttgtaacatatgaatggattttaataaggtttgatagaatcatattaagtaaatatctgttttcatacataacgtatgtacattggacaatcatgaactatatgttccttgttatacataggtgatttattaggaaaccagtttatgatcaagtttagtaataacaatgttgtaatatcatattttggatttattcaatgtttagatgttgatttattcaatgtttaaatattgagaattattttatcattttgttaatactaaaatacatatacatatatcagttgtctcaattgaacttaaaaaaatacattaaacttgcaaataattcaataaacttgcaaagaattcaatacaaatacgaaaacataaaacatagtacatcacacttacaaataatataatacaaataattgaacttagttgtgttggttgaaccctttctccagttggccaggttcttccggttgaaccctttctgcatcagacttaatcttcctcaggctgcagccaagcctccaagtttattccaggttgcgattttctcctctttcgcgcttcaccagcggatggaaaccgcttctcttgatttcgtcctggtccttttggtgtgtattccggcggaaatgcaactaactctttaatatgggcaggaagaacccaaaccgactcatgtgggactacatacaacgtccggtaataggccaatgcccaactatctatcaagtaatacacagagcagagtccgtagatggttgtattcgcatttctcccttccttgcgggcgaggtgccttactgcggccatagcatggacacacggaatcttgtctatatcaaaacatttgcatgaacaacttctcattttcaaatccaccagaaaacttaccgagttgagatcaatcaggttgtattcttggttgtaactgttaagctcaatcactgttaatttggctgcaactggacatctcaagtgcaatatgttctccacagtaggcacaacttgtgatgtgattgaacaagaacctgaatcttgcctatgcacgttgaaccattcagaaaacttagaaatcatcacatcaatcattggtaacaagtgatacttcctcgcttttctaaacacaccattaatggactccgcataattactagtgtcaatgttatacttgcctcttttaaaatggcacctcgaccatttctcatttcctactttcttaagaaagtcagcagctttagggcatatacttgggaaatgaccaaactctttgttgaactcactctcagtatatgcatgagcacaatccctgaacttgtcagcagctccatccttattaattttcaaaggaagtctcatgttttgagacaaatgtcatatacaactagcatgaagcgcattcgggtacaccgtcttgacagctttctttatgctttgatgtctatcactaataaacaccaatccgggaacatccggatatacagttttcagcttttctaagaaccaaatccaacttacatccttctcgctatcaatgattcctaacgcaagtggataatgatgatgattaggatcttgtgctgttgcaataaccaacatcccaccatacacagttttaagatgagttgcatccacaactatcactttccgcattgccctaaaaccttcaatgcaagcgcctaatgcaatgaagaggtacttgaactttttctctccttccaactccacataagttactgtccctggatttaccttctctaacatgtaaagataagaaaataacatcgtgcagcttctttccggaatccctcgcacatcactaacatgtagcattttgcctcttaaggcagtggagtatgaacaatgcaccccaagtcttcctcttacaatcgatataatgttttttggagttggggtctctaaatttccgggatagtcacaatgcaaaaccgatgctattaatcttggtgtgcctcgctgtatactgttgcttgtagtctcaacactccgagagcatgtatgcatctttctatgcactctaacactccaaaaatgagatttcttagttctcgcaactcttagataccaagtacaccctttagaagcttggcggcatcgtagcataagtctcaacgggtctgacttaattgtataaactccaaaaacttcttgctttgcagctctgttaaccaattcccacacagcctcccttgaacaaaattcttgaccaatttcaatacccgtaccatcatcccattctataacctgcggagtaacttctacacttcgtggaatatcgtgaatatcatcataatcaatcctatcatcctcatcttcttcctcaacagaattcaccggcctttccatcggcctttcgacagccacgatctccgtacctactacattctcacaatcattcacatcattatcatatccatcatgcaccatctcacatacttcatttaaaacatcatcctctcttacatttacaccaactgaacttcgacgctccggtacagaaatttcctctctcctctcaactcctataccatttaattcctccacatgcaaaacaggaatccgactctcttcatcagattctgttaaaaatatgaagacatcctcatcatctacaatatatgtctctctcctaaatttagacagattgtaactcagtttcaacttgacagaagcttcatcaatcgcaaccttcttcatgatcttgtcaactaacatcgaatagctaatcttctccaaactactcgtcttaaacgatatagcatatagtgaatttttaccaatccactcattcacttcagaatagtatcctccaaagtcaaaatgtaccttagtgtggatcttcttcttcatcgctcctgaaaatacaaccagttcaactccaatcaaacattttaatagttataccacatgtactcttatcatacgttgaaatcaatctctcgtcgcactcgattctactgaacctaattcgttacctttcaattgatttccaatgttaatacatacctattcgttaaactaattggttaatctaaactttgcaaacacaaaccccccaaatctttaatatgaaatctcggaattcaaattcaactcacattcaacctacattcctttgctcatcacctcaaataacgtttcggcaacctctaatcgattactctttactttgcaaaccaatcatcaaactatcaaattgaatctgggaattatatagaattcaaaatcccaatctaaaatcacaatgcaccaatgtcaaaggaaatatgagaagaaactgacctaattcgttggcttttacgccggatttcaagtcggcggcggccggaatcgatggtggccgacgaagaagatgaacgtcgaccaaagaagaagaacacgacgacgaagaggagagagaacaagctgaacggaggatcgagctcgattctttatttagctgtttttttttaatcaactcattaagggtacaactggtatatcacattttcggtggcattcagattaactgatggcagtccagatcagttttttcaaaaaagtggcataagtgataaaagttccataactttaagcaaaaacattaagtagtcattgagcatcattcgtcagagccttcctcatacatggtcatcttagaaaacttcctcctacttgtagaagtgtgatcatttccatcaacatcatcttcttttcgttttgatgatggagtagaggttgacgacaaatccacatcagaaaagtcaacaccattagtgagcataagggaatcctatatgaaaatacaaaaacattttaataagacaactctaaacaataaatattaatgattggaattgtttaatgttatttgacaaacctgttcgatcgaaattgaggatgatggatcaacgtatgcatcatagtcctcttgaacgatttcatcagcaatgttaccggtgtagactcgggcaacagtgaatgaatcatatccacataatatgttttccttttggatgcacaatagaaactgaaaagtcttccatttcaaaccattgatcacatcatgcaaaatagttgggtcttcgatctatagaaaaatatagattactataacatgaacgttgtcattttaatgaaagagtttatttttaaaaagtcattatactcatcaaatgacccatcaagcaattcaggggcagtagtgtcaagaagttcctttgcatgactatcgaataacatgtatctagcttcaccggtttggtccataatatgccgatgcaaccaaaacctaaaatttaaataggataattagattccaaacaccaaattataattcaaaatacattcaatata

SEQ ID NO: 6625 - DNA, 2114 bp, Arabidopsis thaliana landsberg
gatattatagtactgtttatgagtgaaaactataaaggactacattcaatctaaagtcacacttgtttagaattctagagaaattattgatttcaaaccgcccaaaaaggtacagtatcatgtcaccctttactaatcacaattccataacattactgactcacttctctcattctattcttcttcttttatacataacatatataaagacttaaaatgataaatgaaaaaaaaaggccattttctcaaacaacacacaaaagctttcttctcacgtaaccttcaaaccttaaaatcactcgattgaagaagaagaagagtaaagcagagacgaagcagagaaactcgtgttgttactcttcaataatctttcttctcgtctcatctctttagaagacgaagctgcagccgccggaatcatcatcatctcattcttccgacattcctcttgcattgttgttgttggcggaggagatttcttgagaagcaagtcaactttcgcgtactcctcacgctcttgcttaatctctttgagcatagccgcaacgtctttcatggtaggtctctcatccggagacgagttcacacacagcaaagcagtgcccaacacttgcatcatctcatccgcttcagcttcggttcttgatctcaatgtcgagtcaagaacttcgaggctacctctattttgcctcacccaatccactaagtgaagcccttctggtaccgtagggtctataggttgtttcccagtcaacacttcaagaactaccacaccatagctataaacatcactcttctctgtaatcttcatgctatatccatactctgcacacgacacagacttctaagtttcaacgcaaaatagaaaccaaaacgtaagaaaacatctaactacacttttcatgattgtgaactttttttataccaaatgttgcattagcattaactaaaccactttggttgcttatgatactaagaaagataaatgtaggaacatacctggagcaatgtaaccataagatccagcaacggtattagaacaccgaccaatgtcaccttcatcgacaagcttggctaaaccgaaatctgcaatgtaaggctcgaaatctaaaccgatcaagatgttgttggctttgatatcgcggtgaacaatgggtgggaggcaatcatgatgtaaataagctaaaccttgagctgcaccaagcaagattctgtatctaagatcccaatcaagcgaagatcctcgtctctcgtgaagcaaactccctaagctcccattaggcatgtaatcatacatcaaaagccttgtgtttcggttccaacaacatccgagaaaccgaactatgttcttgtgtctgatcgtccctagtgtcttaacttcagctgaaaacgaatctctaacgtttttggtcttctcatcatgaccaccgttaaccatcgctggccaaagcttcttcacggctataacctctccgttgtccacatcagcgcggtaaactacgcctgaacatcctttaccaatcacatttggttcaactaaacatctaatgatttgatctaccgagaaattcagcttctgaaacggtgtgaactgccatttatatgtttctccaagctctgaatctctttcattatcaatattcctcctcgctcggataaccgcacgcgcgccaagaatcatcaacacaaccgtcaaggtgatcaaaagtgcgagtgttaaccttagcttccttgtacgagaagcatcaccatcatctccaagtccattaccctttctgtaggtgagaaagcaagaatcttgagtcgaagaacagagtttcttgtttccttcaagatcttgaggagataattgtctgaaaagcttgttgtctggaagataaccagagaagctattgtaagatacgttaagagagactagattctcaatattagcgagtggagcaagatctccttcaagcatgttgtgagagagatcaagaatcgagagcttgttgagagacgcaatctttgaaggaatcttcccagtgagtctattgctactcaagtttaacgcgatatcaagattctcgatatctccaagctctgaaggaatctcaccagagagctagtgcttc

SEQ ID NO: 6626 - DNA, 1579 bp, Arabidopsis thaliana landsberg
gactataggaaggcctttatggagtttgaggcggaagtggttgccaaactcaccgagaaagagatgaatgcaataagcatcgaatacaagatagagatgagcaaagtgagaggtgttgtggaaaacgctaaaaagatcgtagacatcaagaaagcgtttgtgtcattagagaaatacctttggggatttgtgaaccacaaaccaatctccacgaactacaagcttggacacaagattccggtcaagacatcgaagtcggagagcatcagcaaagacatggttcgtcgaggcttccggttcgtgggtcccactgtggttcactcattcatgcaagccgctggtcttacaaacgaccacttgatcacttgctgtcgccacgctccttgcactctccttgcaaccaatccctaattattaatttttattttaattgaaagtggtgtttttatttaactttcgagtgcaaaatgtaggtttaggagaaaagagattgcagttttttaaaattggcaatgtaagataaaccagctggtttgatttttttcttgtgtgtgaggtgtttaaaatcacatgtataatggtttttgatgtatgtgtggtgtggcaaattgaaatagtaattgattttcatatgatttatctattgttcaaaatttgttagttcgagagtggccatcgattcttagcaaaaaaagaatgaccaacaatatgaaattagtgggactgtgtattagtgtaatcttgcctagaatatagagtaatccttgcagcaaaaagtaaaaacaagactacaatagagtaacctataatatataaaaatttagaacagcttttcctatattcacaaaaacatatcgaatatggttttaaaagagttacaaataattaaacgaacaccttaaacaaaagtcgtttaacatttttccattgatcaattagaccaaaatttaacatacaggatcatattggccgcctaaacgtccaaatctttaaacatttaatttagctgtcatgtatgagtatgacattgaggaggttcatcggttcatgggaaacttgaggattcttggttttcatacatattaatattatacggtggtcgatggactatgatgtttattttatcttcaaatgtactattgaaagaagagtaagtagtgattgattctcgtagaagcaaatatcatgatgatgtagcatgtgacgcttctctgtcaccaataatgattggatcattttagtggatgccatgatgggattggtcattgggtatgtgactatgtgtttccccccattcccaactttaacttatttcccaattccacccttttattattttcacaagttccaacaccaacaacgctccttcttccttcttcactctttttgtataccacctggatattatttctctatttttctttagaaggttttaacttgtgtgtgtgttcaagaatcaagatgatgtgatctttaagcaaagatgagttctatatttggtacaaaacagagtattctacaagctaaagattccataagtgagacagagtgtaaaaagaaaagagaaagaaaatatgcc

SEQ ID NO: 6627 - DNA, 1621 bp, Arabidopsis thaliana landsberg
  unsure (1)..(1621): unsure at all n locations
tttaatgtttgattaaaatctcacaaaccaaaaaaattgctgctaaaaaaatcacataatatcggataccagccataatttttaaatatgacaaatataagaaagcagcctaaaatgatacaagagagaatatcgaagtaccaaaagaaaagtaaactcaaatagttaggggaagacttaaaggtcacatggggtgatttggtggcatcattgcatcaaatcctgcacatgctctgcttcttctcttttctatattccttctctctttttattttgttgttacttgttgtcaatactaatacaaaatttatccacacggttttatttttagaataatgttcacttgggaataatgttcacatattattattacgagtatataactacctttcaattctctctgcctctcatagttaatatatatacgttcacaatcacttctcttctctatttcttattcattatctcaaccctctctctctctctctcagtacaacttatcatccatcaccatatatagagaatatgagcaaaacggaagcaatcagcttgaccaaaaggggaatgttgccgccaagtagttgcaatagcctaatggaccgctctgagtcccttaagagggacagtgtgatgggcaatggtgcagccaaagtgagaggaagcttggagcgcaagaaatcaaagagttttaaggaaggagatggttattcttcgtggctcataacggaggctcctgggagtatagccgccgtgaggagagagcaagtggcggcacaacaagcactaaggaaactaaagattgctcattacggtagatccaaatcaaccattaatttcacttcttccaaagtcgtccctcttcttaaccctaaccctaaccctcatcctcagagatgcagcttcctcacccccacttctggtataaacctatttctctctttattacttgtttgttttccggttaatgttagttaatttcacttatgaactgattttattaagtttcaccctcttaatttccattttggtattgtttgaatcagcttaaaccccttgtatattattttaagttttttttgtacgtaactttaggttccatcttataaaatacttggattcctaactgatttgtttggttacctttagatcctatttacgtggcctaccatgatgaagaatggggagttccagttcatgatgacaagtgcgtgacataattaatacttctttccaaatgaaaacgtcattgtacattagttcattttgttcaaaattaaattagttatgttaaattttcaggacgttgttcgaactgctgaccctaagcggcgcacaagtaggctccgattggnnnnnnnnnnnnnnnnnnnnnnnngactataggaaggcctttatggagtttgaggcggaagtggttgccaaactcaccgagaaagagatgaatgcaataagcatcgaatacaagatagagatgagcaaagtgagaggtgttgtggaaaacgctaataagatcgtagagatcaagaaagcgtttgtgtcattagagaaatacctttggggatttgtgaaccacanaccaatctccacgaactacaagctttgacacaagattccggtcaag

SEQ ID NO: 6628 - DNA, 843 bp, Arabidopsis thaliana landsberg
catgtgatggagtttgagaggactttcaatgttattttcctttttgctccatcgcggcaaagaagcacattgagcaaagttcaacaattcttgatgtccaaggagtggtacgtacataacactgaatggtcatttgtagaaactataatccagtactgaccaaaaatggtgtatatatgataaaaggggctgaaaaacttcaacaaggcagcaagggatttgattacgcgtcttcaaaaagtcgatggtgacaactatccagaggtgcactttatattattatcatcatcagtttgtcttttatgaatgattcttgctctgtcaacttttttttccttcatgtatctgtcattggcttagaccttgaacaggatgtttatcatcaatgctggctcaggattcaggatgttgtggaacacggttaagtctttccttgacccaaagactacagcaaagatccatgcaagtatacaaaccctttttatcactcttgactgatataaatgatagatattcttactacttagctaatttgatattcaggttcttggcaacaagtaccaaagcaagttgcttgaaataattgatgctaggtgagctctacaaaaagtttctgcatgaacactcaaaagattagtatttctcgaatgacagacttctcatttttctttgtatcagcgagctgcctgagttctcgggaggttcttgaacttgtgctgacaaatggggggtgcatgcgctcggacaaaggaccatggaacaattcagatattatgaaggtgtgatctctacaacttctttgagcctagtaagcagcaacagcactcatagttagtgtttttc

SEQ ID NO: 6629 - DNA, 3989 bp, Arabidopsis thaliana landsberg
aagctctattctactatttttaaaattctcaagtggtagctgatccatttgttgctttggccttattttctccccctttggcatcaagcaccaaaacgggaccaatcttggccttttaaccccattgcctcaccaaaatcttcaactttagagtaaaaaggcaataagagtacaaagatgagcttggaatcagttactctttcattggagtgcagtggaagtcttgcatggtccaagtccacctttccctttcaaacctcctttgagactaaattaagcaaactcaagcacaccgttagcctcaaagggtcaagttgtagcacatctccccctaaatatgtgcatcacttgcaaatggacttgtgaggtccggggagtgcttgtacaacttgagcaccattaataaacaacaaaatgcattaaggaacatgatcaaggcataaacacatgtatgctataaatcaatccaagttccgcgaatctaggatgtttagctcactacgcagcctgcaaaaggtcttttcatctaaaggcttagtgaagatatcagctagctggttctcggtgctaacatgaaacacttcgatatctcccttttgctggtggtatctcaaaaagtgatgccggatgtcaatgtgttttgtgcgcctgtgctcaacaggatttttcgctattcggatagcactctcattgtcacataggagtgggactttgctcagattgtagccaaagtccctgagggtttgcctcatccaaagtagttgcgtgcaacactcgtctgcggcaacgtactcggcctcagcggtggatagggcaacggaagtttgtttcttggaactccatgacaccagggaccttcctaggaattgacatgtccctgatgtactcttcctatcaaccttgcatcaaacattgttggagtctgagtatccaatcaagtcaaaggtagacccctttggataccagatcccgaggcaaggcgtagcaactaaatatctaataatccgcttaacagccactaagtgacactcccttgggtcggattgaaatctagcacacatgcatacgctaagcataatatccggtctactagcacataaagaaagcactgaccctatcatagaccggtatgccttttgttcaacggacttacctcctttgttgaggtcggtgtgtccgtcagttcccattggagtctttgcgggcttggcgtccttcatcccaaaccgcttgatcaagtcttgcgtgtacttggtttgagagatgaaggttccatccttgagttacctcacttggaacccaaggaagtagcttaattcgcccatcatcgacatctcgaatttttgagtcatcaccctgctaaactcttcacaagacttttggttagtagaaccaaatattatgtcatcgacataaatttggcacacaaaaagatcaccatcacaagtcttagtaaaaagagttggatcggctttcccaaccttgaaagcattagcaattaaaaagtctctaaggcattcataccatgctcttggggcttgcttaagtccatagagcgccttagagagcttacacacgtggtcgggataccgttcatcctcgaagccagggggttgctccacgtacacctcctccttgattggtccgttgaggaaagcgctcttcacatccatttggaacaacctgaaagaatggtgagcggcatatgctagcaaaatgcgaatggactctagcctagccacaggagcaaaagtctcctcaaagtccaaacctgtgacttgggcataaccttttgccacaagtcgtgccttgttccttgtcaccaccccatgctcgtcttgtttgttgcggaacacccacttggttcccacaacattttgcttgggacgaggcactagtgtccaaacttcatttcttttgaaattgttgagctcctcctgcatggccaacacccagtccggatctagcaaggcctcttctaccctgaaaggctcaatagaagagacaaaggagtaatgctcacaaaaattagctaatctagagcgagtagttactcccttgcttatatcacccaaaatctggtcgacgggatgattcctttgaatcgtcgctcggacttgagttggagggacctgtggtgcttcttcctccatcacatgatcatcttgtgctcccccttgatcacacgcctccttttgatgaacctgttcatcatcttgagttgggggatgcaccatggttgaggaagaaggttgatctcgttcatcttgttcctgtggccgaacttctccaatcgccatggttcgaatagcggccgtcggaacatcttcttcatctacatcatcacaatcaacaacttgctctcttggagagccattagtctcatcaaatacaacgtcgctagagacttcaaccaaacccgatgatttgttgaagactctatacgcctttgtatttgagtcataacctaacaaaaacccttctacagctttgggagcaaatttagaatttctacccttcttcactagaatgtagcacctgctcccaaatacacgaaagtaagatacattgggtttgttaccggttagtagctcgtacgaagtcttcttgaggaggcggtgaaggtagaccctgttgatggcgtggcaagctgtgttcactgcttccgaccaaaaacgctcgggtgtcttgaactctccaagcatcgtcctcgccatgtctataagtgtcatgtgcttcctctctaccacaccattttgctgtggtgtgtagggagcggagaactcgtgcttgatcccttcctcctcaaggtactcctccacttgaaggttcttgaattcggacccattgtcgctccttatcttcttcaccttgagctcaaactcattttgagctcttctgaggaagcgcttgagggtccctgggtttcagttttatcctgcaaaaagaatacccaagtgaagcgggaaaagtcatcaactataacaagaccatacttacttcctcctatacttagataggcgacgggtccgaagaggtccatgtgaagcatctccaaaggtcttgatgtggccatcacgtttttggtgtgatgagagcttcccacctgtttgcctgcttgacaagctgcacaaggtctatctttttcgaaggtaacattagttagacctatcacgtgttctccctttagaagcttgtgaaggttcttcatccacacatgtgctaagcgacgatgccacagccagcccatgcaagtcttagcaattaagcatgcatctagaccgacctcttcttttgcaaaatcaactaagtaaagtttgccgtctaatacacccttaaaagctagtgaaccatcacatcttctaaaaacagacacatctacatttgtaaacaagcagttatatcccatattgcataattggctaacagatagcaaattatatccaagagactcaacttaaaattacattagagatagagtgctcatttgagattgcaattttacctaacccttttaccttgccttgattcccatcactgaatattattgaatcttgggaatctttattcttgacgtaggaggtgaacatcttcttttcccccgtcatatggtttatgcatccgctgtcgataatccagcttgaacccccggatgcataaacctgcaaggcaaatttaggcttgggtcttaggtacccaactcatgttgggtcctgcaaggttagcacaaatatccttagggacccaaatgcaagttttgtctcccttgcattatgcgcctaacttactagcaactattgacctatcctttctacaaatagcaaaggaagaatttaaagcacattaaattgtagaaggttcattcactactttcctaggagcatgaataatattctttctaggcacatgatgaatagcatttcttctagacatatttctaccatgcatataggaagaactagaagcaaacatggcatgagagtcaataa

SEQ ID NO: 6630 - DNA, 376 bp, Arabidopsis thaliana landsberg
  unsure (1)..(376): unsure at all n locations
attaaaagtctcaaacgactcacttggacgcgacttgctacataaacttaaaaacatgaactccaaaaagaaaagacgacaaaactgaccaacatgaaacgaaagaaaaaaaaaaaaaaagaagaatccatacactcatgtgatgcatgtgatgtaaggacaagatcactcttcactcttcttgttcttatcacattaagacaatactttcaacgtaatccgtgaaagcaagcaccagagctgatccaaacgagggtgtgatttctttgaaccaaacttccctcgaacgattcttcttgagatcaacatagagaatatgaaactgaccaagcttatcacgagcannnnnnnnnnnnnnnnnnctaccagcaacaaa

SEQ ID NO: 6631 - DNA, 862 bp, Arabidopsis thaliana landsberg
cctccacatgcttagtcctctcatgaaaaaccggattggcgctaatgtgaatcgcagcttgactatcacaaaacacactcattggttgcgtcatcacaactccaagatccttcaacaaacctttgatccacaagagctcggcagtgagcattcccatagctcgatactctgcttcagcagacgaacgggaaacagtaggctgtttcttagttttccaagaaataggagaatcaccaagttgaacaaaccatcccgtaagagacttacgcgtcaaagggcaaccagcatagtcagagtcacaccaatcagaaacatgtaaatcagaatcagaactcaaaacaataccatgtcctggatttgacttgagataccttacaacacgaaccgcagcctcccaatgttctagacgaggtgcctggagaaactgtgcaagaacatgaactgcatatgtcagatcaggactagtcacaacaagatataccaatcggccaacaagacgtcgataacgcatcgggtctgtgagcaactctccatctgcgagcgcaagacgatgattctgatcaataggaaacgagactggtttagaatcaatcaaacctgcatcagagatgatgtctagtgcatacttccgttgactcaagtacaaccctgccttgctacgcgaaacttcaatccccagaaaatacttgaacgctccaagggtccttcatatggaaacaatttgacaagtatgtcttaaactgtccaatagcctctccatcattccccgatataatcagatcatcggcattaacccaaaccttggccaaaggcttaaccccctcgtagtgtgtatagagcataatctgatctcgactgtttg

SEQ ID NO: 6632 - DNA, 1793 bp, Arabidopsis thaliana landsberg
tttttgttttatgtaacttatgttgaagaggggaaaattccaaataagtacttcagtgtggagtaaaagctaaaatatctactaaatcttatttaaaaatccaacaaaatttggtccaggccatatacttgcggtctctatgatcccatcatacctagctactccaagcctctaccataagatcattatttatatttctgctgttctatagtttgtttgttttttctttttatctttaagcatatttaattttttgttagtaaaatgttctatagtttgttgatcgcaagacaaaaacttgtgccatatctgttgtagtatgtaattaaggatactgttaagcctcaatgtccagggtctggggtatttggacatctcttggactccaagcgaggaagggaaagagacactactatatttatatgttttacttaccatatcttggatccacgagggtaagagcagcaaaggaggacattttcctctttgctctcttcgtcttcctttttttttgtttttgcttttgtaaatatgtgtgtggtaatcttatttctggttaaagtgtgttgtctcctgaaactctcaacgccaaataactaaattattgtttgtattatttagttccatgttagtttttctactatgaacatggaatttttgttaaacatttgttgatttggacgtttgtggaacgtttcaaagaaccgattgtcaacatttgcacaattgcattctctttattggttaatcgagtttccgggattctagaacgccaaaaaagcacagaaggtttaatacttattgttttgtctaaggagaaggaaaatgcgcaatactttcttaaaccttttgtaggtttatgaagtgtttgatttttcagataaaatgagaatcaagttcgatgtaccatgttcacatgtgactttgtactatttcgaatgtttcttggcaagtaatttcgaatccttttcgtaagtagaactaattccacatgtcacaaaagtgttgacttacctatagaaaaggcagaggaacacatacacacacacaaacgcttactaaactcaaaagtcagaatgatcaagtcacaaactacgtgcaaaccatttcatcggtctccatctaacatcctaaaattgaaaaatcaaaccttatattttttccttgaattctcatatttgaatatattttcgatctatacacacacattaaccatgagagtaaccacatgtcaaaatcttaggacaaagatagaaccgacatgtaagtcactacttttgccatgaacgtgcttaccattttcttttatattcctactacttatatctctatcctctccatatttttttcccgtaaaattataaacccattttcaaaatctaatcttgtttttttcgttgacattatgcctcctccggcaatgcttgcgtttgacgatggtttagcccgtaaatctaacgataatgagtggcaaggtttcagagtttttccaggagaaaatactaaccctaaccctaatataaatttcttggttaagaaggcaattctgcagaacgagaaatcaatcagtcctcttttctcccgttcgtcggcaacagacgatagcttcagaattgtgttgccgccggcgttgcctcctcctagagactccaccgttccgcttcctatgcttccggagccgataagagcccggaagaagctttgccaccaagaatcagtcatatttatgaacaaatcgcgcttcgcagagaaaaccccttacaaggacgaacatttcacatgtgacgccttct

SEQ ID NO: 6633 - DNA, 1759 bp, Arabidopsis thaliana landsberg
tcctatcctctcaatttatgaaacgtcattaaatcctctcaacggttaaccaaactccacaccttacatccttttctttccccttctctcaaccttttggggaaaaaaccagaaaatggggttgcatccaatttccgacgccaatgaacacaatcccttcggatctctcaccgccgacgaattctacgccaaacattccgttagccactcctccgctttcatcaccaaccctcgcggtctcaaactcttcactcaatggtggtcaccactccctccaactaaaccaatcggtatcatcgctgtcgttcatggcttcaccggcgaatccagttggttccttcagctcacatcaatcctcttcgctaaatccggtttcataacctgcgcaattgatcaccaaggccatggattctccgatggactcatcgctcatatccctgacatcaatcccgtcgtcgatgactgtatctctttcttcgatgacttccgtagccgtcaaacaccgtcagatctgccgtgttttctctactctgaatccctaggcggcgcgattgctctctacatctcgcttcgtcagagaggtgtttgggatggacttatcctcaacggagctatgtgtggaatcagcgataaattcaaaccgccgtggccgttggagcatttgctattcgtcgtcgcgaatcttatccctacttggcgcgttatccccactcgcggatctattcccgatgtttcgttcaaggagccgtggaagaggaagcttgccatggctagcccaaggaggacggtggcgaaaccacgggccgctactgcttatgagctgattcgtgtttgtaaggatctgcaggggaggtttgaggaagtggaggttccgcttctgattgtgcacggcggaggtgatgttgtatgcgacgtagcgtgtgttgaggagcttcatcggagagcgattagtgaggataagacgatcaagatctaccctgagttgtggcatcagatgattggggaatcggaggagaaagtcgatctggtttacggtgatatgctgagctggctcaagagtcgagctgaaaggaaggcacgcgccgccgttgatggaggagcagcttagagtcccttttgagtctttgggtgttgtgttgtagtccaataggactgtgccatctggcaagaaactatttatggttttactgtttcgtaatcgtagcacatggtttacagttaaaccaatacctttgggtatcatcaataatataaaaaatcgttgacaagaagagaaaaaaatatttgaaaattaatgtttcagattctctaccaatttcagaaaattttcaaataatggtcaaccatctgataatgtcgttgttttctccgtcaagggacaagagctcaaatcataaatggttcaagttactctgacatagtcgtctagaacaaatgtcaaatggttcaagttatgtactaagaacgtaagttaacaggccgtaaaataggcccaatagattaagataattgaggcccattaatccagtaagaacccaaaaccacataaaccctgcgaaattggcaggcggctgctgcactcgccggcggcagagatggggaagaagaacaagagaagtcaagacgagtctgagctcgaattggagccagagctaacgaaaataatcgatggagactctaaacagaagacaaatcagaataagaagaagagaagccatgatgatacggagatagaaccggagcaaaagatgagtctcga

SEQ ID NO: 6634 - DNA, 489 bp, Arabidopsis thaliana landsberg
atcccggaggtcctggaataggaatgggatcaacctccatgaacgagctttcttgttttgcggtttcgcaaccagttttctcataaaccatgctttcaaactcaacatctgcatctttagttttgtccaacatatcatcacctgctttgttatcaccagtctcttcatagctttcataatcattgtcttccccgctaaacgaaggatttgagcttagcgcaaccttatctgtttctccatcatcatcatcccaaccatcataatctgacagttcacgttcttgagtcatttcagactcccatttccctatatcttcatcttcattctcagagaaatccattcgagctttcttgaacttcatgacgcctctcgcacaggtgttaaacatctcaagggatgtgctacagataaatcactgtcaatgcttctgttcctagacaaagcccagctctatccagaaacttggctctccccacaaactctccatga

SEQ ID NO: 6635 - DNA, 2445 bp, Arabidopsis thaliana landsberg
ctttggatatttatatcatcatcaattaaataacaagaatagttctatgtttatgtacctataccaccaactgtagtccatgtttccactttttttaatgacgtcttcgcagaagaaaatatcctatgtatgacctagatgaggaaaaagagagaaaccgttgaggtgtacaatataataagagttatgaaaaacatgcatgatgactattttcatttgataatatatccaaatagcaaaacatgcaactagtcatacacccttcacagatacctttcaatccaatgtggaatatctttaaaccaaatgggaattctttatttcgggaaatcatctaaccattcatttaatgttttgtgtatatgaacacaagcaggtagtttccaaaaccgtattcaaagagaaaagcagaaatgttgaccttttctaaaaccaggttatcttcatgcgtatataaaaacggactttgcatgtttgcttactataacttaggacagagtggaatcccaagtaccaaaacagatttcttgcaaaaaaacaatggaggaaacaaataagagtgtggttaatgattactttaccagtgctatggaacttacagagtcaggtgaccctcacgtgcctacccgttacattcttccaccttcacaacgaccaatgctcggtccaagcattggcaccagtaccatcaatcttcctgtcattgatctctccttcttacacgatcctttgcttagactatgtgtcatccatgagattgaattggcctgcaagggatttggtttctttcaggtaacactcgtgttttggctacatacactacacatgtctgttaggtaagacacatggcaagttctgcgactcagattcatgcattgttacaatccaaacaaagagaagtttgatgcttaactgtcctattcatgtgtctatatttctcagatcatcaaactcagccatgagtttcatttctcaggtcactaggactagtatggaatgtacttatcacatctaccaatcatgcttgatatatgacttatgagaaatgcagtttttatcttttgcatttctatcatacccaacaaagtcccttatcaaaaattaaataaatgaaaaagacaaagtccttggtttctgtctttattgaggataaaacaagtagagagccatgtgaagatgcttatcttcattttctacacagatgtcaagtatactgcccagtttctttaaaaacactacactagtgtcattttcatccctcttattaattacattactctgatcttctctacaggttataaaccatggaatatcatcagcagtggtgaaagatgcacaagattcagctacaaggttctttgacttacctgccgatgagaagatgcatctggtttctgataattttcaggagccagtaaggtatggtaccagcataaaccattcaacagacagagttcattactggagagatttcataaaacattactcccatcctctctcaaactggatcaatttgtggccttccaatcctccctgctacaagtaagtaaacctatctaggccaacttcactatctgataataactcaaatttgttctctttttactggtctaagaatccaattgctcaatagatgtttcagaatttgcaagaaatttgtatctaaagaatgtgactcagaactgatttgatcatctcgaaatatcattttcctatcagggaaaaggtggggaaatacgcagaagcaacgcatgttttacataagcaactaattgaagctatctcagaaagtctaggactggagaaaaattacttacaggaagaaatagaagaaggctcacaagtcatggcggtaaactgctatccagcttgtcctgaacccgagattgccttgggaatgccaccacactcggactatggctcgctgacaatcttactccagagtagcgaagggctgcagataaaggactgcaacaacaactgggtttgtgtgccgtatattgaaggagctctgatagtccagttgggagatcaggtagaagtgatgagcaatggcatatacaagagtgtggttcatcgtgtaacagtgaacaaagattacaagcggctctcttttgcaagtcttcacagtctacctatgcacaagaaaataagtccagcaactcagctcgtcaatgaaaataaaccagctgcatatggagaattcagcttcaacgattttcttgattatatatccagaaacgatattacacagaaaagattcattgatacactcagaaagaaaaacctctgaagatggtgtcatataactcgacacggcaattccgatggttgattatttggacctagttgcatgcatcttgtatttaatctatgactatcttgtgcaagtgaatagtccttgtttatatcacataaaagtatatttagttgtcatataagtgt

SEQ ID NO: 6636 - DNA, 1305 bp, Arabidopsis thaliana landsberg
caatatccataattcaaaagacgagccatgaaaattgccttgttgaattcttggccatcatcatcatcatctttaggaactgcttttctttattgtgtcaatgaatctttcttgtataaaatcgttgcttgagatgtagttcagaaaatcgttgaaactaaactctccataggctggtgcattgtttgggttgacgagttttggtgctggacttattttcttgtgcagaggtagactgtgaagacttgcaaaagatagccttttgacttctttgttcactgttacacgatgaatgacgctcttgtatatgccgttgctcatcacctctacctgatctcccagctgaactatcaaagctccttctatatacggcacacaaacccagtttttgttgcagtccattatctggagtcccttgctactctgaagtaagatggtcagtgagctgaagtctgagtgtggtggcattcccaaggccatttcaggttccgggcatgctggataacaattcactgccatgacttgtgagccttcttctatctcttcttgtaagtaatttttctccagtcccaggctttctgagatagcttctattaactgcttgtgtagcaaatgtgttgcctctgcatacttgcccactttatccctgaaaggtaggtgtgaatcagaaaataatatcagttttcactcaaagctttgttacaactttttaaaaaagagagctaggttttgtatatattgagacagtgaagctggcctaaaaatgttttacttacttgtagcatggaggatttgatggccacatatcgatccactttgagagtggatgagagtaatgcttgatgaaatctctccagtagtgaactctgtctgttgaatggttaaggcttgtgccatacctgactggctcatgaacgtttgcagacaccagaagcatcttctcttccacaggtaagtcgaagaactgtgttgctgcatctaaggcatcgttaaccactgatgatggtattccatggtttataacctgtagggaagtaaaagttagggcctttatctcttagttctgtacagtcgtacagagtagagaaaacattgcatgcatgcattttgtgttctcatttaagactgagattgaggattttgtcttttctttcgttgtttgccctgatcagggactttattccttatgaaataaatgcaagaagacaatagccgtctttctaagagatccccgaagtatgattggtagatgtgataaattcactccagagttagttctagtgactaagcatggaaacgcttgga

SEQ ID NO: 6637 - DNA, 3512 bp, Arabidopsis thaliana landsberg
  unsure (1)..(3512): unsure at all n locations
gatatcgagatcttctatccggattgtttcccagttctgagacgcaatggctttgtactcaaacggtacattaaaccgtttacaatactcagccaatctccgtcctgtctcctctattcgctccgcgggccgaaacccgcactgaggaagctcgataccagtaatccgcagcttccgcggtacatcttttcgatctgatatagactgaataaacatcggccattgaaacccgtatagaatcccaaaatcaactatatgaagaacaggagcatctttagccacatcaagaatcatcctgatggagaagaaatacatcaaggtaacaaacggagacgaagaaagataaactcgatacgctctaattgtatccgcagcagtatccttcaacgacgaggttaaagcattgtaataagtctggatcataggaccggtacttccctgtagacgagcttcaagcgcgttagcgaaacaatgagctagtctttgccccgcgtcaccgagaggcgaagactgttgccttatctgtaacagaaactcaagagccgtggttttatctcctgtggaaatggcttgtgcacaatgagtgagaagtgtacgaaaatcaaccacttgactcttcttcttcttcttcttcttccctttctctcctatgttcttactactccgaatcgcttgaatctcgctgtctaacaatgtttgcggatcgcattcaccgtcaagaagcaaaaccttatcaaacatatctgtaaccttactatcttctacattactagcaaattgcttactactcctaacttcctcaaaatccctttcatgattcttcttaactctcaactgatccaatcccatctcttctttaaccgaatcgcgcctttcggatctctcgatatccagattgataacccattgatcactattgggaaggaatttactagcttcttcaacccctttcttaaactgtaaagctgattctgcatcactaaacatactcttaaccataatttcattcacaggttgcggatcagccgaataagccgattcatcgatgcttccgcttgcatcccaagaattagtaatcaatgaatcagcaggactaaaggactgattttgagaatcagtaatgacttgctgcaacatttcttcagtttttcgtaaagccaatgaatcatagaacatagattgcttataatctccattactctcttccataagaatctcactcacgtatttcaacagagtatcagatggtggtggatactgatcttccattggatcagtaagcaaattagggttaccatcaaaatactcaaagccgtttagagattcagagaagtttggatccatgatcaaaaccctagttgctctgcccacatagaaaaagctacacaaaaagaagaagaagaacacgaaacagagagagtcaaaggaagaattaaaaattcaaactttagattccagaagcaaccgaaattgaattgcacatgtgaatgagagtaaacacgggaaatacgggagattgatgtcatagcttacctcagtttgaatgaatctgatgatgtacgaggtttaaaagttatgatctttgggttattattacagatgtgttttagtgtttaagcttttaggacagctttctaagaaaaaagtaccaaatgagtttttttttacaagaacgaagaagtggtccagagagagactcgtccccagaagtcaaacagaaattagtgacggttcggtactttggttgacttatttcatctctgtaaatttagtttgggctttggcccaattctttgatccagaaggtcaaaactttttgggggtcttaatcttaaaattgaagtaatttttaggaatactatggtggaataattcatttttctaaacaatttaccatttggaaaaaatccataaattttgttaagggaaaaattaagaaaaatgttcataaagatacacgaaacaattttttcaacgatatgttattcaacaaaatagttataaaacaaaaattcacttatctatgcttttgctacttacgttacatgttgcaactaagtaacatagagtaatttaccaaatggtaaattatccaaatggtaacgtagtgtaaccattatccaacattttccataaacattaaaaagttaaaatgttgaaagtaaaatagttttttttttttagatcatggcatcatgcctaagtagtaaccctaacttagaaaccccgtcaagaagacaagaaacctgaacaatgaaactatcaacagaaaaaccctatataaaatcattccttgggatgcaagagaacaaactgtctacaaaggaacccaaatagatgaaccgtatacaattctacctttccagccctgaagcaaccagtgacaatcttgatcnnnnnnnnnnnnnnnnnnnnnntatccactttccaccatcaacttcagtttctgaactagttccttctccagcggaatctgtctaaacccggctctcatcgccctcgcctgccactgcttataactctctggcctctccactctctccgtcccctcacacgccaccacgttcatgatctcccgcccatagaactctttctcaaacataaccctcattggatcttcccgtgttagattcgtgtcacacatgtcaaacagagatgagtaatgaaacagaacttctctaaacctcgtgacaaagaaaggcgcgttgtaggatccgctgaggatcccggggatgaacacgtctggctttatcttccttatcagcttcaaaaccgtatctctcgggctatgcactgccaccgtctcatctagaagattcctaaaccgaaataaagagtttaccgcaacaaactcgccttcttttagcttcaagtcctccaacttgattgattcccatttctgcgcaatcgcattgtactcaaacggaatattgaacttctgacaatacttagccaagcgacgaccagtctcaataactccctcggctggtctaaaaccacgttgaggcaactctataccggttatccgaagcttacaagatgaaccacgtctccaagcaagtcgatgaatcagagaaggccactggaaaccatcagatattccaaaatctatgatgtggatggttttggcattagcagttgaagccaaccgcataatactatggttggcgaatatgattgcgattttcttgaacggacagactgatatatatgtctgataagctttcaacatgtcagaagtagatgttttcttggaagacaaggcagtataaacctgtgtacctatcccagccaaacgtgcttcaagactgttagcaaaataatgagccaatctctctgttccatcgccgtaagatgaagaatgatgccttatccgacttaacagctcgatagcagttctacgatcgttgatcgaaacagcttgagcacaagaaaccagcattgagctgaaacaggtgtacttattggtgactgttaccactagctgccgggttttcgcctttaggactgtt

SEQ ID NO: 6638 - DNA, 6767 bp, Arabidopsis thaliana landsberg
  unsure (1)..(6767): unsure at all n locations
tgatttgagttttagagatcgtttggtaagaacaacaattactatagagatatttcaaatatcatatttggtagttgaagctatacgtttgttactttagaaaatgatattaaaaaacgactaatttaaaatattaatactcttaagtttttaaaatctttgttgtcaacgatttcttttttttggaaaaaagattagtacttgttctattatagtgactatgactcaaatctcatgcgatatcacgagaaaactattcttaatttgtttatataataattttttttaaaacaaatcaaattcgaaatgatgcatattataaaattttagtagttacttaagaagaaaaaaatatgtaaacttatttgtaacaaaacataaatattagtacgaaaagttgtgaaaaaaaacacgagtacaacatacatgacgaaaagacacatatttaaatgaatggatgtaattttcttaaaaaacacaactgtaaaatgtaatctggagtggacaaaacttttgatttttaaattattgaaaatatattttacgaaagattacaacaaaaaataataatacaatattagaatatatttattaggagtacctttaatctttttgacatcaatcatctctttttaactaaaacttgtcatttttaaattagtgtagagattgaatatttgttaaacaaaataaatagagttcagaagatatgaacaattaaattgacacaactctttgtaaaaactataatttttagagataaaaaatataataaaaaatacaaataaaatatggtgaaaagacactttgtaagaagacataactgcaaagatattttaattaaaaaaattaaaatatttaacgaatagtaacgatgaaaaatgcaattataaacgaggaaaacgatagggaaaactctctgattcacattagggcaaacatgcctcatatatatatccatacatgagaccgtcatatgaaacccaacttaagcccatctatagatacgtaagcccatattctatatccaaactaagcatgtgcatttgcttgaagtctaatcttgaacactttaatcatctttgaaactcagtgtgtcctcccacactacttcaaaaccttaatagccatgatatgagccaatcacctcgtgtcaagtatatatgcaagtttaattcatccataaaacatagaatatatgctttgagataaaatcctatttagcaaggatctaggcacttagattctttccaaaacatatcaacatctctgctacaccaatttttttgtgagttaatctcagtgacctacgaatgagtgaaaactctacttcacaagatattcaatagcgataagatcgtacaagatacaaactcgaacattcacattacttaacatcaataggaaaagaaaaaaaatatgaccaaaaaaagaaaaccaattggaacctaagctaaaccgagtatctatggtcataagacactatcactaattacaggattccactaaattactcgtatgcgaactacgcatgtgcatttaatttgcttgcagcctaatcttgaacattttaatcttctttttaactcaagagtgttgttctcccacactactttaaaaccttaataaccgtgtacacgtcggtaattagtcaagtaaaacactccaatatccaataattaaaaagagcaaatttagggaacaaacatgcgcacaaactttcaaacatcaaccatgattagagtgcacatgtacaccatagacatttttccttgttaatttactaaattaccataaacacttttttctctcttttattattccttttccacccatacccactttttaactttccatttttaaatcattcctcgtgaaaatagtaaaactcctttatgcaataaagttttcttgaattttacaacgtacaaaaaaaaaaaaaccgcgtggcattttatgtggttatgatgtgagaataaattttgtgaaaacgaaactcatgtcaatgaataaaaagacgaaacaatgctatgataagaaaagaaacaacactcgaaaaagttcttctttttcttccgcacatgtctgactctctcataagcgtaaatcgctctgtcaaatatctctgaccagagagacagagttgcctccacgtttcttcagacaagactcacgctcttccctttcaccacattcccttctccatttctcaatctcacttaccttctcgattcttgctccaatttcgaatcttccgagtgaaaaaagcttcaaagtttggaactttctagtgtttattaatctgggtctgctctgagtttcgtgtgtagctgcatatgagcttaaagctcgagtttttccatctgggtttggaattctagggctagtgattggagattttgggaatttaggttgattttagtaggtttgacttcaggttgcgtaatttaggttgattttgatccgatttgtggaattagggtttgtttgttcacaaagcttcaatttttggagtttaaatggatcgataacgactgtgttagaagaaagtttgctgcttcagattcgtattcgatatagaaatgagtttggttcctcctttaccgattttatcaccaccgtcgtcaaattcttcaacaactgcacctcctccgttacagactcagcccaccactccatctgctccacctccggttacaccacctccttctccgccgcaatctccgccgccggttgtatcatcatcaccaccaccaccggttgtttcgtcacctccaccgtctttttctccaccaccgtcacctcctgtcatcacttcacctcctcccaccgttgcttcttcccctccacctcctgtggtgattgcttcccctcctccctcaactccggcgacaacaccaccagctcctccgcaaactgtctcacctccaccgcctcctgatgcttctccatcacctcccgcaccaacaacaacaaatcctcctcctaaaccttctccttcaccgccgggagaaacaccttcaccaccgggagaaacaccttcaccgcctaaaccttctccgtcaactccaactccaacaacaaccacatctcctcctcctcctccagctacctctgcttctcctccgtcttcaaatcctactgatccttctacgttagctcctcctccaactccattacctgttgttcccagagagaaaccaattgctaaaccaactggaccagcttcaaacaatggaaacaacactttgccgtctagttcaccaggtaaaagcgaagttggtactggaggtattgtagctatcggagtgattgtgggattggtttttcttagcctttttgtgatgggtgtgtggttcactcggaaacgaaagcgaaaggaccctggaacctttgttggatacacaatgcctccttccgcttattcatctcctcaaggctcaggtaatataacatagaagaatacatctcaggttctgtaaaggcattttgtagttggataatctaagatccttttgcatttagggtgcggttagaaaccctagttggtttgttcattaacggttcgagaactgttgaaagaactgtgtactgagtagtatggttagttttagtaacttaatgagcatggaacactcactaagttttggataatgtgtattgttaatgtcttgatcaatctgcatttggttctgccagtgtggtttctgtgtcttctctttacagtatatattgagtgttgtgagtagtatgattagtttcagaagcttaagaagcatgacactctcgctgagttttgactgcttgattttgcttaatgtcttgatcaatctgatcatccccttttaatgtagttagcttctgactatgtgtttctctgtgttgtcggtacaatgctgtggttatactttcagtctaggatatgagaccaaatatgtaactagagaagcagctatttttgatacgtgcgacaaataaaaaaggaaaagaataatcttttagttctgatcaaatgtatagattgtctccgtggtaatcatcaatgcatgaaccaacacattcttacttgtttgtttacccagtattgagttgtttattaacagaaaactcgtgttgacagatgtaatgctcttcaactcgcgttcttcagctcctcctaaaatgagaagccattctggtagcgattacatgtatgcgtcatctgattcaggcatggttagcaaccaaagatcatggttttcatatgatgagttatctcaagttaccagtgggttctccgagaagaatcttctcggtgaaggagggtttggctgtgtatacaaaggcgttctttctgacggaagggaagtggcagttaaacagttaaagattggtggaagccaaggggagagagagttcaaagcagaagttgaaatcatttctcgggttcatcaccgccatttggttacactagttggttattgcatctcagagcaacataggttgcttgtatatgattatgtacctaacaacactctccattatcatctccatggtaccaaatgcctcatcttcttaaaccataaacttatccttttataactacataaacttcaatgcatgtgtatgcgcagctccaggaagaccagttatgacttgggaaactcgggtaagggtcgctgctggtgcagctcgtggaatcgcctacttacatgaagactgtaagttactgatgcttttttgtttttccatgatatttagttttcataattttgttaccttctaatgctctgctttttttttttgcgttggcaggtcatccccgcattattcaccgtgacataaaatcttccaacatacttcttgataacagctttgaagccttggtaacatcatatgagctttattctagtcattaaacggtctttctttcacaacgctgacctcttagcaagttttttgtcacaggttgcggattttggactggcaaaaattgcacaagaactggatttaaacacacacgtctcaacgcgcgtaatgggaacctttgggtgtgtgtgtatgcactatttattagaacgttctttgtgtgaaaatcaactactcacagaagaactaaccgatattaactgtcaaattctcttaggtacatggctcctgaatatgcaacaagtggaaagctgtctgaaaaagcagatgtttattcgtatggggtaatactgttggagcttataactggccgtaaaccggtagatacgtctcaaccacttggtgatgagagccttgttgaatgggtaagtgcagctctagttttaccatatttcttgaacttccatgattcaacaagtgtcttctaaccccctttggttacataacttttattaggcaagacccttgctgggtcaagcaatcgagaacgaagaattcgacgagctagtagatccgaggctagggaaaaacttcatcccaggagagatgttcagaatggtagaagctgcggctgcatgtgtccgccactcagctgcaaaaagaccaaagatgagtcaagtggtgagagctttggacacacttgaagaagcaacggacataaccaacggaatgagaccaggacagagccaagtgtttgactcgagacaacaatctgctcagataaggatgtttcaaagaatggcttttgggagtcaagattatagttctgacttctttgatcgctcacagtcacatagtagctggggcagtcgtgaccagtccagatttgtaccttagtagtttttattgcctttgcttctttcttctttccctttaaacatgtcctcgatcttgtatattcttttgcatgatataatgtatttttgaaatatacatacatacacacataaaatttggtagtcttttgaagaaaaagaataacagatgtatttgatagatagtggtccttgctttatctaatgattgctgaaccgggttaacaaattgagtcttggtttctcttgtttacttgcttaatcgtttctttgtactgagttcttaatcggatttgtgagctgtgagttgcgaatcaaagcttagtgaggtctatcgaagataggatttacaacatctcttcttcgtaatcgcccttaaaatagttacacaataaacatcattttcttgtttcttgctttccaagaggacaagttttgtctagtagacaaaattaagtaaacaaacctcattgagatatttagatcaaannnnnnnnnnnnnnnnnatttgccgtgagtttcaaaaagccactccaaaataacaatgatgtatcttgattgaagcatatactgatcaagttgattttcagctcaatcttcaaaaacaattgaagaatgaaagtgaaatcgagctatctaaattcatttatgaaatgaagtaaaaaagagagtttcacatacaaaacaaaacatctaatgctaaagtctctcgatataatccaagtcctcaccgaatacgagtgggcatgtgcttgaagctcggggagaaagtctcaacaccttgatcatctcaagttttggaacaacagtatcaaccaagaatgttgccttctttaagtgacaagcgtttttcaaaatgtaaacagcaatatctctatcttgtggcctaagtatagtgaccatttgaaaatttgtaggctcggcagcgagcatcaaggaacataagtcagttgattccacttccagaaaacgataccatatacgcttatcatccccattttttaagcccaatcagaataataagactaaaagtaataagaagga

SEQ ID NO: 6639 - DNA, 1019 bp, Arabidopsis thaliana landsberg
aagaaaattacctgcaaatgcagccattataaattctttgtctttattggttttcttttcgtctgatgcatggaaaggaggaagtctactttcatgcctctctatgccagcgatatgctttacgtaatccagttgaccagaaatttttcttgaaggaggttctttctccaataagctaagcaaaggtcgaacttgatctggctgagtaacaggaaaaccattagacgcaccctccgccagtttctgaagcttatctgttgatgttctattggcagaaagagatatcctatgttgttgtataacatcctctgtggcatctgctacaacactgcttaatctaggcctatcaccatctgggtgcaaggcatcgggttgatggacatctgaactttgagaatttgaagttaaagcatgagaaggctcttcaccacccccattcctagttttcaacccatcaggatgatcaatcacactaggtgaagtctcacgctgactaaagataggattgttagggtcaagttgaccagagcgtgctcgtggagtttgaccatccaaaatcaatgcatcccccgatatagaagccagtcgagttgcctcactcaagctataaagagtgttgactagcataagaagaattccattctttgcagcaatacggcaaaaatcatttctcgaggtgcattttttgagtttaaatacctgccacatcccatcaatagccaagtgaaccatctccctggacagaaaagctcaaatcagttgaacttagtagcacataaagagcgaaaaggaccagaaatgattcaagagagatgagccaaattaacaaaatggtcaaatattgagaaatgcatcagccattttcaatagtagaaacacacatcacataaattaggcaggacgacaggttcaaggcaaaaccagatgatgctgggactggcaataccctaggaatctctgcgtgggataaaatacgagatcttgtgacgaaattcttgatatatcttacattagtttcc

SEQ ID NO: 6640 - DNA, 3447 bp, Arabidopsis thaliana landsberg
gtgttcaacacatctgatttagaccatgagagtctcatcaaacttttttcttaattagcgcatatttagacattacttcacaaaatatactattctaactaattccttcttaaacgaaccgtgcaaagccggttattcacgatataccgagtcttttagggacgccttcacatgactcataccggtatatttatataagtgtggttgaatttttttcagctatctcataaccagtcaaattgttcaagccttttttttatgtgtgggaaaattcaattgctcaagcttataattactattctcgtatagagctcttaaaagctagttcctcttttgtgatcaggtctaaaaggtcaatcacacaaaaactccaatatataatgcattagaattaacgttaacaaaaagaaaaaggaaattcatattatttaatatatgaaaaagagagagcaaaagatcacacatgaaaaattagagctcctctaaatgtgccataactaaaattcaacaatactagctaaaggatgactcttcttcgatcctccttaggatttgattcacagctgctgcaatatcttctactgtattcaattggctcccttcttcaacctgaataaacccattattttaatattttcttttaagttacatgaaaaagattgatatatagtcattgaaaaggtaaaaagatgattaaagaaaatgtttatatttcgaggaataagcttatgaatgtgtcctgaaacaagtggcgtcatttcgttctgccgtgcacagagcatccacagtgttgtgaccaccaaacatgcccagtacacatatatatatacacacattcacacatgtgtaggcatatgtcatctttttggtccctgattcttacaagaatcaatattatgatagtactcaaaattttgtcttttttaataaataagaaatgatgattttgaccccccaataattgaggccagccctatccaagtcaaaaagaacgagaaaaaaggaacgatttttatttttggtcttggaaaaccttttttggcccagacaaataattcacaacatgtcctaataagagacacattaaatgcacaaaacatttgtgattggaaaaacaatcaatgaataatcattgaaccaaaaccaacaatgggagtaatgattagtcacccattaattattagataccaatttaatttgaatgtgcaaattcaacccactaaccctaaacaacggtattatataacatgatcactctaatctggttaggaaaaaaaaaaaaaaaaatggtgaaaaagagagagaaaaatgtaccttgacgctgatggaatagaggacggagtcgtctcgagttgtgacgtttagatggagaagagtgagccttaggctctgtatcgatgagaccagtttaagaagctgtctcggtctctttttcgcaagtattttcagactcgcatggctctctaccatcgttacctctatctccgccatcccctcagccgccgccgcagaggtaggccggttcgagtactgaggaaatgcaaagaaatccgagaatggtcccgacgaactagccgaggttgttttggtctggtcgtggccggctccggtgtcttctgtggcggtcttaaccggaggttccattgattgtaaatgatgctcaagctcctttaagtagttaatggctccgcctactatcgatgcttgatctccctttaaccaccaccaaccttatgttagtctagcacatagaaattgcaaaaggttttgcaaaaacaatcaaacatgtctatatttcgtaccttaatttttttaaaaaatatattatgtcaccatctcattataaatctataatatgtatagtcctttttgggtgcaatgatgttcaagactttatttatgctcccacaattccactaacaaaattttcatttagagactacatgatctaataaaattatgaaaaaaagaaataacgactttcgtttagtttttattttttgtcaatatatataacggctttcattcatctatcatcattctcaaatttatatttcaaaacatataaacatacatgcatatgacatatctatgtatagcctatgcatgtcctaattagctgaaagcctagaacataggctttgctttttttttttttttttgacacgtcaagaaatacagctaaaggactgaatatttcacgcgctcacactcacatatacatataactgttgtatgtagagactaaccctttgagcataagaaggtggcatgagagaccggagaacggcgaggtactcgttcatctgtttccggcgatttctttcaacggcgatgtgagtcatcctctggttctcgatctcttctttgttcttgctactcctcgtcctcctccttttcctcctccctcctcccgccgccacatccgacggtggaggctggctctcggtgtcgacggcagatccataaggaaggtctcgtggccattggagatcctcttcgttgtaattataatcatcactataatctccggttctaccgttgtaattattactcgcaaaaccatgtccttgtccttgccctagcttaatgttgttcttagtatcttgtggatcttgatcttcttcttcttgaaagtataagtcgtaaaacggaaaatctttgcaagagatgtaggagaacggatcttgcgggtaaactacagcctccaaggccataattagctagaaaattgcttgaaatattaaaattacacttgaatatgaaaaggtttccagcgagagagaaaaagagaggaaaaaaaaagaggacagaaagtgtttctctttctctttttgtctcgagagggagacaaggcaaaaggtaaagacactctagggaaattaaacttgtaattatccctctacaagaaagaaaaaaaatcaacagaaatttgttctcaaagaactaagtaaacttgaagaagaaaagacaagagaagtactcaaaaaaaggtcaaacaaagttgtggtttgatctatggaatagaggagaagcttgtgaggttataaagctgatttaacaatagaaggtccgaagaaaatcgaaaccaactgagttcagaaaaagtagagatatagagagagagagatcgtgtatgtttggttttgcacgtgagattgtagaccggtccacaaaaccaaagaaaagattctgtgtgtttttgcaggctttggggttcgtcttgttacactcatgtcgaagagagagaaattataacatgttgaaatatcaactttatacgttgccatgaatttaatatttttttgccgtataccatgtgagtcaaaatgtaatctaatgaaagctatatcccaaaatttagagtgtttgcggtgataattatgtcgtctatcctcttttacgtattcaaacaataatttgctcctattgtgcgtgtgtaacgcg

SEQ ID NO: 6641 - DNA, 1361 bp, Arabidopsis thaliana landsberg
tttccccttaagagtatatgacaaaatcagtaaggaaaattatgcataaaaatgtggcatataccataaagagtaagggacttgtaatttcacaacaaagtcacccataaatgtttgtttataaggtatatgcaactacacatataattattaaaaaactgaaacattggacccatttattcatctagacgtgtaaatagtacactcggttcttactataggagatccaaaactgtaatctttattgatgtatatagagagccatggtatagtgtgattgtgatggtattgaggatcattacaatgaattcttcttcttccatctgccaactttttccattccctaaatattgatttcaaatattaaactttttcttttaaaatctttcttgttcacaaagaaactagagactgtttcttgtttactttgcgtgtatcaggagcaagttcgttatccacaatagagattacctcaaatcccaagggaatcaaaagctcttcatagctacaaaacattttaaccaaagtgagatattaattaagagagttgttagagttatgaaaaaggttagggtccaaggagaagatgaaaatttaaacgctgagactgattcttggtaaggagacccaccaaagcgatcagctaactgcataacataatcaataaagaaacatttcagaaccacgatatatgtgttgtaatgagagagatgcttcttacaggaaacattaatgttataaaagctcttgcatacgttttgcccatatgttatgtaaaaggaaaacaatgggccgaataaatattaatgggcctgattaaatgggcactatatcttattaaactatgctaaacatgaaacgttacgttttcgaatcacacacaaactcagtgaagttcgccgtcgtcggagctcatggatcgaccaccgtcgtttacacactatcaaaatcctaatccgaaattcttccaccacgcttctctttttcaaaatcgtaccaattttactccatcgctccggcggtgattggcgagctctccggtatactcccttcttctgttgtcggaatttccttagattctctctcgaaaaatctagctttagatcactcttccgatgaggacaagcggttagtcattactaatttcaattgatttcggttaggtttaaatggtattgaaataaattagaattgatttgcggttcggtttacatagagaagaagtaacaaacaaaatattcacgcgacgaggattttggagacaaatgcgtcgattgaaaaaggcgtgttttggaaaggggtacacccacagaattgaacaacacgcgctcaacgctcactttgtgcgagtgggtgtgaaa

SEQ ID NO: 6642 - DNA, 1264 bp, Arabidopsis thaliana landsberg
cccttccccattagatttttcagacaattttgcacaagtttcatattagctggacgagatacaagttctgttgcactttcatggttctgctgggtgatacagaaacacccagaggttgaaaacaaaatcatctgcgagataagagaaatcttgagacagcgaggggattctccaaccagcaaaaacgagagcctcttcacagtcaaagaactaaacaacatggtatacctacaagcagcactatcagaaactctgagactgttccctccaattccaatggaaatgaaacaagccattgaagatgatgtgttaccagatgggacattcgtaagaaaaggttcacgggtttacttctcaatctatgccatgggaaggatggaatcaatctggggaaaagattgtgaaattttcagaccagagagatggatccaagcagggaagtttgtcagtgacgaccagttcaaatacgttgtattcaatgctggaccaaggctgtgcataggaaaaacatttgcttacctgcagatgaagatgatagctgcttcagttttgttgaggtactcaatcaaggttgtccaagatcatgtcatagccccgagagtcacaactaacttgtacatgaagtacggcctcaaagtaaccatcacaccaaggtcgctggaagagaagaaacttgagtcatgttccatgtagaagatttgtaaactataataccttagaggaactcaattttactgttgaatactaaaaccacaattaaacatttttgacctttaactatctcaatgaaaaagtatatacctgttttggagcaattagtaatcatctcaatacatgtacaatgtgtgagcaggtaacttctttgatatgttttcaagactgaagaaatgttttcatccaatatacgcagttgcagcacaaacagatactccatggcttgtgagtgtgatgagagctgaagaaaagccaatctgtaagatgaaaataacaagcctagaacatcaatcagttctaaggttgttcagcaatccttcactgtgtaatcttctgcaaatggtttgagattcttatgccacaccaattcctgcgggcgttcacatctcataccattacattgctattatgtataagacttctctaacatcattttgaaaactcatcccaaactcatataacacatgaacaaacattggaaccgatccaaagatcactcccagaagaaacattgttatcattttcactgcattaccaaccctattgacta

SEQ ID NO: 6643 - DNA, 2729 bp, Arabidopsis thaliana landsberg
atgtcgacacaattatgatcatgcacagtgcttctcagcttatctttctttgttcaattgtttgttttgtttttgtgcagtttaacatacaaaggctagcatttgaggaaggtcatggtgttgagacactacaagaagctaagtctgcattatggaaagtgttggagaaggtcaagctgaatttgcagaaatgacaagccccttttgctactttatacgggtccttttaaaatagtaggaccaataaaatggtggttggttcctcttttcttcttcttgactagctgaaattttgtagtttctttcttttatcttttgacctcccttttgtagagtatcaaaattggaggtttaaaaaacgtcaatctggaaatatggggttgatatctgagtttctaatcaacaatattagagcgttaatgatatatttctggaaggtttcaagccgatatttaaaatcgttacataaattagtgggacaatcataaatcacactagctctagtactttcctttagcctcttaaaagaaaactacacttttagatactttgttggatttgaaccaaacttggaacataagtaaggagatatggacattaacaatctgcactatgctgatccacttgtatgatgtatatatgctctcccacaatgtgtaacatgttggacttgggtttgaagcgatacacgaaaacgggcttctcttggtcagccaagacagtcatctcatcaattctaaagtgaaaacgatgggacttgctccatgaaatggctccggtactctccatcttagttgctatccataactcagagccatgaatattaaacatacaaagttgttgctcttctctagtcactgataaagacacatcgtagtaagtacgaggagcatccgtcggaagagactgacgtcgaaacccgtcagtcgaaaaatcaaaacttaataagaacatatcaaatggcggtccgtcttcagtaagagcaagccagtaagtatttcccttcacagacaagccacgtctccgagtcccaatacttggtatgaacaagcctccagccacaccatcaactagccacgatttagaggtaaagtcatagacttggtactcagtttgaattgggatacggtcctcagatcgatccatcctcaagattttgtgacatgaggatgtgttatcataacctaaagcatagatgtctgataccttgtaggaacttctaggttggatccaccttgtttcacctgaacatggattccaaacaactaatctattgtctttggtgctgcatagtaataagccgtcgcagtgaaagacgttacgtatatcaatatcctctaaagaatttgaaagaggatcttttaggctgaattgacctgttagctttgcagatagatcaaccttttcaattccatagaggatactcacgttcattaaataaaccctagaatcaatcaacgtgataaccagagactgccttggagcataagcagagtgcttcttagcaagtctctcgtccttaacaagagcgttccatcgtttggatgtagttcgtaatcgtgccaaagatacagccgaaactctagagagtatctccactatcaaatcctccgaaagataaactgtgtttctctgcttcatcatctttacagcagttctgtttcaaggttacttgggatggaagtttttagacctaaaacctatactcacgcaccaaaacgagtgtcgtttctacagattttgtaacaacaattcatcgtcgtgacctaaatcaaggagagaatgggtcaaaaccggttcttgggttgaaggcttgggccgaggatatttctagctggaccaagcttgaccaaagtcaatatttggtttaatacaagtaaataaaaaacgtagaatgagttgtgccagagttagattcattcagaaacagattgttgttctcaagggtcttcttttttgtccaatatcagagtcagtcttcgttcttggttctctcggcgagcttgtagccactgttcactccttaaattttgaactccttaaattcgataaaacttgtaagaataagagagatagagtgtaagagactaagactggactaatggttgcgggtcgacattatgttgctttaacgccaagtcttaggtgtaagggagagcttttcatggtggagcttgttcttggcctatagcgacctagacctaatttgatgttcttggtttataggaaagaaaacagattaatttgatggaaaacagaataatttgactctgacgacaatatatgccctggtttaataagagataagcaacattatattaatccactcgctgaagaaaaaagaaactggaatcgatataataaaacagcaaagcctgttatatatcaagacaaggatagagaaagcataaattagtgtaacaagtataaatcactagctagcctcttccaagagcactagataccttgctggatttgaaccaaacttggaacataagtaaggagaattgggcatctgatatctccatctttattcacttgtcttatgtatatatcctctcccacaatgtgtaagatgttgtagtagggtaggagtatatggtgaggcactaaaactttcttctcatggtcggccgagacatttatacaaatcttagagtgaaaacgacggaacttggtccatgtcagttctcccgtagtctcctctgtcttagttgctacgagtgcat

SEQ ID NO: 6644 - DNA, 1755 bp, Arabidopsis thaliana landsberg
gacctgctacagatcataaatatcgttcattttcggcattcacatcaaggtgttgaaaattgaattattatgtatgtatcatagagtaagtaagtttgtgtagtgatctaattttctttacgaaaacatgatcatcatcaggtggaagtggttgacactgttggatgtggagacagttttgtggctgcaattgcattaggttatatacgcaacatgccgcttgttaataccttaacaattgcaaatgcggttggagcagcaactgcaatgggctgtggagcaggtagaaatgttgcaaaaaggcatcaggtggtggatctgatgaaggcctcgaaactcaatgatgaagagaagtttttcgaacaactcctggctgaaaattcagagtcatctagaatcaatcttctttcaaaagggatgataaaggatgggaggagcaacaagcagctgatagaaacaatctcaatggaaaaagtggtttctgaattgcttgcagaacttgaacttgggaggtgttgtgtgaaggcttcatcttgaatctttgaaacaaactcgcctgacacacatattttctttggcggcgtgattttggagacctttgatggctctcaaggatttgcatagagacttgtaaaccagaagataacatcgggtaatgatggagattttttgtttcagctgaatcttattagtggatgaagaaatttcaggtaaatgattggttggcaatatttttttctttgggagatatgaaagagaaggtgatcttacaacattagtgataaatagttcacataaagagaagtttggcactattttctgtttgtcttcatattgttaaagtcgttaagatgcgatagtttggtcgggattttgtggaagttatgttagtaccaaacttgaagatttacttcaatccgaggagttttgtgttaatttcgccaatcaccattaataatgtagaacgtatcaaaatctacaaaaacaaaattacgtcatcgtagacgcgttgaagtcattaacactaattagtaaatcatggattgggccaatgtgacctcgaataaagtaaataaatcttaggcgtttataccaatgagatgctatttccaacttaagcgacggatatgaaatgaccaacatacccttaaaacacctaacaaggttacagagttacctttttaacctgatgatatcaatcctgtcgcctcttcttctcctttgtcgagaataatatttttctccttgaaacagttaaaccctacactcaatttcttacccgccaaattccttctctttcaatgtgcgattccctttaattgtgtactcgtttctttaattgagtttcaatggatttagagtcttctcaaatttttctattgtaagtttcaaaatcctcctttttttttgtttgtttgcttttctgcaatttgcttctgttctctgtttcttatattcgaaagcattggattttgggcttgtttgtattctgctgaatgtgcttgcatgatcaagttggtaaattttcgaattgggtttgtttttgatgatgttttgtctcctccatgcattgtcttttatgttgacaggtaattttctaaaggacacagcaagaagtgagtttcaggatcttctgtaataatctgattagattctgcagtgttttcttttagttattagaatggcaaacgacgagcttgtgaagtctgagaaccgtgatatctcgtttagacaagatcatttcacgggtagtct

SEQ ID NO: 6645 - DNA, 1075 bp, Arabidopsis thaliana landsberg
tagaggatcccccataaaaagttaaatacaaaaagatggtaagaaaacaattgcaatttcatgtttagaggactctcctatagtttaaggtgagaaaaaaatcactagatttgattgataatatgaaagtcagtgattttgcgttttaaaacgtgattctgcatgtaaaatcgtaaggaaaggttagttgtgtctttcgtaaacatgattctacaagaaaagcattttaataaacaaattaaagaatcataaatttcatttagctttttttcattaaaccaagttccacatacaaatacaacttgccaaccataaagtgaaaggagttttatttagctagcctaaaacccattttctcattttgcataatgtgaaatagagtgggatcttaaacagagtcgtctcttgagaacgtggtctcgtatggtaggctctcaattttgacaagacataataatcatcgatctctccactataaaatcaaatttactttacacgacaaagagaaaaagagagagagaaagatggtgaatgagaagaagatgctcccaaaacgcatcatactaatgcgtcacggtgagtcagccggtaacatcgacgcaggggcttacgcgaccacacccgatcacaagatccctctaacggaagaaggaagagcgcaagcgcgtgaggccgggaagaaaatgagagccctcatatcaacccaaagcggcggtgcgtgtggagagaattggcgcgtgtacttctacgtgtcgccttacgagagaacgaggacgactttgagggaagtaggaaaaggattctcgaggaagcgcgtgataggagtgagggaagagtgtaggatcagagaacaagattttgggaattttcaagtggaagagaggatgagagttgtgaaggagacgagggaacgtttcggtagatttttctatcgttttcccgaaggtgaatccgccgccgacgtctacgatcgtgtttttagtaagttcattattttattatagtagacatgaatacgattattgatatggatacttgcattaaaataacatcgttgaattatataaaccttttt

SEQ ID NO: 6646 - DNA, 479 bp, Arabidopsis thaliana landsberg
tggaaactcaattgaagaaacgagtagacaattgaagggaatcacacattgaaagagaaggaatttggcgggtaagaaattgagtgtatataaagaaattgactcaccgtgacgcattagtatgatgcgttttgggagcatcttcttctcatttgccatctttttctctctctatatttactctaaaccctaaaccctaaaccctaaactgttcgaatataatacattatatcttgtttgaaaatatagttaacaaaaaaatgtaggttcaaatactaaataatgtaggttcaaatactaaacatagttcaaaataaaaacaatttgaaatgacaaagtttggaacaaaatatacataaattcaaaacataattttaaatttcaaggagcggctacgtcaatctcttaattttcttcaatcaattcaagtcttgggttctatgtatcatactcgccttaaaactgcggctgtaaacaca

SEQ ID NO: 6647 - DNA, 1590 bp, Arabidopsis thaliana landsberg
tctattttttacatggaaactatataatgggcctaggaataaaattggagtggcccaaaaggtcccaaaagaaggaggcggctcattaaggtgcagatatttttgttgcgacgatggatggttttataaacctaactaacagagacggtctaaagttggacatccttgcttttggtctaactttctctctcttgcttctacgcttcttcttgtggcgtagattgttatagagagggaaaccaaaaaagggaatctcaaaagctcgagttcacagatttgacccgagtctttaatccaatctgctggttcgttttccacattcaaactcgactcttgaatatcaaatcaggtacgcgtttatctgttgacaaaattcctcaatcctgacttagattcctagaatttggtatttaagctctctgtttcaatttctagtttctctctaagattgcgtcggtttggtcgtgtttaattctgatttctgatcgaatccttttattacgtgttagtttttttttttattgttcgatttgaatccagatctgtgactcgattgcagttggatgcttttctcatttatggttgaattaattgaaacctaagtcgagtttggtgatgatttctgtggattaccgatttggtttactgaatcgctttgacatgttgcagaagtctttgctatggctgctaccgctgctgcttctgttgtccgttacgcacctgaggatcatactcttcccaagccctggaaaggccttatcgatgatagaactggttacttgtacttttggaatcctgagaccaatgttactcagtacgagaaaccaaccccctctcaacctcctaagttttctcccgccgtttctgttagctcttccgttcaggttcaacaaactgatgcctatgctcctcccaaggatgacgataagtactccagaggctctgaacgtgtgtccaggttttctgaggtactacatctggttgctgttaacgatattttatacattatttctctgttcatctgtttactttttctcaatttgctatagggtggcaggagtggaccgccttattcgaacggtgctgctaatggagttggggattctgcttatggtgcagcatctaccagagttcctcttccttcatcagctccagcaagtgaactatcccctgaggcctattcccgccgtcatgaaattactgtcagtgtaagtatctaagaccttcctgtaacaatcaccctcgtttttatggtagacccctatgttcctctcttttatcgttgttttatttgagcttttttattttcttaaattactgaagtttactgatatttctttcccatttcttcaggggggccaagtaccaccacctctaatgtcctttgaagctactggttttccacctgagcttctgcgggaggtatgatttgttaatagtaaactgaaatgacttaggaacccctcaaacctgataattgttctaccaataagcggaatctataaccttataattgttctaccaataagcggaatctgtattgagtgtttttgctaaagtctgatttattaacatagctttgtttttcca

SEQ ID NO: 6648 - DNA, 1815 bp, Arabidopsis thaliana landsberg
cagtctctctcttttctgcgtttcctcttctctctggggcgtaaagttataaaaggaatttaggtcttcttctttggtttttcctttgctcttcattctcatactctctcgacagtgaaatcaggttcttgttttttttcgtagacctacatttttcgaatttcgtttttttattcgtgccgaaatgtcgatatctctctttgtctttgccgtaccattttctgtagttggggattttagctgcattttttattttccttaggttctgggttatatttctctgtttgttagtgtcttctcttgttgtctgaagagtaacgaggtcgaatctgttcttctgcatgttagggtttttgttggcgttgtgtctcaacctgtggtgtaatgagataatcagagacccttttgtgaaaaagtttcgcttttgtcttctttccgtctatatgtttggtgtgtgtttctcgacttaaaaaatccatgctttctggtaaagtgatggtctttgtcattgggttgctttgcttctgttgatagtttcttctggtgttgttttgtttttgttttctgatagtgatgtgaattgcaaagttctgttttttttccctgttgatcgtttaaatttaagctattattggtttcgacatgttgttcttccaggaatttggtatggctgctactgcttctgcaattcgttacgctcctgaggatccgaatctccctaagccatggaaaggtcttgtggatagtagaactgggtacctctacttttggaatccagagaccaatgttactcagtacgagagaccggcttcttccgctcctcccaagcttgctgctattcccgtaagctcttcggttcagactaatcagcaatcttcttctggatttaactctggcaaggaagatgataagtatggtaggggcagtgatgggcctaagtctgactctggatcaaggtttaatgaggtactaacttatggctgttaatggctgatttctatcctttgtgctctccaaacgtcataatttttcatttcaatttgtttgccacactggatttatccctcttggtcatactgtatcttcaatttcgatttcatttggaacaggctggaagaactggacctatatcttctaatgatgctgctagtggactagggaatgcttcatctggtggatcatctgccagagggcctccttcttcagccgcaggaaatgaattgtccccagaggcctattgccgcaaacatgaaattactgtcagtgtaagtatctatgagacataaatctctctctgggttgcatttcttcatttctcctccgtggtagcacacagaattagttgcattcatcttcttttcatgtactctgaaagtttcatttgcggctctacctatgtggtgacaggctaataatgttaacgtattatttaagtttgatttcctttgagtactaaccattaactatacaagtttatttatcctactgaactctgaaattcatttttcaatttcgtagggaggccaagtaccaccacctctaatgtcttttgaagccactggtcttcccaatgagcttctgcgggaggtatgaaatcatcaggctcctataccatcactctttttttttgttgggggagtaaacatgtcttttttcacattgctctgatatttagctagactattttaatttattttttatctgttggattcagcgatttatgagggagctattttgtctaatgtcacataattattatgtctgcacgctttaacttgtattgttggaggtagcgagactatttttatatatata

SEQ ID NO: 6649 - DNA, 1703 bp, Arabidopsis thaliana landsberg
taaatgtgcaatgtttacttaaaacttttaatttgggcttttaccaaatacttccaagttccaagaaccaatcacaaagcatattattcaccgtcaagctcaatcagagaaagatcaaagcttaaaactttttttccggaaaagttaaagagagaaaaaagaatcaatctttttgcttgacgattgttactctcagtggaaaggtctagtccccattctcatttttttttgttaaaaatcgtatctttggctttatttttggttatctcgtagattttgcatgaaaagctttgaactttctgatgttttgattgacctccatttaggaaaatgtaaatatcttcaatttctggggtttaagtgagattttacgagtgttcaagtgaagggttttgaatttaaacacctggtaagccatttctttgtttctcaggacgatgaatctgttggccctcgtcgttggatttggaatcatgggtattgttgtggtagatgggctaggtgtgaactggggaacaatggctacacacaagctaccaccaaagaaagtagttcaaatgcttaaggacaataacattaacaaagttaagatttttgatgcggatgagaccacaatgagtgcacttactggctctggtcttgaagttatggttgcaattcctaatgatcagcttaaggttatgggaagttatgaccgagctaaagattgggttcataagaatgtcactcgttataacttcaatggtggtgttaatatcacgttagtgagtttctccctctgcttattatagattggttctaatgttgtctgaaaatgttaaacatgtttaaagaaaatttgtgtgttttatgtaatagtggaggtaatgtcctgttgatgtgttttcaggtttgtagcagttgggaatgagccattcctcaaatcatacaatggatctttcataaacctcacattccctgcacttgcgaacattcaaaacgctttaaatgaagccggactaggaaactctgtcaaagcaacagtccctttaaacgcggatgtatacgattcaccagcaagcaatcccgttccatctgcaggaagattccgtcccgatatcatcggtcaaatgactcagattgttgactttcttggcaagaacaatgctcccatcacaattaacatctaccctttcttaagtctctatgggaatgatgatttcccactcaactacgccttcttcgatggtgctgaaccgataaacgacaacggtattgattatacaaacgttttcgatgccaatttcgatactttggtgtcgtctttgaaagctgttggtcacggagatatgccaataatcgttggagaagttggttggccaacagagggtgacaaacacgctaatgcaggttgatatctgaccttctttagatggatttttatcctttatgaagtgttttagttttgattttgaaaacggttttttcacaggcagtgcttacagattctacaacgggcttttaccgaggcttggaacaaacaaaggcactccattgagaccaacctacattgaggtatacttgttcggattactcgacgaggatgcaaaaagtatagcaccgggaccgttcgaacgccattggggaatatttaaattcgacgggcaaccaaagtttcctatagatctttcaggtcaaggacagagtaagttcttgattggtgc

SEQ ID NO: 6650 - DNA, 891 bp, Arabidopsis thaliana landsberg
aactctacatggttttgcatttggcaatgtcataaactaaacaaccatgggtttatgaggttcgacaaacaaacacaaagaatgttaattttgacgtttagacaaacactacaaccaatcaataacaatcaaattgagacagagcagagaggaagagagacaaactcacgtgatattgacaccaccatcgaagttataacgagtgacattcttacgaacccaatctttggctctatcgtaactagtcataaccttaagctgatcattgggaatagcgaccatcacttcaagacccgagccagcgagtgcacccatggttgtctcgtccgcatcaaaaagcttaaccttgttgatgttattgtccttaagcatctgaaccactgtctttggaggcagcttatgtgtagccattgttccccaattcacacccaacccatttaccaaaatacccaaatgaccaattacgattacgaatccgacgacgagagccaacagtttcgacatcgattttcacctgagaaagattgaaaaggtgagatttttacccagaattctaaaattatcagtttgataaatctaacatttgagaaatgagaaacttttagaggacccattacctctccttagatatggagactgataaaccgcgtacagagagagaagaagaaacgcgtggagactgtagagaaacctaaaaaggtaaactttttggttttggggaaactaaaagagagataaaagttggagatattttcggtgagtttcgttgctaaatgaatgatagtactatttaataatgatgtatcatgacgttgtgggtggatttataacggctctatttctccggagagaacatgtcatgggccaatgctcgttcagtctttgtcctct

SEQ ID NO: 6651 - DNA, 634 bp, Arabidopsis thaliana landsberg
  unsure (1)..(634): unsure at all n locations
agatgatctgcttcagccaatctgcttgactgtgagggaacctaagtacacgatgtctgggattgctgaggtgttggtagcagttggcgatgatatttttgttgtggaggaggacatggttcaaactattaggtttgatgagcctagtattgatgactctgagatgcagaatgatgattctgggaatttgattggagtggtccagaagatgattgtatcacctaatggaaaatttctaacactcttcactcatgatggccggattgttgttgttgacatggaaacaaaacaaattgctattgactactcttgtgaggtatgcatcattgcctctttagatgcttggttctttgtaatagactgtataataaacattgcttgtcgttctgtannnnnnnnnnnnnnnnnnnnnnnnnnnnnnnnttttctagtcagcccttcctccgcagcaaatggcttggtgtggaatggatagtgtgctgctatattgggatgaggatttaatgatggtgggtcctgtaggagacccagttcactatttctatgatgaacctataattcttatcccagannnnnnnnnnnnnnnnnnnnnnnntacacgaatcttgaattctgcaagagtacctgatctact

SEQ ID NO: 6652 - DNA, 1696 bp, Arabidopsis thaliana landsberg
tctatttgacgtgaagacgactctatgtcaatgattgttgtttctaacgatttttggttggcttgtttttgaccctatcttctataatagagagaattaatgtaggaatctgttgttgcgtggaaaaaaagaagaaagatatatgctggtttaccattatcaaaatgattgggactggtggataccaaaaaatgtgacctacctaatggcccaataaacataagtgattttctgacatagcccattaggcagtttatgttgagtgattttgatggttgcgtgaaccgtataaataaattatgtcaacattatgagaaaacaaaccataatatattggattgaagggtttgcttattcagtagctttgctggcgctataagcattgacgagctgagcctggacttcattggacacagcagaatgttctttgtattccatcgtgaattctccttttccttgtgtcatggaccggagagaagtggagtagccaaacatgttgttcaaaggcacctgttaataaacacacattacgtgttgttaattactgttgataaaggaaactttgctttctatattggttcttacattagcagtgattactgaatcatcaccctcttgatcgtttccaacgattatacctttcctcctgaaattgaaacaagtttgacttattatactaataggacaaggagaaagaaaaggtattgttaaagggtttagagtttttagagtttacttgttgatgtcaccagcaacagtgccctgaaactctgttggtactttcaactcgaccagcataacaggttctagaatcaccggtctagctgctgtataacacagtctgaatgcgtatattgcagccattttaaacgcaagttcactggaatctaccgcgtgtgaagctccatctgtcaatactattctaagattctctacagggtgaccaattagtgagcccctgcaatggaatagggcgtttcactatcacttacaacaacatttcctcaaccaaaacaagagaaaaaagtagaaattgagaaagacaaagaatttgagagaccaagatcactcacgagtttgcagcttctttgaaacctttctcaattgctggaataaaaccagacggaattgcttgtccaacaatcatgttttcaaattcaaacttctctttagagcctggtggtagcggttccacgtacctaacaattatacacatcgttaggaatggtttagcagggatccataccacatcatttagggtctataagtttttgatactcaccctgtaactctaccgtattgacctgctcctccactttgcttcttatgtaaataatcaaactctgcccgctgagtaatagtctccctaaaattgacacggggtttgcccacagtcgcatcaacctatttgatatttccaaaaataagcagaaataagggttttgtcgagaagcaatagagtgagaacattgggaaggtttaaagtcaggcaggcaccttatattctcttcgcatgcgttcaacatagatgtccaaatgcaattcccccataccagaaataatcgtctgtcccatgaaggataaatggaagaatcatcaatattaaattctatggggtgaattaagagagaggtgctgagaagcaaaagagtttttagatgatacctggccactctcgggatccaaacccaccgga

SEQ ID NO: 6653 - DNA, 1838 bp, Arabidopsis thaliana landsberg
catgtaattatgtgtgtgtttacaaggtgcctttgaacaacatgtttggctactccacttctctccggtccatgacacaaggcaaaggagaattcacgatggaatacaaagaacattctgctgtgtccaatgaagtccaggctcagctcgtcaatgcttacagcgccagcaaagctactgaataaacaagccattgaatcaaaatattatggtttgttttctcataatgttcatttacaacatttatttatacggttcacaaccaacaaaatcactcaacataaaaatgcgtgatgggctatgtcagaaaatcacttatgtttactgggccattatggtcactcatcataatagtggaacgattagctgtagagtatacactcccaagaacagttcaaatactatctccaactgtttgcaaggcgatacaaaattttggtatttttaatggatttgttgatgcatttgatggaacacatgtacttgttatggtgacactagctcaagatggtctctgatttataaaccgaaagagaattgcaagcttcaaggttcgatcgatatatgattttgatatgcttatcatatattgatttgtcatgatggttaggatctgcctatgatgtcttggctgtatacaatgttttcgatacctctagaaagtaagtatatgttgcagattctagatatgctaataatcacatatatttagcttcacactaaaaaaattataataacggcacataatatcatcttcaagagtattttaacggtgaaccctctcgaaacaataaagaaatgtataataggtgacatgtgtcattacgttccattattgaacaaacattcgacttaaatgaaacaaaaaatggaggattctacgtgaatttcctaggtatgacattactacaaaaaagaagtgttttattcactacaatgagtctacataattttattcgtcaacacaatattaaagactatgagtttgacaatattgatattgagaatgatgtacaagcacaacaggatagagcaaaataacaatgatgatttcagaatcgaagaatcactggaagcaagaatatatatgcagatagttcctgattagattgttgaacatatatcaatattgtaaaacccaaaaggcttgtaaggcccaataaaggcccaaaaagaagactttcctctctaatccatccgcccattcctctggtcgcaagctttccacggttccgattctccgaatggataatgtaaccgtttagctctctctcttttctttacacttgcataaatcttacggtggccatgagcttggcttcgattccctcgtcgtcaccagtggcttcaccgtacttccgctgccgtacttacatcttctccttctcttcctcacctctctgtttatatttcccgcgcggtgactctacttctctcaggccacgagttcgcgccttgcgaacggaatctgacggtgctaaaatcggtaactcggagtcttacggctccgaattgcttcgtcggcctcgtattgcgtcggaggaaagctccgaagaagaggaggaagaggaagaagagaacagcgaaggtgatgagttcgtcgattgggaagataaaatccttgaggttactgttcctcttgttggcttcgtcagaatgattcttcactccggaaagtaagctttaagcatttatgaggcaattggttgcaaaatttcataagtttttgtaattttgttgtctaattgagtgttttactggttaatttgaacgaaattggtgctctagatactctctgttccttggaaaattggttctagttcttatgagttcgcaat

SEQ ID NO: 6654 - DNA, 1364 bp, Arabidopsis thaliana landsberg
ggaggctctcaacactctaacccggtggctccaccatgcaagatattgaatcccactgtttgatgaaatcagctgttctccgtatcctctccgatttcgtcacatacgctcctgagattcctttcactgaatctggggagaaaactatgctgctattaaggttttcatagctcacaaggttaagctttattgcaagcatcatcatatttagctttaatatgttgtacctgaatctctgaattatagtcactcaaattaaatatgtgtacgtagatcatgaatctatgttttgcatttgacaagttttgatgtgattatcaactcttcaaacaccaattacaccaaaaaattttgactctttttttaagaacccaatttaaaatactaccattggacaatgctaaaaactaaaattcttacccaagctctaagtttaacagtttcaaaattaataattaaaaaattgctaaaaacccttgttaatatactaccattgaggatggtcttagtatcctcggcagtggcggaggcatggctttgataggagggtcagttgaccccgataaaattttaaaaatctattatatgtcattatcaataattctactacaagaaattttgatgcatatatatccttctagacttctactttagcacaaactttcgagttgactcggcgtggacatgaaaacttcaccctctatgccaatgcgctactcgatatctcaaacgaatggtttgttctcctcaccgagtcatgcattcccctattcaacttcacaactatctacacgtacataaccgaatcagagcatagctttataggttaatttgatcatcccagtgcctatggccgaggccgctactacggcaacatggcccctgaagtttccatagaccaatggagaaaagggtctcagtggttttagatggaaattacattttaactcattttaagttatacacaaacaaatttgtatgtaaacacaccgaaatgtaaagaaataggagtatcaaatatataaaataatattaaaagatgttgttatctttgatagaagttaaaaatgaagtataaggaaacttagtttaagatattaactaatccatcatcttccttaaaacattctttgaactttacatcattcttttatgttgtacatcatatctccgtcttcccctataaaatatgaaaatgtaattaaagttgaaaacaaatagattttgttatctggttacactaaacaatttttggttcgtttttttttgctctcttgtttttaagaaaacaaaaaaaaattaatttttaacacaaatttcaatttcaggtttttagttttaggtttaaaatggataacaactaa

SEQ ID NO: 6655 - DNA, 3071 bp, Arabidopsis thaliana landsberg
gagattaccaatggccgacccgaatcaagaaacccatggcccccggagaagaagaccctttaaaggtctcctcgccgtctcatttggtctcttgttcatcgccttttacgtcgctctcatcgccacacacgacggatctagatccaacgacgaagggatcgatgaaacagagacgataacgtcacgtgcacgtcttgctggtgtgtcggagaaacgtaacgatgggttatggaaactttccggcgatcggaacacgccggcgtttgaatggaacaatagtatgttgtcgtggcaacgaacggcgtttcattttcagcctgagcaaaattggatgaacggtacgcaatcattaaaaataataatatattattgattttgttatttgttattttgcaaaagtagttattctttttgttataaattcaaagaatattcattattccttttcacatatatttgtttttccataatgtgggagaaaatgttgaaatcatattcaaaatttccaaattaactaacagtgattgatttgattcattcaaatccagagaattttatcatatgatcttgtgatgattttaattccagattaattactaattagttcgtttgttttgtttccatatggtgttgctcaatggtaaatttgggattttctatcatcagatcctaacggtaagttttactttcctttcttttctgaatttttctcttagatcctgtgattttttgatttatagtatatgtttcatttttttaagaatttgaaaaattaataagaaataactggagcgacaataagtagtagatcacagaacaacacaacacacaatccacgttatagccaatgtttacaactaaaaaggtaaaaagttcaccgacaaaatcagaacagagttacctcacaaccaattgcaaaattacttagttgtacctttttgggaaaaaaatatatttatttacaactgaaaaggtaaaaagttcagagacaaaatcagaacaaagttacctcacaaccaattgcaaaattttgattatttagacatttttatttgccagtttgtattccacgtgagatttttcacatgctaaaaagtttgtataaatcattggttgccatagaaaagtaatcttgattgtataaaatccttttatgaatgcaaagtttggatcttgtctcaaattggataaagccagtggggtatacgaactaagctatatttctctttggtacctaaaactttcttatgtataaatagaatcccattatttctgagttattctcattttgaccccaataaactaaagtgttttgcatttttgtccaggtcctttgttctacaagggatggtaccatttcttctaccagtataacccaaacgcagccgtatggggtgatattgtttggggtcatgccgtttctagggacctaatccactgggtccatttgcccatagccatggtcgctgatcaatggtatgactccaacggtgtgtggaccggctcagccacattcctccctgatggctctatagtcatgctctataccggttccaccgataaagccgtgcaggtatgtaccccgaaattattcctacttacattcaattttaaattgttggaacaagataataacattttagaaacagtattcataagaaagaattaacttagaaaaataaaacacacaataatttcaaatctaattttagttttgtaatttacaaccaaattactcttttctaaatataaaagctaataaaactctactaaaaatgattgaatccaataaattgtcaaatctaacaagtatttttgttaaagatatattaccaaactagtacgtttaacttttaactataaaaactaattcgatgattagtaggtagatccaatgatatatatttatgtgtgaaaatgtttatttagaacaagaaatgagatattaagactttttctttggtttgaaacgttaggcgtagtagagttaatatagccagatttttggtatgttagatactgaacatgtaaattactttcataattgtatcaatgatcgtaatttaatgtttttaggtccaaaaccttgcctaccctgaagaccccaacgacccacttctgttgaaatgggtcaagttcccggggaacccggttctagtacctccgcccggtatcctccctaaggacttccgtgacccaacgactgcgtggaagacatcagaaggaaaatggcggatcacgattggttccaagctcaacaaaactggaatctcactcgtgtacgacacgatcgactttaaaacatacgagaaacttgacacattgttgcaccgagttcccaacaccggaatgtgggagtgtgttgacttttacccggtgtctaagactgcgggcaatgggcttgacacatcggtcaatggaccggctgtgaagcatatcgtgaaggctagcatggacgacaccaggttcgatcattatgctgtaggcacgtatttcgattcaaacggaacatggatccccgatgatcctactatcgatgttgggatgagtgccagtttaagatatgattacggaaagttctatgcttcaaagtcgttttacgaccagaacaagggtcgaagagtcttgtggagttggattggtgaatctgatagtgaggcttctgatgtacaaaagggttggtcttctctccaggtatgtgttgtttccttgacgtaacgtgttgtgtgtgatagttgcttgtaatccaagtttctaagatttgtgtgtatacggttatcagggtatcccaagaaccgttgtcttcgacacaaagacaggaaagaacttggttcaatggccagtagaagaaataaaatctcttagactaagcagcaagcaatttgatctcgaggtcggtcccgggtcagtggtaccggtcgatgtaggttccgcggctcaactagacattgaagcagaattcgagattaacaaagaatctctagaaaaaatcctcggaaacgcttcagtagtggctgaagccgaggaatttagctgcgagaaaagcggaggctccaccgtccgtggtgctt

SEQ ID NO: 6656 - DNA, 1746 bp, Arabidopsis thaliana landsberg
ccttgaatttacaagagaagagatgatgcaaagtttggtcgattaattagggattttggtgggtttctaggtttgatccgaatttgttttggttggatggataaaatccaggtattttatgttatttgtgtgtttttattataatatacttataattgactcattttttgaatataaaaattaataaaaaaaaaattctgtttagaacggggagttttggggtttctatatgataaaaagggacttcttagacgaaaatttgccgaattgacattacccagatctgagtagataattattctaggaaggattaatttgaataatttttgttaaagtgaagagaagcaaaggaatcttgccggagaatatgtctccttgaaaatacaaagattgaagcagagttagattctagatttgactttagatttgagattctcgatccattgttgaacccacggttagatgttactattattctcaatttatgaacatataaagaagagagttgatggtgctctctaaacatgttatgttcttttcctgcaatgttgttgatgaagaggaagaagacatagcacatatacgataagatattgtatatatagttattagtaaggataggtaaacaagtgttatagtggccttattgtttgtagatgtttattatggtgtttaaggtttcgggtacaagtcttcacattaatatatatatttttaatatacaaaacgacgtagtttgaaaatcaatgcatagattttcatagtttgcaaaatctatacacgctcacggttataatgcgggtgattttcgagttgatggcattgacctgcattttattttgaattgaaaggttaatttgcaaacaaaaatcattttgagttttttttgcacaaaacccaaaaaaatatgaatttttgtctattaaatttgatatttaaaatctattttttggaaaatatatataacaaaaaagttcaaataggctaatattaaattaagtgttactaaatcctctttcatagcatcactcatttctcttttcctgtttgatcgctcgtttcatttaaccaaacttacaatagacattttccaacaactacttcacaccaaaattgtcttgtgtcacaaccaccaccattgccactctcattgccactctcaatgtcacaactactggttacttcgtttgtttggattgcaaatgttgtgtatctcataggatatagtgtttttagatcgaaccggttcaagatattatagcgtttagttctatactatttagtttcattctatactgttttatttgtgtattttagacaaacattcattattttaaataatttatatttcattttaaacatttaaatcatgttatacaaagaaaaaattctatgtttgtttaaaaaaactattgcaaaatttaatcagttatttttatgagactaattcaacatttaaaatcatttgggataatattagtttggtcatgtcatcaatattctctcttcttatacacacgttaccatgtcttctttttcctcccactacgcgtgtccttcactcatgtcccatttcatatttttcccttgtctcttgtcaatattcttaattttacaatggattttggttatagagcaaattcacccatatatctttctatgttattcgtttttcttttttttcgctctaaaagttttttaagcaacccattttcaattctcactagggtataatgttttccaaaa

SEQ ID NO: 6657 - DNA, 882 bp, Arabidopsis thaliana landsberg
aaaccaaatcacatcaacaaaaaagatggatgatatattctatattttgtttactatttccaattttgctcctttgtctctgctctcatcttctctctcccccctctctttctcgatattttttctccacttttcttcttcccctcattgttcacaatcgaactgtcacaattcctctctctctctttctctctctctcctaaatccgtttgcatcaccaaggcaatagaatctccaacggacaatcactcatatccttgacatcaatgtttagtctattaaagattccaacttctttgatttgcccagaaaatgtttctgtaattctattaacttatcctacaaacaaacaaaccaattcattcgatttcgatttgtttgtctatttaaactattgattaacgaatgggtaaaaaaaattgtcagaatcttaccatcgtcaacgtcaccgctacggtttaccttggttatttgggttgtcaatgttgtatcttagggtatagtgttttttgatcaaagcggtttaattcggtcatttggattgtctacgttttgttctatactatttagtttcattctatactattttatttgtctgttttatacaaacattatccactattttaaataatttatattagattttaaaatttttaatcatgttatacttagaaaaaaatctatgtttttataaaactattgcaaaatttaatcagttatttttatagcactaattcaacaattaaaatcatttggggtaatattaatttttataacattagattattctctctcttcttccacatatctcatcacgtcctctttagcgcgtgtctttcaccgttgaatcattttgtctttttattactccaatgtgttagt

SEQ ID NO: 6658 - DNA, 709 bp, Arabidopsis thaliana landsberg
cacgctacagttaatcttggttatttgggttgccaatgttgtatcttagggtatagtattttttgatcaaagcggtttaattcagtcatttggatctacgttttgttctatactacttagtttcattctatactattttatttgtctgttttatacaaacattattcagtaccttaaataatttgtattaaattataaaaaatttaatcatgttatactcagaaaaaaatttatgtttttataaaattattttaaaatttaattagttatttttatagcactaatttaataattaaaatcatttggagtaatattatttttttaacattggattattctctctttttccacacatctcatcacgtcctctttaccgcatgtctctcactgttgtaccattttatcttttcactacttcaatgtgttagtttcttaatatttttgaatattgtgctatattattaattttatattagattttggttatacaccaaattcacacaatgttgaaatatatgaaaaaataatttttaattctaaaatctcagtctttctttttaaatattgttttgcctttcctaagatcatcgagagagaagaaaagggaaaacaaaggatcttccatgggcgatcgctgagaagatccgcaagaacaaacacatcaaattccttgaaatcaggaatcttattcgatagtctatttgagccc

SEQ ID NO: 6659 - DNA, 1115 bp, Arabidopsis thaliana landsberg
tctctctctctcctctctctctctctctctctctctctctctctctctctaaatccgtttacatcaccaatgacatcaatgtttagtctattaaaagattccaacttctttgatttgcccagaaaatgtttctgtaattctattaacttatcctacaaacaaaccaattcattcgatttcgatttgtttgtctatttaaactaatgattaacgaatggctaaaaaaaattgtccgaatcttaccatcgtcaacgtcaccgctacagttaatcttgattatttgggttgccaatgttgtatcttagggtatagtatttttttatcaaagcggtttaattcagtcatttggattgtctacgttttgttctatactatttagtttcattctatactattttatttgtctgttttatacaaacattattcactattttaaataatttgtattagattgtaaaatttttaatcatgttatactcagaaaaaatctatttttttataaaactattgtaaaatttaattagttatttttatagcactaattcaacaattaaaatcatttggggtaatattaatttttataacattggattattctctctcttcttccacacatctcatcacgtcctctttagcgcgtgtctctcactgttgtaccattttgtcttttcactacttcaatgtgttagtttcttaatatttttgaatatggtgctatattattaattttagattggattttggttatacaggaaattcacccaaaaataaatggcctagtctgaagcaaaaaacaaaaactaatggctaattgttattgctctcggcaacaacgccaaattgatctagtgattttacccaataacttactgaacctcaaggagcaatgaaccaacacactaggaatacacaaaattatcaagtttatggaatttaagctaacaagattggaattatgattcactaacaacctattcaaaatgaccaagagaaacaagattaaagcaaaacaaaacataactaaacaaaatcaaaagattaataggataagaaagtcaatgaaacgaaaaataataattcaaagacggtttcacaatcaagattaaacaagcacc

SEQ ID NO: 6660 - DNA, 1469 bp, Arabidopsis thaliana landsberg
tgtttttttaagttttttatttaaaacattcttataggtatcaataatataataattaagtttgcataaataagagttggtaattaatggtcatgttcatgtaaacgttttagctgttaaaccttatttaacagcatttttaaaattctttaattccttcttcttaacaatgtagcatcgataaaatcaacaaaacacggactatgtagctaacaagatttctgtacctaaaatttcctaactaactgtacattcgttcgattgtagggacatttttgtccgaaaaggctattctgtaagaactgaatctaattttgctaaaaccaggttaagaaaacatggtaaagtggcttatggcctgaaagtcgtcattttctattcgagttcaatcatatagggccgtggtaatatgtagtattttgtcgcgacccaatcattgacgagaaaaaaaaaaagacaattgtcaagagatactcgatgtgaataccttcttattaatcatcaaaacaaaaccaaaattaatacatacatatagaaaaaagcaagagaaaacacagatcaagtgtttccaaaaggaccaaaaccgaacaaagtttggtttgtgattcactaaactttgggttatccatagtatatacggaattatcctcgccgtacgtcaccgtcgcctcacttcaccattgggtaaaggtcctccgacaatctcaattctccgaccaacaccaaaggcttcgaaagaaacatatcatgactcgattccataagctcgacacgtgtctcacttcctgctagtttccacttaaacccttgcaaaagcctcgctagcatcatggtcgttatcgccgtacctaacgccggagcagcacatcctctctttccggtactaaacgagataaaacggagatcattctccgtcaaagtcacttccgaacactcattgagatgcctttctggtttgaagctaagtggatcagaccaaaccttggggttacgaccaagaccgtaacggctaagtaaaacttgacttcctttaggaatatggtaacctgcgacggtcgtatcagagagtgccacgtgtgggaggttgaaggcggcgacgggatgaagacggaaagcttctcggataatagctttaacatagttaagttttggtatatcggattcttggacgaatctttcttttccgacgactctatcgatctcttccatagctttgtggaggatctccggtttgtttatcatctccgcaatggcccattccacggcgtttgatgggttgtctggcgccgccattacaagttcctataaaattaatatgtaaaatattttcattagtttaagcaagttgacaattaataaatgattcttatcttataaccaaaaagataaagattcttatcggtttactgttctatgcatggactcgtggtcaacatgctttatgctacacataaaatatcgttggatat

SEQ ID NO: 6661 - DNA, 1036 bp, Arabidopsis thaliana landsberg
tgatatttgtgaggcttttgcaatgctttaagtggaaattaaactagcagattgtgagacactgttgaaccaagaattcacacaatatatttgtttaaaaaagggaaaagaaatctaatcaattctcttgctgttgatttggtctaaaacttgattcaacgagattagagattgctttgaaaacaagttagggtttgctaaagaacaataaataatattaagttttttttgtattaagttgcatatcctttgaatagaggacaaattccctctatttaattatactactaaaagacggttcagcgataaactcaacttccttactcttcgagtttgaatctttgatttttgttcgcttctcagaataggtagttttactttcttacgagtttagaagtcggttaagcgacctcccaaacgggaaacaggccaaaggcgacctgttattggggttttgctcaccagcccattaacatgcttcgtcgggattctccggtctttccgaactgtttagttttttttatttgaatccttctctgtttaggtcagagatgttggagagtgtttaaccctgcactaacaaacacatgtcgagcttatggaatcgagtcttgatataattctttcgaagcctttggttatggttggagaattgagattgtcggacagccagatgatctttacccaatggtcatcgtaaaatgtatggcaacacacgttggaagtaatggaattatacaagttattgattgtgaacgaaacctattccaattttaattagagttaaagattgatccatggtatatcgtggaacgttatttttactaaaaaatttaaaaaaagttattttaataaacattatctatatatataatctattcgagaggcatatataatttggatcttatacatttagcgtgtgtaaattacgtattattgtatattattgtatgttggttgttgtatattggagtataattgaaattatctatgtagattttccaaatctttaaattaataagtcgactatagaaaa

SEQ ID NO: 6662 - DNA, 5394 bp, Arabidopsis thaliana landsberg
gctctcagcaaattttgttaattaaatatcagattcagctcataacatgtgaatggtaagtaagctgaaatcaaaatgttcagtaatgtagtctgattgtgcctcctcccacgtgactatagactactatcacttggaattatcattggaaaagtcattacctgaaatctaccatagagctatcaacatcacatcttccttgccatgttttatacattctgaggctccgaatggtgactgcgttttgcggtgcgggagaagtgcggtgcggttcaaataggaacgaaaatacatagatacatatgtatatgtaaagattttgatacgttacagcactgttgcggtacggttttggttaccattcacagcctgagtatcaccacctacttttgtttgtcatctgtcaaaacatgaatctcaaacatgtagagaagcaaaggaggtgtttgcatcaatggcgagggatgactctagcatctctaagcctcattcgcgaatgattattgccttatcgggcatgcgtggccaaattaccaagcctttaagggtccatgtggtaggtaaccgtccttacccattattcaaacttttgtacatcccaagatccgacccaccgtaccaagacttagactaggagtttacacaacacgatttacttaaaactaatttacgctatgaactacatgattcgagtaggaaatacaaaaagtgaatcgtaaaatatctcattcaagtttgctacatctgattcaatattttaacccaaagaatgcatccattgagagagagagagaggaccaatacaagaaaacaaacatgtcaactcaacaacatttacacgcccccaaaatcatctcatcaacaactggagactctacaaaatagaaagcttttggaaaagcagagctgaaaagagaagatcaaaagttattgaccattcaccttcttaacaaatgtaagatgggtttggtttcaatagctgccatgagatctcgctgatgaaacagactgagctgacactgaagcagtcggactgtggacatccccgttgttgccctttgtcttgccactcaatctttccatcgcatccacacatatgtcattgaaccaatcgtcttctggcagctcactgcacatcattcacaaccacattttaatcatttatacttaccataaaggctaaaacattgcaaaacaccctcaaaaccgatgtacctatatggatctatccctgttgcagtgaaagctgctaaggctttagatattatctcattagttcccctgtgcaaattcctcgataggtagcgaccttgggatgcaaagcatatgacaaacttcatgtccaaatacagctgtgacagatgcaggttgtttgttaacaaaggtacacaacaatttcgatgctcgctgaatatacatatacagaagcaagaatgagtgtacaaacctgccgtaggccaagaggtcccaaaggtcgaggaccttcctcaatgtcatcccaaaagctctggtctccagaaagccataagatcacagtctctgttaatcgcatcaacaaagatgtggcgaatctttctcttcctacaaacatatctgctgctagacttgccatcctgttaagtttggcaaaaagttcctgtttttcaacgacgcaacacccaaagtataagaatattaagctaaaaaagacagaaaaaaatcatgttcttgaagtggacagtagactatgacaaacatggattcaactctacagtatccaatctgccaataagagttcccaagtgactacacatctgggtacagtacttcataaaggctaactggactgatggaaatgaaacaacaactacctggaatatcagagatggaaagaagtccacatcctcgccattttcatctatgtttatgtacatatccgcagacagatggctatctccttcctcagtaaaaatgagatccaaggcatgctggcgacaaaacgcatcttttaacttgtcaacagtactaagtaaacgcctcttccattctcgttgttcaggattacgattttgtctgtccaaaggtctccttaggtcgtctgtcctctgaccagtctgatcaagagagagtttcatggcagcacgtggaagtaattcatccgctagcaatgatgcatttgcgagtaatgcaagttggtttgcctccgtctcagccatttggacaatcttattacatgaactttcaaaatttggatcttcttcttctatcgaaccaggaagtgctcttaccagcacatctacatatgagttaaacacccgaaacagaccttccagagctttacttcccaattgcatacttagcagaggtcctacgtcctcaaagaagtcctgcaacaaaataccattatcaaaaggatctacttgacaaatacatccaaagttcatgacagtccacttgggaatcctctgcctatcagagcagctaagacagaattggtactgcctagagtttataataatttttcagtgggaacgcgagtgcaagttctaatcaatcgtcatcaacgatggctagtcaattttacagctgatgtgtaaactcataatataagcaattttcatgggatactggcatatctaagagacacaccagacgtctaagagtgaaaaatatttcatttttctaggcatgtctgcatttcctaagcactttatttttctagcacaactttagaaaaaggctgaaaatttcggagaaaagtgtttgtcaagatagtctacctggaccatgagattaaaccggtgggcactggatgtaagcttattctgaaatgctgtactagcatgacgactaccagcaggaggacttgtcagtacccaatcatctgcagcagccatagctgcagtgttttcttcaattcgcttaagatttgcctccaatgcctgttccacaataggcttaaagtgctttaaaagcactgggcaaagggacaaaccacgagcttccaacaaagaacaatgcccaagagctatctgtgcacactctgcggcagctcttagtcctcccgctgctgcagaagaagctaatgcatgccttttaacaagaagggaaaacgcctctgtttgcttagtagcccaagtcacgagttcagaactatatgctggctctttcccaaagattcccaatgagtcactagaagcttgagagatagctgagaacacaagctgagaaagtgcagcagtgtacgcccctccatatgaggtgctagaaggacgaagactttgcatgttgtattgatatctctggaaatgggcatcaagaagtacagtatgggctcgaggaccatcgccaagccttttgagagctgctatggctgaccgaagttccccacctcgagttgaaggttgacaagcagccttggcaagttggtcagctaatttttgcttgcgttcggcaatagcaaactgaagagatgaaagtacagaagagcttaaagtatgcttttcgtttgcttgagatactaaaatttctccctcatcaaaagctgccagagcttcatccacccttctttcagctaataaagcatcaaggtggtcaggaaattccgtagcccatttctccagatcagagaggccgttgtcctcaaaattcaataaaccattcccaagagattcatcagaaactttatcgtcatcaatgttaactccatctgctaagccatggattagagtcgcctgagtggagagaagatttctgatagatgatagctccccttcaagatctgatatctctttagatgtgctgcacagaacagaaaaaagtttaattttcaaaataacacaccgccaagaaaaaacaataaggtagtcccaggaaaaagaagtcatatgcaaaacgcaaatgcaccaatacccacaagaaatgaaataacttgaaaaagtagagctttattatcacatcaacttcaaagaaaataaccaagcactaaaaacagacaggatatcagctaaccgtataaaggctggataattagcataaacacttcgccgcatttcttcagcagatgctctcttcaaatccaatagatacgagcataactgctttatatcctgtgaaccgaacagaaatatgtcatcatcccaaaataactgagaaaaaacaaagagtccagccaagtaatccaacaatctatgttaaccaaatcaaacactactctttttgtagtaaactctagaaggcctaaactaacttttccctcagctctctcacaccatcacagaaagtgactacacagacgagacaccctttatacccaataccataaccgaattgaatcttttctgtaacagaaaacgagaacaacagattctgtctctgatacaagacatagtcatccatgtatattcacatgagctacattctgtattacactgaacacatcatttggcaagctaaaagcttataaatgggtactaaacctatcagcatttcttaagagtaacatttttacataatcataattcacaaactgccttcaaactccagaagatcacaagaacaaccatacaagcaatgagtatttttacattgatcatcatcttctcgagcgtataaaatctgctgctacctaatatccattccacaattacgatttcctacagctaaaacgaaatgcaacaaaacaagaacactgcgatgatacaatcccaaatctacgaacaagtccccacagactcagtcctagaaaattctcactcgtgataacaacaaatcaacgagaataagaacacgaaatgataaaagaacagaaaaaaaccttctcgttgatagaacatttggattgcacataagcatcagcatcgaacttatcagacttgaacagactcaatccttcctcgactctgacaccattttccttcgtcggcgtagcttttgatctggccgtcttcgccgccatcgttaaacttgcctgtcttctcagagaaaacctaaaatttcacagcggttccagatcagcaatcccagtgatgccggtaatgttaccggagaattaagcacagatctgagggagctcctagagacggagagcagatagagaaagtgggtagaagaagatgatgatcgagttggcaaccagagcgatttagccaacgacggtagcttggctttttcgtctgcttaaacaaacgaattttcttgttgaaaactaataaataaaataactgtgggttttttttgctgcattttttactagtaaacggcaacacataaaccctgtcatttgcgcgcaggctttccttaatccttcacctgggccatcacttgagctaatcagaaaccgttttaaagaatgctaactttaagatagccgttaatgtaaatctgagcaaaatcctttaagaatcagatcttcct

SEQ ID NO: 6663 - DNA, 2993 bp, Arabidopsis thaliana landsberg
cttaccttctttatgcattttaaactgttgtggctttagttataaactcatgtcttctcttcatggtgttgtagggtttctatggtccttacatgggtcaacagtaccttcaggtttatggagtacctggggcagttaactcaccgggttatcaatatgggcaactgagccatactattcctggtgctcacggttatacagcgggtcaaggttattcacatccaggaagtcatgttctacagcttggtgccacttcacctatgtctgctattcaatctccatacccttctccttcagctccaacgcaccaacgtgtcatcgtccagactcctcctcagtatatacagagtagcggttctgatcagacaacagggtgatcaacgtaagcaaattcttggattcttttttgatggtccaaattggattgaagttcgtacacacttacacgacctcattgttatttatcggttttcagttagtaatccttaaagattgcagaaaagggaagaagtccaggaaaaatgctactctggcaggcttcctgtttaagcttagcacattatttattttcgcattctagaggtaagcttgtttccttaggtgcccttttaagtttcagcacttgcaaatgttttcgatctcacctcattaccgttgttacaggtattaagtagtcttgctcactgaagaagtcaaaaaagggggaaaggagaatggaagtttcagggtttgtgcttctgttatctttaaccctctcatcctatgtatatagcccacaacaagcttgatggcataaactatatgaatagtttcaccccggaaacaagggttttcgcggtaaactggtaggaataagtttggtgtacaaagaaagttcatatatatataaacacatacataaatgcatatagaatggtggaatcaacatctgattcttttgggtggtaaaagtagtcttcttactacacactctcttaaggcatatgagtgttggtaatattactaggtagattctcacgtcctcttgagtcaagtcctctgcattgtaagtaaaaaattaatgactatggagctcacttcagcttctttgtctgtgcataaattttagctccaggattcttctcttttctatgtctgtacagtttctagactgataaattgttcttctcaattgtttctgtctatgactcctatcttctactctgattcctctgtttatactccatttatcacttcgtttaccacttgctttcaagatgatagattcgagtttttagttaaattcatcgtcatttaaaccatttttaaagagtccaatttttgggggtggatgtaattacgtttccttctttgatccatcaaagtaaaaattgatcaacacataattaaaaggattacataatgaggtagtggcatagtaatgatgttttgatgtccgagaaaactgatttagagatagtttagtcagcacaaacaagattaatgttcccattttcctacaacttcctctcgtttaaaagaataagctttatcaatgagaataagacatacaaaacatttgggccttatactttttaaaaggcccaaaagtgcttcaacaagacggcacgtggtgagccaggtgacaagtgatacctccaaatgcggttatttgcgggacccacgtggtagccacgtgtagcaagcaaaggacccccatcctcttttgcatttttctccttacaccaaacatttctttctcgcagagaaatctctcttctcttcacctccatcatcctcctcaacccaaaaacatcacgacgaaattaaaaaaggtaaaatctgccactgagaattttttctcatgcttaagcttcgaatttcttctcgttttttctccatgaatgttgcttgaattttcacaatcgctggacttgtaaggttgaaattgcataatccctatttatcttctgtggtgggaacaatgtgggatcgatttttgctgtaaaaagtacaaactggttcgtattcaagcgtagtaacctttagatttaaggaaaattgttgactttgagctaactagtgaaaaattgttggattgcgatattttctgggtaaaaattggttttttttttttttttgtattgtgaagagtatatatgaagcagagttactaatctttctcaaaatatcaacatagtcttttcaaatgtagattttgctgttaataagtgaagtttttagggtttaatttgaagatgttttctccttagtaatgataaggcaaaacattatggagactaaagtcattgttagaaaagggttaaacttaagagatctagggactaaaatgatggagattttcaatgctatgactaaattggcaaatttgagacacttaattatgtcctgtaactatgtttttggaatgtccttattgcttccatttgtgacaatgttgccactttcatatgtaatgcaggttcattgatatcgaagatatgagtctgtatagcgacggattatcgagtgatcagtatttcttggttaatttcatcatgagcaactacttgggtcctgatgtctattctgataacccaagatgttcatcttctcaaagattagctagaggtttgccaccttacactttgatgcacattggatcttcctctctaactgtttcccagctacagaacttgtactataatgtactcagaaacgccaagtccagcctccttcttcatccagacatgatttatatgtatctcaagggatatctaccattggaaccaagtggaaagtttcctcagttcacgcattttttcccgacgaatcttcacccgcagaaaaggtattccccgagccacgagattgtgaaaggaattgttgttattgatgatcctgcagtagggttcataaacaaggaagaactcccaaggctcagatgcttgtcgcgtttggacaaaatgaaaatcgatagagtcacgtctttatctcttcgggttaatctggat

SEQ ID NO: 6664 - DNA, 1411 bp, Arabidopsis thaliana landsberg
cattctcgtgagaaatgttctggatactctagctttatataatctatgcttacaagttatagctagtttcgtgataaattagtgtaagaatctgctcattgttctgtttataagctgagttaatctttccactagctggtaagttagtgcagaggccatttcattgattgtctctgaagatttaatatgatggtattgtgtatttgctcatttctaggtttcaagaataacaatggaaggaagcggtggtgacagtggttcgatggctacgcctgtacaaaagaaagtacatgaggcatggagggtttaccaatattatctggacaagactacacctcattcaactaacaggtggatcggaacacttgttgtctttcttatctactgtttgagggtttactctattcacggattctacatcatctcctatggtcttggaatctacctcctgaatctgcttatcgggtttttgtctcctcttgttgatcctgagctcgaggtatctgatggagctactctgcctactcgaggttctgatgagttcaagccatttatccgccgtctcccggagtttaaattctggtaccttattccctatctcctaactgcttatgctatcattttcgttgtgataaagtcggatttaaaattctattagcattcaggtggttaaaccatatgccatcttcctaaccaagttgtgctactaatgtttgtgttgcattgtcataatctgttgtggcactattgcagttaaatattattgctcagttttttttttcgttctaagagcttcccgactacacacagtagcttcttcatttttggtgacaatgtgattgaatctgtggcaggtactccatgactaaggcattctgcatagcctttcttatgacattcttctcggtgtttgatgttcccgtcttctggcccatactgctttgctactgggtcgttctctttgtcctcaccatgagacgccaaatagcccacatgatcaagcacaagtacattcctttcagcatcggaaaacaggtaactcgtttttcacaactttgattttcaaacttcgcttagtaataaattaaacacatttcaattgtctattgaatcctgcgaacgtctctgcaaattcattcacattcatagctacagagtttgaggttagttgctaatttgatctcaaacgtttgatctgtgtggcagaaatatagcggccggaaatcttctgcgaacagcggtggcggctctcgtgctgattgattgcaacttgcagccacattttctgcagaaaaagaatgaaaaaaagttgggttttcacgttggaacgttttgtagtgatgacattactagtattgttgtgcttctacaatgaagaagaaggaaacagaaaagggtcattagtttttat

SEQ ID NO: 6665 - DNA, 2496 bp, Arabidopsis thaliana landsberg
cctccggtatatatgtgatcgaatagtattacattttttcgttgttgatgtgttctaacagtggtaacattgtggaattccagaagtatcggatatatctgagacggcttggaggagtatcgcaacaccaaggaattatgaaccattcgtttatgactggtcaagatcagagttttggacctctttcttcgttgaatggatttgatcttcaatctttagctgttactggtcagctccctcctcagagccttgcacagcttcaagcagctggtcttggccggcctacactcgctaaaccagggatgtcggtttctccccttgtagatcagagaagcatcttcaactttgaaaacccaaaaataagatttggagacggacatggtcagacgatgaacaatggaaatttgcttcatggtgtcccaacgggtagtcacatgcgtgtgcgtcctggacagaatgttcagagcagcggaatgatgttgccagtagcagaccagctacctcgaggaggaccatcgatgctaccatccctcgggcaacagccgatattgtcaagcagcgtttcaagaagaagcgatctcactggtgcgctggcggttagaaacagtatccccgagaccaacagcagagtgttaccaactactcactcggtcttcaataacttccccgcggatctacctcgcagcagcttcccgttggcaagtgccccagggatttcagttccagtatcagtttcttaccaagaagaggtcaacagctcggatgcaaaaggaggttcatcagctgctactgctggatttggtaacccaagctacgacatatttaacgattttccgcagcaccaacagcacaacaagaacatcagcaataaactaaacgattgggatctgcggaatatgggattggtcttcagttccaatcaggacgcagcaactgcaaccgcaaccgcagcattttccacttcggaagcatactcttcgtcttctacgcagagaaaaagacgggaaacggacgcaacagttgtgggtgagcatgggcagaacctgcagtcaccgagccggaatctgtatcatctgaaccacgtttttatggacggtggttcagtcagagtgaagtcagaaagagtggcggagacagtgacttgtcctccagcaaatacattgtttcacgagcagtataatcaagaagatctgatgagcgcatttctcaaacaggtttgattattactcgaatacagtgcactctaaaacagccatgaattgatagcttgacacttacttcattgtcatgcgtaaatgcaggaaggcatcccatccgtagataacgagttcgaatttgacggatactccatcgataatatccaggtctgactacagaaactcagactagactgcaagattctttgtttttcttctccctccttcgaggtacaaagctcaaaacatggcaataaccgaagggaaagatagaaacgatcatgtgttgtatctttagatgataatctgcaggaaattccaaaagcaggttttagaagacaataattgttttcgttttggttattaggagtaatgtgaatttccttgtttctacatctgtctaggtcttacaacaagactcttgacatttagggttcttgatcgtctaatttcctataattagaaatgttttgcttctctctttttgagttttaggaacattttgtgtaaatatgtttctatgcgttgttgcttcataataataaagatacggtatttgatccgttcaatcaacaaaaatccacaaaactagccttgaccagttctgctattttctgagcctttaccagttttactacagtgtatttgcttctcagacaagaactggttggttcggttatttgtgaacttatatgaataccggtttggaggattaggaacaaactaatggcggagaatgagtaaacaaaatatagtaatacatactgattagtgattactgacattctctaatcataaacaatacaagaatggtaacatatcttcatagcacctatataaagcttgttccaacactcatcaggttgaaaaagaatcgagtgattctccatccataaactgcggattggacccgttctcgagtaagccggggaagaatcaagaaactgtatcgccaacccaacgggaggcttcagtgtagttacgcccgcagaatcaagagagccaaaacaggtaatgccaggaggaaaacacagatgtgtttccggtgttggctacttctcattgggagtatggttgggagagagcactcctcaccgttgaagaacactttgctcgggaagccatctccaccagggacattgattccaggagtcagtttcttagtaaaggacataacagattgttgttttcctggaatccgaggattcttcaatggattttccccgtctctttctgcggcgagataattcaataaaggagggccctccataaaaatagtgttgttcttcccgttgatacc

SEQ ID NO: 6666 - DNA, 2571 bp, Arabidopsis thaliana landsberg
ttcacccagccggagttgaatctaaggcaaagaaggtggatggagcttgtggcggattacgacttggatatagcgtaccatccgggcaaggccaaccaagtcgccgacgccctgagtaggaggcgctcggaagttgaggcggaacggagccaagtggacttggttaacatgatggggacattgcatgtgaatgccttgtctaaagaagttgaacccttagggttgggagctgccgatcaggccgacctgcttagtaggatcaggctggctcaggaacgggacgaggagataaaaggatgggcactaaacaataagaccgagtaccaaacctcgaacaatggtacaatcgtggtgaacggtcgagtatgtgtgccgaacgatagggcattaaaggaggagatcctaagagaggcccatcaatcgaagttctcaatccatcctgggtcgaacaagatgtaccgtgaccttaaaaggtactaccattgggtaggaatgaagaaagacgtggccagatgggtggccaagtgcccgacttgtcaactggtcaaagcggagcatcaagtaccaagtgggttgttacaaaacctacctataccggaatggaagtgggaccacataacgatggacttcgtcaccggactgccaacggggatcaagtccaaacacaatgcggtatgggttgtggtagaccgattgactaagtctgcgcacttcatggcgatctcggataaggatggagcagaaatcattgccgagaagtatatagacgagatcgtgcggttacatgggattccggttagtatagtgtcagaccgagacacaaggttcacgtcaaagttttggaaggctttccaaaaggccttaggaactcgagtgaacctaagtactgcctaccacccacagacggacggacagtccgaacgaacgattcaaaccctcgaggacatgttgagggcatgcgtcttagattggggaggaaactgggagaaatatctaaggttagtagagtttgcatacaataatagttttcaagctagtattggtatgtctccctatgaggcgttgtatggccgagcttgtagaacaccgttgtgttggacgcccgtgggcgaacgtcggttgtttggacctacgatcgtggatgaaaccacggagagaatgaagttcttaaaaatcaagttaaaggaagcccaagatcgacagaaaagctacgccaacaaacgtcgaaaggaattggaattccaagtaggagatttggtgtacttaaaggcgatgacctacaaaggggcagggcgattcacctcaaggaaaaagttaagcccaaggtatgttggcccgtacaaggtgatcgaacgagtaggggcggtggcatacaaacttgaccttcctccaaaattaagtgcgtttcacaacgtcttccatgtgtcacaattacggaagtgtttaagtgatcaagaagaaagcgtggaagatatacctcccgggttaaaggaaaatatgacggtggaagcatggccggtacggatcatggaccgaatgacgaaagggactcggggaaaatcaagggatttgttaaaagtcttgtggaattgtggagaccgtgaggaatacacttgggaaaccgagaataagatgaaggccaattttccggagtggttcaaggagatgggtaaagatcaacttgatgcggattcgaggacgaatccaattcaagggggggagacttgtaacgcccgcgatcctcaataggatcgttggctaggacttggtccgagagaggaaggtggagtctcggacaagtgagaaggagctggccataagctcggacaaaggggaaatcatgcaggctaagctaggatcataaagaaatcacatgggtcagctcgcccaaagctcaagctcagctggaaggagtgacggttactcaggtcgagtgacagtccagctcgggcagctggacgagtaacagttgagctcgaggtagctggacgagtgacggacgagctcgaggcagctggacgagtgacggttgagctcgaggtggctggacgagtgacggacgagctcgaggtagctggacgagtgacggacgaactgggcggttatgggcgaagagatgcaactcttcggaagggcgcaactcttcggaaaggtgcaactcttcggaaaggtgcaaggaacggatgtgttgattcgggaagcatccattcgccccctatataaggaagggcgcccaggaccattccactcaccacaacacaccgaaaacacagagaaactcaccattaaaactctctccctcttgggagaataaatagtcttaggattcggtagccgggctgtggccggcaataaagaaggagggtcggatcgacctaacctcgagaaggaaggtaagggatcctagactttgagtctaagggttctaggatgtgagttagtagtcggatccttgaaaggatcgactagaggtctgggtagtatccgggtcatgtgcatcctacacaagacacggtccgggtagggattggctgaggcgggtacgcggctcggcggaggacggacgggctt

SEQ ID NO: 6667 - DNA, 1677 bp, Arabidopsis thaliana landsberg
agctaaattgctaggtgaagcctagaatttttttgtgttggaggctcgggaaccattatctgaagcttaggcagaaaatgcccaaagaagggtataagtgtgaacttttcaaatctgagtagaatggtagtctgaactaggaatcaagaaagggtaaatgtaaacgaagcttgaatggtaaattgcaaggaaaaaaggaatatgaacaagttggtttatcagagataccacaatcgctgagcatcggaacgacaaagtgttgtcctcgccgttgacactcacatatcatcaaagcgttcggcgtccatttaattttgggtgtttaattaccataaaacgatgggcctagatataggcctagttatgggcctaactttaatattatacacacatcaaagcgttcggcgtccatttgacttgggtgtttaattatcaacttgctttagcaacgactttgacgagaaatgagatgtattaggcccaatataaaatacgagcttgcttaccaaaatttgagacccaaatagtaaaccaatctcctccagaatgcaagtggacacaaatccccaagagaaacagaatcaaaatctcaagaaaacctattagccctgtttccagcaagagggcagagaagcagagagagagagagagtgtgagagagaaagcagcttcttcttcttctcctcctcttctcccttatgtggatttcaaatccttctctgctactctctcttcacatttctctaccaacattcttcttctgacactcaacacacacactgcaacttccacagcttaatctagcaacaccaagtcaaaatccgccactaacgatgcttcttcaaaacttctccaacaccattttccttctctgcctcttcttcacactcctctccgccactaaacccctaaatctcactctccctcaccaacacccttcccctgattccgtcgctctccatgtcatcaggtaaacaaaagctcctccctctctcattacacattttcccagataaaataaaaactcaaactttcttctccgaaattcacaggagtgtaaatgaatctcttgcaagaagacaactaagctcaccatcatcatcctcatcatcatcatcctcctcatcatcatcctcttgccgtaccggaaacccaatcgacgattgctggagatgcagcgacgcagactggtcaacaaaccgacaaagactagcagactgttcaatcggcttcggacacggcacactcggaggcaaaaacggcaagatctacgtcgtaactgactcatccgacaacaacccaacaaacccaacaccaggaacactccgttacggcgtaatccaagaagagccactctggatcgtcttctcttcaaacatgctcatcagactaaaacaagaactcatcatcaacagctacaaaaccttagatggtcgtggctcagccgttcacattaccggaaacggttgcttaactctccaatacgttcaacacatcatcatccacaacctccatatctatgactgtaaaccttcagctggattcgagaaacgtggtagatccgatggagatgggatctcaatcttcggatctcagaagatatgggttgatcattgttcaatgagtcattgcaccgacgggcttattgatgctgtgatgggttctacagctattacc

SEQ ID NO: 6668 - DNA, 1434 bp, Arabidopsis thaliana landsberg
caaacaaatataaggtttatgatcgagtttctaaaaccaaaagagtgaaaccggataaaatgcaaccgaaaggataaggagatatcatgtctcttacctaatcatctacttaaaaaagttatttgtttttcaccaaatttaagttctcacatgtatatagtatgtatatactcaattcatatctaacataaaatttatattggaaagtcgacaaaaaagtatatatatatatatatgggaaaaatataaacacactgtagctgtttttcccctaacgacgaatatattaagtcaaagacaatgaaaatagaagaagaataaatactttgataatgatagctatgtttaaaagaagattatattagcacaacaattatctttttggaggcaatcaattaggtatcttcaaacatttccaagcaaaccttgttcaaatgatggtgcatgtcaattgttttgtagatgcaaatttggagctttggtgctaactaaaccaatcaatatcttgagcttgtatcttacaccacatttcagtgtcacataagtatttggaatttctttacaccttagagagattaaatcttgtttgcattatcatcatcaaatagaatcatttatggttttcttcaaaagtcaaatattatattatgtcaaaaacttgccgtataaggaactcgttcttattaatcctcaccaattatcaccataatattcttccgtttttacacaaaaactgaattttaactgctgaaagaatactctttatccactgattcagagccagagcaggaccagtcgaaagcaggtgatgcataggtaccgttgagtataacttgagccatcttctggtgtgtggcctcggttaaatgataaccgtcccaattcacatattcagaaggattttgacaacagctaactcctctgtgtccacactctttaccaatagtgaagttgtattgacctccgactccgcaacaagcagccaaaggtctgttcttaaaccctaaaaaaggaaccataaaacgttggtcaagagatcaaccgatggtcaatgccaacaaatttagaaacaaacggaccatatttgactggttcttgatataaccggaacaaagagttgtagtagtcggcgtaaatgatattgacatgatcgtatagttcttggagtcttttgagttctgtcttgagctgttcgttgtggtactctccgaattcattgagccgtgggatacaacctgtgaaagggtcgtggtcttcttctgccgcggtctgaaatagagtgagatacgcgggatagcatcctaatgggaagtttccagggaccagaaacgttttgccccctaacccaatcaaatcctgtagttttgttgccttattagaaaaaattagtcgtttttaaggggagggggagggaaatatgtgaagatgtgttcc

SEQ ID NO: 6669 - DNA, 712 bp, Arabidopsis thaliana landsberg
ttcttctgctattgtggtaacaaatcttaacattgccctcccctcaaaaatgtgtgtttcaaattttaacaaattaattaagtaataaaactacaggatttgattgatttgggaggaaaaacattcctggtacccggaaacttcccaataggatgttccacggcatatcttactctatttcagaccgcgacagtagaacacgacccttttacaggttgtatcccatggcttaacaaattcggagagcaccataacgaacaacttaagatagaactcaaacaactccaaaaactctaccctcatgtcaacatcatttacgccgactactacaactctttgtacggactttttcaagaaccagccaaatatggtatgcgccttctaaagcttctaactttgaccctcacgtacggtttaattcgttaacccatgttttatgaattatggtccctttttaggttttaagaacagacctttggctgcttgttgtggagtcggaggtcaatacaacttcactattggtaaagagtgtggagaaacggagttagctattgtcaaaatccttctgagtatgtgaattgggatggttatcatttaaccgaagccacgtaccagaagatggctcagggtttactcaatggtcgctaaacaaatcctgctttcgactggtcctgccttggctcttatgatttcagtggataaagatgattta

SEQ ID NO: 6670 - DNA, 665 bp, Arabidopsis thaliana landsberg
gaacaaatcttaacattgccctcctttagtcacattttacaatcacattatatttgtgggttatatgggaaaaaattaacacaaaactacaggatttgatcgatttagggggcaaaacatttttggtacccggaggcttcccaacaggatgttctgcggcgtatcttactctatttcagaccgtggcagaaaaagaccaggaccctttaacaggttgttacccattgctcaacgaatttggcgagcaccacaacgaacagctaaagacagaactcaagcgactccaaaaattctatcctcatgtcaacatcatttacgctgactaccacaactccttataccggttttatcaagaaccagctaaatatggtccgtgccacttaaaaactttgtctttgaccctcacggtttaattcattaaccgataatttgttttgtctttttcattaggatttaagaacagacctttgtctgcttgttgtggagtcggaggtcaatacaacttcactattggtaatgagtgtggatatgaaggagtaagctattgtcaaaatccttctgagtatgtgaatgggatggttatcatttaaccgaagccgcctaccaaaagatggctgacggtatactcaacggtccctatgcaactcctgctttcgactggtcct

SEQ ID NO: 6671 - DNA, 1408 bp, Arabidopsis thaliana landsberg
tgtcagtgactcatgatgagatgacgccaaattacaatttctttatctcactcacttttcattagactctttactcttttaaggcttttaaagacaaaactaataaaagagctaattggggaaataaccacaattaattaactaaagccactcttttggattgatacaagcatctaatagtttccattcctcagttccttcttcaggtttctgcatcgcacaacaagagacaaacaccatcagtagttaagtttcattagctaagatgaaacaagatttagtttcttgaatcaagaaactttacatggtcatattctcatctcgcagatagcggaagagaaacaaggatactctctattcgtcctccagtcttcagaccaaatgttgttccgcggtcatacacctttatttttaccatcagcaacaaaacatgagacgaggtttcaagagatatttatacagaaagaaaaacaaagctagtagtatccaattacgaagttgaattcaacatatctgccccttcgcagctgttgccatgccttgtgttgctcgttaaatggtgtgtctttacgtttctctactacgggtatagaagctggtatcactgagcttgcacattctgcaaaattcatctcagtattcaaattagtcaactaggaagtttcttaaaacaaaatgtcacaagttatatcttggtcactaccagtggcgaatgacagaagcatctcttgatcatagtcattcaaatcatcaaaaaatatccctccaagccctcgcctctcatcacggtgctgcaggcaagaccgtaaagttttgagtgttttcaaatcctaggcgacaacttatcactgtatcaacctaaacaaaaccttgaggctctaaatctattcttgcacatacatgactctaaaactaaggtcttttagttccacaaagtgctaagatctcaccaaacaatcagaatagcgttaaaggaactgcagaccttaatgtaaaagtagtcatcacaccatttcttaaaccaagggtagaacgacggatccaatttatcgcaggcttgcttttaaacctacacaaagaaaggtatttcaatcagcatctccataatcacaaagcttcaaactttcagaacaatggatcaggtttaacgaccgaatgaaagtgcttgacgtcttcttcaaagatgtaagcaggtgtgaagtcagtcccaccaccgaaccaccattgcctcggagctccaggaacatctacaagtgatgaaatcaaatgcttcatccaaccaaaaaattggaactttacacttctcaaagaggattaaggtcttaccctttggagcatcggtctcgaaatagcggtaattgaaatgcagagtcggagcaaaagggttcttaggatgcaaaacctagaa

SEQ ID NO: 6672 - DNA, 5028 bp, Arabidopsis thaliana landsberg
gcctttacttaagggtttggtaagtgaggagtcgcccaagttatcagcagaatttagggttgcgatttgcgggtacaaggatggtctgatgtttcagatgaagggaccgattcatgactcagccattacacttttagaggctgagctgatggcattgaagtacggtttaagcgaagccgtgactttggggatcaatcatatctcaatctgctgcgataacaatcagattttcgaatgggtaagtttcccttggccttcacgtctttgcttcaatcttataattgatgttttgctttaaatgttaggtcatggggagatccacgcctcaggaagaaaacattgccatgctaatccgtgatgtgcaaggcatcagaaaacagtttacttctagcatcgctgttctggtgactcgaaatcaagttgaatttgcctataaagttgcaatggaagcaatatgttttaagaccaagatagccttctctgtttcatccggtaaagatagatgtgcctgctctgtttcatccgaaaaagacttgcactatctgtttcgacgatgacatcaatgctgatatgatgttttatattgatcaatgtggtcatatgttttgttccgaatgtgtgaaacgacatattgaggtgagtctacttcagggaagtttgataacatgtcctagttataggtgcaaatctaagctgacttatggaagttgtgttaatattttgacacctaaagtaaaagagatgtggatacaaaggatgggagaggattcgattcctgtaacggatagagtttattgcccaaacccgacgtgctcagctttaatgtcagtaaccgagctcgatcaactcacaggaagtaagagatgctgtgtcaaatgcggtgaatccttttgcatcaagtgcaaagttccgtggcatgataacttgtcgtgcaaacgttacaaaaagttgcattcaaatcgtacaacaaacgataaacagcttaacgaactagcaaatcaggaaagttggcgtcaatgcagcaagtgtaaacatatgattgaacttactcaaggatgcgtccgcgtaatttgcaggtatcatctctaatcacatctcttttcgaatttcttttgtttcgaattgtatgatcacaagttactttataaattggcagatgtggacatgagttttgctatggatgtggagctgatgctggatgttgctctcatggtcatgtaccgtatttttcagttgaacgtcgagagccagaagtccaagcactagtgttaatcggtgttgttgttgttactatgatattcttctttagatagtttaatcagtgcacgtagtttaataaggacttgctttgagcaggaagcgattagactagagttagaccaataacaagagactataaaatttattgcattgagtcttacaagcaggctttagaatttagtgtaacctgaaactgtacgagccaaacttctaaataacatcccacgagattccgaaaacatttagagaaaaagtgaacacataccatttcgcagcgagattccgtgtgtacgagatagagatagagaaaaacctgagatgttaatctcattgtcctaagcttaatgctcttaaccctcaccagcctctcactgattctaaaaactctcaaaataaagagttattcccaattcaattaccccaacatacacaaatacatgaaaacgccttctctaccaaacgctagctcctttatttttacgatactggcgccatgtctttacctttggttgcggctgttgcagctgctgcggcggcggcggctgcagctgctgcagctgctgcggctgctgatgatgctgagctaggggttgatggaggaaccgggttgctttgctttgtaaccacttcttgacgcttttgcagcagtggagagttgagatcggtaagcaattctttaatctgcttaccggacagagtttcgtgctgaagcaaagcatttgcaagggcatgaagctctttgttgtaaaccgtgaggattgtttttgcattgttataagccttttccagaagttgtttcacttcactctcaatgagaagccttgtctcggtgctcatgcttttcccattgtcgtcgtagttatgtgccacaagacccacctctttgctcataccgaatttcgtgaccattgctctcgcgagtttggttgcctgctcaagatcagaagatgcacccgaagttacttcactttccccaaaaatcaactcttcggctacccggcctcccatacaaacatcaagcctagcaagcatctgtttcctagaaatgctcgtctcatctttatctggtagttgagaaaccatgccaagagccataccacgaggcacaatggttgctttgtggactggaagagcaccttcggtgtgaatggcaacaagggcatgaccaccttcatggaaagcagttagctttcttgactcgtcagatataactgcagatttcctctcacttcccatcatgattctgtctttggcaaactcaagatcagacattgtcacatctttagaaccgtccattgcagcttttaaagcagcaacattgaccagattagccaaatcagcgccagaaaatccaggcgttcctctagcgatgatcattaaatcgacatcttcagccttaagtacctgaaaatgcacaataaagacagccaaccaacggttcaaaattcatcccattgctgtattacaagtcactgtgcaaaacctgagctgtctagtacataatttgaagttacctttgacatgtgagactccaaaatctggcgtcgaccttccacgtctgggttaggtacaacaatatgacgatcaaacctcccaggtctaaccagggccttatccaaagactctgggaaatttgttgctgcgaccacaataattccttcattctgtttaaacccatccaactcaacgagcatctggttcaatgtcatcttcatgtattgctggtccttgggattgcgacttcctccaatagcatctatttcatcgataaatataatacacggggagcacttctttgcagcactaaaaagatctctcactcttctggctccaactccaacaaacatctcttcaaactcactaccactgcaggagaagaaaggcactccagcttctccagcaatagctctagcaagcatagtttttcctgtcccaggaggaccgacaagcaacacacccttaggaagctttcctcccagacgagtgaacctctatagtaaagatcaaaagatgaaagagtgaggcctaagaacaaaacagtactaactctagaaaaacctggcacagataattcagaggataaaggtctatatgataacttcacatgatttatgcttttgaatttacatcactagacagattttatacttaactagaaaaacactctagcactgtgaatttactttggggtcgcgaagataatgcacaatttcctctagctcagcctttgcttcatcaacaccctttacatcagaaaatttggtgctcgaatccatactaggttgcacttcttcgtgcaaaccaagtcctaacatgtattaagcataaattaatgagcacaaagtcatttcaatacagctattggatcactgaagaaaacacagccaaactctacctttgccaattcctctgtcctcgataagagctccaatcccagaaatgagtaaaaaaccaactccaatagttcggattgtactccatagctgttctttaaagtgagtcctttctgtggatatcgtatggatcggtgcactagcagttccaaggacaccatcttttgttggttttcctacgtttctaaatgccccaagacctccaaaagtctcttcctcccttgcaacaccagcaatacctaaaagaaaaacagcaaaacatttcccaatattatatagagaaatggctcagaagctgctaatacaaatatgaaagcaaggacacaatccaagtatccattcagattcaaacaaacagtctctccctccttacccacctctttgcaatgttcgaaccagctcactttgatcgagcctatcaactttaaccaatgccttaatgtattccgataacgcagaggcattcgcatgcaaagaaggttggctttcaaacattctgataacagcctcaggatcatttcttcgaataagttctctcagatgtgcaacctcattaacttcttctctatcacggactctgcgagcaaagctaccaacataactcgattgaaacctcgttcgcggtaaagaagctccaccaccacccacagctatagataaaataaaaccaatttacatcaaaaacacttctaaaacaacaagaacaactcataaacggaatcagaatttacctccagtaactcccactctaggaaaagaggagtaagctctaacaagtaagcttcttaaactgctcaattccctttcatgactcgaaacctgtcatcggtgaagagaatcaatacaaatgaagttaattactaatcccaaactcaaaatgacactagacaacacatgaaaacattttgataaaagtgaatacttttacccattttgaatcaaaaaaattgaaactttttataccaatttcaaaattaggtgacttgggtagtcaaataaatcaaatgacaatatcacagagacaatctagaatcctaaaagacaacattttgagggcagagaagaatttgagcttctagggtttgaaaaatatcatctttagcttatgaatcacaaagatcttgataaaacccatcagaaattattatctaattagatcaaatccactacagtatcaaaccaaagtcgaaacctttttcgtattaaaaattggataaaggggaaaagagaaaaatgaaacaaaaaccttggtgatgatgcgcctccaagccatcaatcaaatctctccttcccgatatcttaaaaattggtgttaatgtctgataaatcgaagttcctcgatcgtatatcggaaacaaaagacttctctcgttgt

SEQ ID NO: 6673 - DNA, 1353 bp, Arabidopsis thaliana landsberg
ctatagcaaatattggaaggcggtacgaaagatgacggttgtcgaactctacaccgcaaaaagggtaaaatcgtttcgaaatataagagaagaagaagttgcctccttcgtcgagttcatcaaacattccgcttcgttggaggaaatagttaacttgaaccaaacgttagtgaaactctctgggagtgtaatttgtagagttggttttggaatcaatcttgaagggagcaaacttgagaatacttatgaggaagtcattcatggaaccatggaggtgctagggagttttgcagcatcagattacttcccggttattggtggaataatcgataggatcacggggttacataacaaatgtgagaaggtttttaagggaacagattcatttttcgaccattgtataaagcatcacctagaagatggtggtagtaaagatgatatagttgacttgctgctcaaggtagaaaggggagagattggacttggagagtttcaatttactcgaaaccacaccaaaggaattcttctagtaagtaatggtaacctaccaatctataacattacattattcttttgttaagtaatttgcttattttgataattacaggacattcttcttgctggagtagacacttctggccacacaataacatgggtgatgacacatttgattaaaaacccaagagttatgaagaaagcacaagccgaggtgagagaagtgataaaaaacaaagacaatatcacagaagaagatatagaaggactcgagtatctgaaaatggtggttaaagaaacattaaggataaacccacttgtgccacttctaactccaagagaggcttcaaaagatgtaaagatcggaggttataatattccaaagaaaacatggatccatgttaatatatgggctattcataggaatccaaaagtttggaaagatccagaagctttcattcccgagaggtttatggataaccagattgactataaagggttgaactttgagttgttgccgtttggtagcggaaggagaatatgccctggtattggaatgggtatggccttgatacacttgactcttatcaatcttctttatcgatttgattggaagcttccagaaggaatggaggttgaagatgttgatcttgaagaatcatatggacttgtctgtcctaagaaagttccacttgagttgatcccggtcctcactcaatggacttgattttatattattatagttcatgatgtaataatttggaagtatcttaaagtaaataaacaatcacatgagctgatcccggtacacttattgtcaccacattctaactcgtgttcacgatcctttagcaagcg

SEQ ID NO: 6674 - DNA, 544 bp, Arabidopsis thaliana landsberg
ttttaactttgtcctcgtcttcatattaattttctcttgaagtagaagaacagcttctttcgccatagacttcaaatcatcaggagactctgtagcagtgacagtgataacacagtcatcatcatgatttgtcctcgagtcattaacttcgatatgagacccgcttgcttgtcttattcccttaatggttaatcctcctttcccgataacacgaccaattttggaagaagcgcaaataacttttatagccaacttttctgatctggaagacccaccaaaaccatgaaccacaggaagagcagaagcagaaaaaaccggcagtggatttgcagcattttctccatagccctgaggtagtgtaccgataaacgatgaaacattggccccatgttggaaaatagaatcctgacttgggtataaaccggcttgtggatagatagacagatcagacggaattataatactagcgggaacttcttggacagttgtatccagaggaatctgttctcgaggactgactttgtacatgattgcagaaacagcg

SEQ ID NO: 6675 - DNA, 624 bp, Arabidopsis thaliana landsberg
tggacacttctggccacactgtgacatgggtgatgacacatttgattaaaaacccaagagttatgaagaaagcgcaagccgaggtaagagaagtgatcaaaaacaaagatgatatcacagaagaagatatagaacgactcgaatatttgaaaatggtgattaaagaaacattaaggatcaacccacttgtgccacttctgattccaagagaggcttcaaaatatataaagattggaggttacgacattccaaagaaaacatggatttatgtcaacatatgggctgttcaaaggaatccaaatgtttggaaagatccagaagttttcatcccagagaggtttatgcatagcgagattgactataaaggtgtagactttgagttgctgccgtttggtagcggaaggagaatgtgccctggtatgggattaggtatggcattggtacacttgactcttatcaatcttctttaccgtttcgactggaagcttccggaaggaatgaacatagaagatgttgatcttgaagaatcatatggacttgtttgtcccaagaaaagtccacttcaacttatcccagtccttacccaatggacttgacttcactttcactttttttttctttttg

SEQ ID NO: 6676 - DNA, 3500 bp, Arabidopsis thaliana landsberg
gaatcattaaaaaattttgatataaaattttgagttttggatacttcgactaaatctgaatccgaacccgaaaaacttgatccgaactggatataaacccaaagtcttaaaatacccgaacagatcttagatttctaaaactgaaatacccagactcgaaaagccgatccaaatccgacccaaataccctaacgcccatatctataccatactattctattcgtaatcgtaaaaactaacatacatacatgacaaaaagaaaagcttttaataccatttaatcttcttaactatttcactattatgcataaatttattattttctttttttgtctataaaaattaggaaatggtttcgtcattgttaattattattccagttgactattcccattaaagcaatcatagagttttatgacatcgcaatcatagagtaattaagtttgacattcataaatttatctgactatgattaattattgactaagaaaaaattaaaattctaatacaaacacttaagacaaatgtaacgttttacgtgaagtaatcagaaaccagaaatagtcttcttcttcttcctcacacacatacttctctcaccttatcctccgagatcggaaaatatggagaaatccggctacggcagagacggaatttaccgatcacttcgtccaacactcgttcttcccaaagatccaaacacatcgttagtctctttcctcttccgtaactcctcatcttacccatcaaaactcgctatcgccgattccgataccggcgattccttaaccttctctcagctcaaatccgccgtcgctagactcgctcacggattccaccgtctaggtattcgcaaaaacgacgtcgtgttgattttcgctcctaactcttaccagttccctctctgtttcctcgccgtaaccgcgatcggcggcgttttcaccaccgcgaatcctctttacactgtgaatgaggtttcgaaacagatcaaagattcgaatccgaagattatcatatccgttaatcaactgtttgataagatcaaaggctttgatcttcccgttgttctacttggatctaaagacaccgtagagattcctccgggatcgaattcgaagattcttagtttcgataacgtgatggaactctcagagccagtttctgagtacccgttcgttgagattaagcaatcagatacagctgcattgttgtattcatcaggaactacaggaacaagcaaaggtgttgaattgactcatgggaatttcattgcagcttcgttaatggttactatggatcaagatcttatgggagagtatcatggcgtcttcttgtgttttcttcctatgtttcatgtttttggtttggctgtgattacttattctcagcttcagagaggaaatgctttggtttctatggcgagatttgagcttgagttggtgcttaagaatattgagaagtttagagttactcatctttgggttgttcctcctgtgttccttgctctttccaagcagagtattgtgaaaaagtttgatctttcttcacttaagtatattggttcaggagctgctcctcttggtaaagatttgatggaggaatgtggaagaaacattcctaatgttttgcttatgcaggtaaacaaaaaaacttggtttcagaacctgttcttggtttttgctccttctatgtttgcttgtaatgtataaggtttcgcgtagtttcagttctgtttgtaggctcgtagtcatggatgaatgtttaaatgattgcttcagggatatggaatgactgaaacgtgtggaattgtgtctgtggaagacccgagactcgggaaacggaactctggttcagcgggaatgcttgctccaggtgttgaagctcagatagtgagtgtagaaactggaaaatctcagcctccaaatcaacaaggagaaatctgggttcgaggaccaaacatgatgaaaggtttgaaaatgatccgttcctacgtatatcatatacatgtgcatttgaaagtcatgtaaactggttctctttcagggtacctcaataaccctcaggctactaaagaaacaatatacaaaaaaggttgggtgcataccggagatcttggatatttcaacgaagatggtaacctttatgttgttgatcgaatcaaagaacttatcaaatacaaaggctttcaggtttcactttcacttacccaattctctccttcttcttctcacttgatattgaatggtttgattgatatatctaggttgctccagctgaactagaaggtcttcttgtatcacatcctgaaatactagatgctgtcgttatcccgtgagtcatatattcagaaaaataccgagttgattccatgtccgaacacattaacatttgtgtatgttgtaggttccctgatgaagaagcaggtgaagttccaattgcgtttgttgttcgatcaccaaatagctcaataacagagcaagatatccaaaagtttatagccaaacaggttaataacttatgacacaagtcgtttgaatcaaccggagtgctatggttgttttcttaggctcaaaactatcttgttgtttacatcaggtcgctccttacaaaagattacgacgagtgagcttcatcagccttgttccaaaatccgctgctggtaaaatcttgagaagagaacttgttcagcaagtaagatccaagatgtgaagaatctcgtagatcggagatcagaatctgtgtgttgtctcgctcctttgaccatatttatgtaccatttcaaaataaacgcttacacagcccacaaaagagaataaataataatccaataccatagtcaatacactttttctttcatttgttgtggacataaacaagccataagttttttaattgttctttcagaagtagcaataaactctatttattaatctttttttcattttcttaactttattgttatcagtatgtgtgtgtatgtatttaaattttggagataatgaaactagataattaggtatgctaaggttatggttaacgttaggagaatttctctctagtaatgactcgaagaacaatagagatttatattgtagatggtcttagaagtgtacgaatggacacaaagtagctatttttggtataaagtgtttcttgttaaacctcaccttctcctattttcaaatctcttgatcatacaagcttaaaataataatgtacacaacattactttggaatagaaaacctaccttcctctttataagaatacattattgggactcaattgttttacacgtaatgttcatgcaggttggctctgagctcaagctggaaaagttgagcttggaacctcaaattctattatcatctaagggccgctaatattgtttaaaaaggttggtaaagggtttgtaggtggaaggtttgagatgcccctttttttcagtcaaacatcatttttattaagttatcggaaagaaattatccgttaaggagagcca

SEQ ID NO: 6677 - DNA, 1721 bp, Arabidopsis thaliana landsberg
aaaatcaaagtaatgtagattcccaaatatcttttccctctgtttcttttcatagtttcacagagaatttttttattctttttaaaagtgtcaaacttgtttttttatttttcttgtttatatttactacgtttcaaattgtggattatgttttagtgcttctaaatctttgtttagtcaagttttatgctcaatacaagatgatatgtttgtgatatcgattcaaaatcatttttacacgcttttgttttatttaaagaaaaatcatattagaaaggtatcaaaattcaactttactttaagccccgataaacttgggcacgacactggtgggttgttcatgtctgtactcatttttactggcaaatatacgttcaacaaaatctgagaacaggtatggtttaaattacttcaatcaaaagggacagttctgtcttgaagagtattggagagttgacattgatttagaaatgaagataatcccgacaatctggggatttctgtcatgataaagaaaacttatactctggcccgatgtttcagcacaaaatgatatataatggtgtggtcacatgcagagatccatgcatgtggattctgtttcatttttatatatatactcttaacaacgcatgtacgattcattcttacgagttacggtgacattatcccattctcttttttaaaataacaataacaaacaaattctcaatttagaggagcagattcacgggttacactattttgactactcgacaaatctcacccgcaatcttgttacacacctccattgacacatttcttatctaatactaattattaaaaacaaaaatctcttattagtatcttgtattgtatttatatctcaagagcatcagcaacggcaacttctcaacttccgattctcgatatatgtgtgaacataaatataagtgtgaacacaaatattattaatatttaattggaaagtattttaattaaaccaatgattgaatgacaactgtgagaaacgttgtcgatgagtttctcttggtttctctaaagagaaactttcccttacctctctcctccttttgacattttttttcttattttattggtgagagattttatgagaaactcccgttggagttggtctaactctgcattaataggcttgagagaactaatttatccttcttagatatactttttcactatatttattcttaatttcttttgtatatacctgtttcaggttttgttataaacgacgactcagacaatgtcataaaaggtcaaatctatgccatacagtactcatacagagacaagtataaagaaatttactagataatcatcaatcacggacttgctcaattagttttcgtggataactgaaatattaaaaggtgcgagggaataaaagagtctaaaaaaagcttttttttaaaagagtctaaaaacgaaaaacaaaaatgtttgacccaaaaaaaaaaaatggaaaccaaatttttttatcttaatcaatatataggtttcatataagatctacaagcagcatataaaaaaaaattaaattgactcccttacaaaaactcgaggaactacgtactatcatctcctgcgaactagtattttaaggtcactccacagttatgtttctatatatttaagggtttttttttttgtgaaatgggaatatttaaattttggatccttaaactttttttttttttttt

SEQ ID NO: 6678 - DNA, 722 bp, Arabidopsis thaliana landsberg
gatctctcattttcactcgataatccgggacagtgtctcgagtttacgccgtctttaccaaagcttatcttcaatctttccgatagctctatttcagtagatcttgcttctttctctaaggtctaccatcatcatctgcgctttcgtaaaagcctctctctccaactagggttcttcctctactatacactcgatatggggtctgaattggtttgaaccggtttccttagaccaactccaacgggagtccctcataaaatctctaactaataaaataaggaaaaaaatgtcaaaaggagaagagaggtaagggaaagtttctctttagagaaaccaagagaaactcatcgacaacgtttctcacagttgtcattcaatcattggtaattaggttctcatcatgtgcttatacttcagagcggtgtaattggattgcggtcgaggccttatgaaagaggaaaattttacttgtttctaaagcaaaaccctagctatttctgggtccttggtctctaggttcagatattaagaactcctagcttttataagacaaacaaagttaaattcgagatgagaaaagtttcagattcgcacatcttcatctttcctctttcttatgttcaggattgcagctataacacttctcctataccgacctctcttgaatcgcggcagtggttcccggtgtgaagaataacctcttggatccatagctgaagcac

SEQ ID NO: 6679 - DNA, 1385 bp, Arabidopsis thaliana landsberg
cagacactacacagatgcctgtcatgttctcttcagcaagaggatcttccttgttacgcccactggaaaccagcaacaactgaatccttgatttcgttaaggtactgaactcccttacacatatcgacaaccatgttaggccctgtggtttcaggtccaaaagcccagatcttctttgcaagatccttgtcccatccaaactcctcagccaagatcttggatctgatcttagggtcatcccttgggccaatacgtccatcatcaatagcctcagctagaccttcctccatgggtcttgcttccatgtacagacggttatgcttgttaggagacttactcataactgtgcgagtagatctatcacaaactgtctcacggaaggagaccacagggtctgacttgataatttcagcaccacccatgaaatcatcctgaagatccttaagacaaatctcaagatggagttctcctgcaccagcaacaatgtgctcacctgattcctccattgtacacacaaccataggatcagacttggccaacctcttgagaccctcaaccaacttgggaaggtcagacgcaaccttacactgaacagcaacacgaacaacaggagacacagaaaacttcatagcacgaatggggtgagcatcaacttccttctcattagtcaatgtagcattcttggtgatgaactgatccagcccaaccatagcaacagtgttaccacaagggacatcctccactgtctcttgcctcttacccatccaaatgacagtcctctgaacactcttagtgtacagatccttcttctcaccagggatatagttgggacccatgattctgaccttcataccagtagaaaccttaccagcaaagacacgaccgaaggcaaagaatctacccttgtcagaggctggaatcatcttggatacgtagagcatgagaggtccattggggtcacagttcctgatggcatttgcatactgatcatcaagaggaccttcatacagattctcaacacggtacctctgggcagtgtggggagatggcaaatgaaagatcatcatctcaagtagtgcagtacttgcagggagccaagtctgcataacacgcttcattagaggtttacccataagctccttctcatcattcttcattgagacaccaagcttcgccaacataggccacaacttatccttctggtcattcatgcaagtagcaataatttgcttgatgggttcatagcagaactgaacaaacccacgcttgcaggtcggggaaccagtgattttgccactccacttcctggtggcagggtcaaagaaattctcaccccagagcctatccatcatcttagattcaacaacaccgaacttggaagcata

SEQ ID NO: 6680 - DNA, 1183 bp, Arabidopsis thaliana landsberg
taaagactgactctcgaaaccaaacaacaggatctgacactatgatatccgcaccattcataatatcttgaagatccttgacacaaatggcaatggggagttctccagcacctgcaacaatgtgctcaccagactcttccattgtgcatagaaccatagggtcagacttggccagcctcttaagaccttctacaagcttgggaaggtcagacgctagcttgcatttcacagcaacacgaacaacgggagagacagaaaacttcatggcacgaagcgggtgtgcgtccacttccttctaattcgtcaaggtagcattcttggtgatgaactgatccagcccaaccatagcaacagtattaccacaaggaacatcctccactgtctcttgtttcttacccatccaaatgacagtcctctgcacacttttgacatacagatctttcttttcaccagggacatagttaggacccatgatcctgactttcatacctgtagaaaccgtaccagaaaagacacgaccgaaggcaaagaacctgcccttgtcagatgcgggaatcatcttagagacgtagagcatcaaaggaccgtctggatcacagtttctgatagctgcagcatacttatcatcaaggggaccttcatacaaattctcaacacggtacctctgcgcagtgtagggtgatggtaagtgaaagatcatcatttcaagaagagcggtactcgcaggaagccatgcctgcatgacacgcttcatcaaaggtttacccatcaactctttctcatcgggcttcatctgaataccaagcttctctaacatcggccacagcttatccttctgatcattcatacaagtgttgatcattaccttaatgggttcataacagaactgaacaaacccacgcttgcaggtcggggagccagtttttggtcgtccattttctggttgcagaatcaaagaagttctcaccccacagcctctccatcattttagattcagagacaccaaacttggaagcatacatcttagcaaaattggtgagagtgaaagcccatccgtggagaccagcagagaaagctactgtccccttttcagggtaaacctgaacatcaccgaggagaggatcctcatgcgtggccatgatgacattagcattctcaatgaccctctggaaattctgatacg

SEQ ID NO: 6681 - DNA, 4658 bp, Arabidopsis thaliana landsberg
aacgggagttgataatcttattaataattaattgtattcatttcatacaataacatcaattatatttcttgaggagaaagcaagtcacaaagatttttattagctccatgggtttagggtttaagaatttttccaaagtttctctaaacccaattcttgttataaaactgtaactctcttccaaataccaaataataaatctttctcaagtttaattgtcgccatgcacaagtaacatcttcaactacacatacccacaaatttgaaagatttgttagtttcaactacaaaaatttctaaaaccttcagctaaaaccccgaattaaccaacttcaatcatcaatctccttcagtttcctctttttcgtgctcttcctctcctctgaacccatctcttcatcactctttctctttttcttactcttcctctcctctgaaacgatctattcatcactcttcctcttcttcttcttctccttttttctctctccactcctttgctcgtcttccaacttctccttctccttctcatcaacaacatcttcgtctttgttcttctttttctcctttatctctgcgctcttttgctcgtcttctaacttctccttctcatcaacaacatcttcgtcgttgttcttcttgctcttcttcttctttcgctcctttctatctgcgctcttttgctcgtcttctaacttctccttcaccttctcatcaacaacatcttcgtctttgttgttcttcttcttcttcttctccttctttctctcccttcgctcttcgctcctttgctctgcttccaacttctcgttcaccttcttatcaacaacatctgcgtctttgctcttcttcatctttttctcatcacgttccctaccataaactgattccacactcacagcttcactattccggtaacgaatcttccgaccgtcgaattcgtcaatgacattccgctcactctttgcatcggagctttgcttcgtctccgttgatttagtctccctatcggagcttggcttcgtctcctttgatttaatctccctgtggaaactctttaattcagtgaaggcagcggaggctcgccggaggtacgcactaacgtcttgagaggcgccattatcagaggaagcgaatccagagagaagcttagccgcctttgagagggagattggttcagcactaacaactcttccggtgacagtcttcatcggaagaagctcgaaaggtcgtcgcgcctctctaactacacaaattagggcaatttcccctaaaagctgacaactttcgaaataagtagaaaacacaactacgaaagtaccccttgcttgtttttttttttctcacaagtgaacatatcatagatgggccaacaaagcccaaaaataaaaaaaagcccaaacagacaaacaaagcccttccttgttttccttttgtttttaaaggatattaaatataaaaaaactcgagagattatagttatataaaatatctcgtgacctaattaatgttaagaatatatagctccgtggcaaagtgttctacgtcaaccagcctaaggtcacgagttcgatcaccaaccctaggttttttgtttttttttcttagttttagctctctccttggatcatccatctctatctcccgcctgttacttagctctgctgcttcttcttaaaccctaaacccaccttccttcaccgtcgtctttttcaccgtaagttgattcttcgatcggtctcgattttactgtgttttttttgtttctcttacgccgattcaaaacttaagtcgtttttttttttctgggtaattttttttgtagcttttgtttgtagagatggagacgaagatggaaattgaattcactaagaagccctacatcgaagatgttggtcctcttaaaatgtatgttctttcagttttttctgctcaagttaaaccattggttctattgatataatttttctcaagtacgctccttttagcagctggatcatactcattgtgcataaaatttgtttctttttgctaatgtataatttatttgttccaagctctgaaatttggatttgggtgtctgaactcttttgtcaactagatgacatattctctgctaaatgctttcaagagtcttagtttatgtctgtctgtagattttcttgatacaatggatattgtgtgccttagggcgttgttcatgaatctctgatttgattttatagtttttgagattttgatattgtggagcaaaacttgtttgtcagtttttgttgtttttcctggtgggatttttgacactactattatctctgcagaaaaagcataaacttctctgtgctttctgatcttgaggtcatgaaagccgctgaagttcaagtctggaacatcggtttatacgaccacagttttaaaccctatgaaaacggcttgttggatcctcgaatggtatccgattttcttatatacacctactatcttttggtttaacttctcttatgccaataaccatggcaagtattgtatgtcatgtttttgcctcctgcagttatttgcatcagtatatgtgattctaaacattctatactccaagatatttttttcattgtaagaagataagtactaaatggtttgttcattatgattttgcagggtcctccaaacaaaaagtctatatgcacaacctgtgaaggaaacttccaaaattgtccgggacactatggatatctgaagcttgacctcccagtttacaacgttggatactttaattttatccttgatattttgaagtgcatttgtaaggtaacagagttagcagattatgtctctctagtttctgttctatgttctgtttgttgacccttttacatttgttgaatggagaaagtggagaaaaatacagcataaaaaatatttcttgggaagatgcctttcaaaaaaaaaaactggctggttatattgatgtctttgtagcatcaatagtacttcacaaatattgtttttttcttcccacagcgctgttccaacatgcttttagatgagaaattgtatgaagatcacttgaggaagatgcggaatcccagaatggagccattgaagaagacagaattggcaaaagtcgttgtcaagaagtgcagtacgatggcgagccagagaattataacgtgcaaaaaatgtggctacctgaatggtataattttgaactgttttttggcttaaactatttagattcgatgatgcttttttgaagttaataatttataaccttgattttttttctcattcctcatgcgtttcatcttaggtgcaaaatttagctcgtagaacattctaataagtttcttaagtagcacaagcagaaaattggggtttttgcgaattctaatatctaatgccaaaatcctttaacctctgttgttattggttaatctgaacttatgttatattcttcttcccacccaattcgttttgatatcgtggtaatggttaatctattgataatttcagggatggtaaaaaagattgcagcgcagtttggtataggcatcagtcatgaccgatctaaaatccatggtggagagattgatgaatgtaaatctgcaatatcccacacaaagcagtctactgcagcaataaatcctcttacctatgttcttgatcctaacttggtgctcgggctttttaaaagaatgagtgacaaggtatatttgagtttttatctataatgcacatctttttctacatagcttcctgcgttatgttctcttgctctcagaacatgtgcattggtataaaaggattttcttatttactaataattcagtcatgctgattcttattatttttcctttttctttcggaaatcgataacaggactgcgaacttctttatattgcctatagacctgagaatcttatcataacgtgcatgcttgtgccacctttatccatccgaccgtctgttatgattggtggtattcaaaggttagctatcgttttgtttatctctctcatgtcaattatattttctactgctgaatttttcttgaaagaatgtgttttcttgctgcagcaatgaaaacgacttaacagcgcgattaaagcaaatcattctaggcaatgcttctcttcataaaattttaagtcaacctacctcatcccccaaaaacatggtacaaggagtttctattacatcaatgcgtccctgttatatttgtgaatttatgcattctgtactgtaatgtgtttgtctctatttttgttgaatcttacttcaaaatgattttttggtttacgtttttattccaattttctgttatgactatatctggttcttttattatcttctttcttatttgttgagttttttttttgttttagcaagtatgggatacagttcaaatcgaggttgcaagatacattaacagtgaagtccgtggttgtcaaaaccagccagaagagcatccactgtctggaattcttcagcgtctcaaaggaaaagggggacgtttccgtgcaaacttgtcggggaagcgtgtcgagttcactggtagaactgtaatttcacctgatcccaatctgaaaattacagaggtaacttaccttaagtggtggttaattgttgctttttgttatttatatttttggtgtaacttatca

SEQ ID NO: 6682 - DNA, 3668 bp, Arabidopsis thaliana landsberg
aaattgtgtcctctgttttaagtttctgattttggatttgaagatccgatttttgcatcttgatgattcatttcaaaaaatgtctaattttggtatgatttttgcttgtctcaggtaagattcttagagtgattttgacttatctaagaatggagctaaagagcattaaggatgcgtttgatcgtgttgcgacgaagcagaagctctcttatagcaaaactaatgagattgttcatatgttgtctcaagaaatcgataaggctttgagcatattagaggagacaccatcatcagatactatgcttcttgatcatagatctatcctcgctgatgtgaagaaagtgtttatggagattgctccaatcactcaacttgaagctactgagaaagagctacatgcggctttgaccaagtaccctaaagttcttgagaaacagctgaatccagacatatcaaaggcttatagacacaatgttgagtttgatactcatatcgttaaccagattatcgccaactttttctaccgtcaaggaatgtttgacattggtgactgttttgttgctgaaactggtgaatctgaatgttctacaagacaatctttcgtggagatgtatcggatactagaagctatgaagagacgagatcttgaaccggctcttaattgggctgtttcgaactctgacaaactaaaggaagcaaggtctgatcttgagatgaagcttcatagtctacactttctggaaatagcacgaggcaaaaactccaaagaagctatcgactatgcgagaaagcatatcgccacgtttgcagatagctgcctcccggagatccagaagctcatgtgttctctcttatggaacagaaaactcgataaatcaccatactccgagtttctctcccccgctctgtggaacaatgcagtcaaagagctaacccgacagtactgcaacctactcggtgaatcatctgaaagcccgttgagtataacagtaacagcgggcacacaagcgttaccagtactattgaaatacatgaacgtggtgatggcgaataagaagcttgattggcagaccatggaacaacttcctgttgatgcgcaactatccgaggagtttcagtttcattcggtgtttgtctgtccagtctctaaagaacagtcaagtgatgataaccctccgatgatgatgtcttgtggacatgtgctttgcaagcagacgatcaacaaaatgtcaaagaatggctctaagtcgtcgttcaagtgtccttattgcccaaccgatgtagacatctcaaggtgtaggcagttgcacttttgaaacgaaagctcgggaatttgtacgaccgatataaactggaactaagttctgaatcggtgaaatctgtgtcaaaattgtaaccttgtggtgttctctgtttctttttttcatgaagtttgttaagtgatggggctttggtgtacaaattgatcaggggaagtttttagatgattggacatcccataagaatgtgtttttggtgttgttgctatttgtttgttaaaccttttgaatatagaaattctttacactgcaaatttagtttagattagctggaaccctggaaattaagctctcttttagaattactggtcacatggaaataaaacaaattgatttttgctgcgctcatctgttaaatagagaatcatgtcttagttaatctaattttcgtacaatcattgtttggatgggttagacacatataacgctacaatagaagtagttcttgagttagagaattaggctctttctttattatatgtgaggcaaatgttggtttattgtgttgttcgtctcttctttggttggcttagacactttggccttttcaagactcgtattggtttcttctttgattagcttagagaatttggctgtttcaagactcgttttggttagcttagagaatttgaattcctaaacaagatttattgggcttagaccccaaaagatgggcttaagcttgcacttgtgtatatgtcgattcatacgtgtgtctcgttcatgcgagtcagcttggttttgaatccacgaatgacgagacctattcttctcaaaagagtacacaaaatatatccaagtttaaatataccaaaaggcaaaagcaatgaaccacgttccacgtatcaaaattttctacttcaatttgaccgattgactagagtgtattggtagttaatggggaacataatggggaacacaatagacgcacaaaaattggtaaataaaagagaaaatgaagaatcatcatgagtttttattcaattcacaaaagtacatgagacaaaaacaaagctcaattccgccgtaacaaacaaatagcattattatgttagccagttttttattttattttctggagctagcacccaccacttaaagaagttattttttttttctggtaaacaccactaatttgaattaagtgtttatgtacctttctgtttctttgtatcacatcattgcaaaatttaataaagtttaatatgaatgaatgtttacccttctatatatatcatatatatatatatactatgtttaccaattataaaaaaaaaatgaaaatcttgtgagttgtgaatatcatatacaaattcaaaactgttacttatatccaaaactaatatccataatttgattaaataaagagaaacaaaattccataaaaaaattcatataccattgtatttctttgtatcacaccattacaaaacttcgtaataaaatagaaacaacaaaactaaaatctagcattttcgaatccatggaggtcgctgactctattcatatgcttcctcatgatcgccactttagccaatctctcagccgctctccacgctgaagtcggtgtaagcggctcactcttctgaaccaccggctctggactcttcaccgccacgtgtctacctctcaaacggttcaaatctgccagctcagcttccaaaccacgtaagcacgaatcacttgagctcaaaccgtattgcaccaacaaggctctagctgatgtcagcattcgctcagcccccgagtaatcattgacttccactaaccgccgagactcggcaacggctcgtgtgctgacgtggaggtttcgtagccttgcgatgctcgggtcagatgatctaacggtcgtgggacgtggtatcattagcgcgcgatcttcatagtttttgatttcctgagtcgtaggatccacgtggcgtgatcggacggtcatgattctctgggatctactagacgaaggtgatttgagttccaccaacacttctctttcttcatcgccgtacatgtcacccaaccgaatcaacccggatccgagccaaacgggtcgacccgagagtgaataaactgatgtcacctttccttgacccgacccggaaactaatccgagatttagagtaagatcttgaaccgataaactcaacagactcttgatacgtttggcaaacacgtcctcggggagagcgtgattacacgcgccaagccaaatagtgtgcgttgggatttccaaatgagagaagcgcgtggaagtcacaaaatccggttgggctaattgggcttggtgggccgagtttctattacggtccgttaacaccaagatggtggtgaagagatttccccgccggcgat

SEQ ID NO: 6683 - DNA, 3089 bp, Arabidopsis thaliana landsberg
caccaccaatcagccagtttccagatggagtaatatattcttccacataaggcaatcctggagaagtagttccccaagttctagctatcctttcttccttattgtgtttgtaaatctccacactacaaattacaaacaaagactacacaaatcaacaacattacatataaagcacctaacaaagttcaaatttttatacacatataccttcggagagaaccaatgatatctccttgagggcaaacaagagcaacattctcagatgatccgatctgttccttagtatcatcatcaatagcaagaacaataggaagagacatgttcacaaaagtcccattttttaacctaagagaattaaaatgcaaactttgcaaatactcatcttctctcatgaacccttttaaaggactagcccaaccttcactaatcacatgaacccactcaagatcaatctgattcagcttcattttaggcatcgtctctgattcagctttcttcactccaatctcagtttccggtacaatcaattccaccaattcaccaccgtcgggatcaatcaacgagctcttaacagtcattttcgaaacagattgcattgttaggtttcgtttatagaccaaattgagaaaagggttgttattagaagaggaaaggaaggagatttggttggtgaaagaggatggttttgagtttctaggttggaagagagtgatgtgagaaacgtaagaggatctgatcataagagacatgaatcttgttgaagatagctactttgggacaaaagcgagagaagtggagagtagagagtgaacagtgaaggtgagattaggaggaacatgttggaggaggaagaagaagatccacacgttattccacttttggctcctttgcttttttagttgcaggaacttttttgtttgtggatgtgattattattgccttttctgtgaaatgtctttttcaccctttgtttttctcaagatgggaccttagggaccattaaggtttaatcatttgattcggcccatcaatcgatatttgtacaacttttcgtggaagaaaggtaacttgggaaagttcaattcaaaaccctaaagtttttgagccaccaatgaagaagaataaggtgccaacagaattgattttttcacttccaaatgatttgttagtgaacatcttagcccgtgtctcgaggttggattatccaattctctccttagtctccaagcgtttcagctcggtccttactttaccggagctttaccagacccggtcactagtaggtcttaccgagaattgtctttatgtgtgcttactgtcctctcgtgctgaccgtatccctagctggttcaagctttgtcggagacctatcctagccagtgacactaggaagtcaagtgggtatgttttggcaacaataccaattccacattctcctcctttgcacaggtcaagtctcgtggcggttggttctaatatctataacattggcggatccatctcccaatcccagtcatctagtgtctcaatcctagactgctggtctcacacgtggctcgaaggtccaagcatgcaggtggagcgggagtacccatcagccagtttacttgatggaaagatatacgtaacaggaggctgttataaacactacaatccatcaaactggatggaggttttcgatctataaaccgaaacttcggagcctgtgttgagccgtgcaggtaggttgacgtttcatggctgtggtgatcaaactgataacgtagtggttgatggaaagctacacattttttggtgggtataagggtgtggcttacaatcccaaggatgatacatgggatagtttagaagtaccggagatggatatgtgtttgacattgttttattgttgtgtgatagagaacgtgctttatgattttttttacgaagaacttgatatcaaatggtatgacactaaggcaagaacttggagaagtttgttgaatggtatgagagaactgcataagtttgttcgtcatgccagtgttacgttggcggattatggtgggaaaatggtaatgttttgggataagtttgtggcttctggtgatggtcttggctttcataaaacgatgatgtggtgtgcgatgattgcacttgaaagaagtgatagtggagagatttgggggaaggtcgagtggtttggtccagtgcttccaaatcaaattcccctggaatatgcatttgagtatgtcggttctgtcaaagtttgatgaatgccataagagtcacacttaaatgtggtgaatctttagtgtgagtcatgtggaaactttctagcacatctaacatatattgctatatgcaatacagaaccatatacatgaaagcaggttcatacattaatagaatgaccaagcgaataaggtgtgtgattctaattaataaaaatctcatttaaaaagattctaccgaggaagaagtagtaaccaaactcgacaaaagaccaacaacaagagcactgttataagtgcttggctcattttgcatagaattgttccttgcgtctataaacgtgtcattcaaaaacggtccaccaacaagtgctccataagctacattcggatttggttcatccgagttaagccacttaaacccatctttgcatcctgtggttgcatcagctggtattgaagctcctctatgatgcacaaattctggatatttctcaccatatcccaccaaatagctcattttctccggatttttccctaacatgtaatcagcctgcacattatatatgcatatatcaagttacagtattatacgtttaattaagaggaaaaataagaaaccaaattaatatgcatatggacctgagatctagcgaattttctgagatccgaaggtttaaaggattggtcactgcaagatagctacttaacaccagaggtgagcatatactcactgtagagtgcaactagaaatgcataggacacagggtgttgcacggcattccattcacttacccatattagaccacctttcatatcaaaacaaaatcaaatgaaataaataacaatgattcagtgaatggtgtaacgtgagat

SEQ ID NO: 6684 - DNA, 5469 bp, Arabidopsis thaliana landsberg
ttctttgtccctttactgtttcttgaaatttctgctgtaattattattccttttttcctttaattgttgttgtctgtgtaagagattgtttgtctgttctgctttatcttgaagttagtttcttttgtttctcatggtttagggtttatgttcaatttgggggatttcaagaaatgttcgtttctagtcgaatttggggctctttgtgttcaattcatttggaattatccaattagatgggaatttaacggttagggctttcttggaggtcaaattagggttttggattaaatactcttgaaaccctagatttggttgattaaatttgggggtttctcttagattgtgccttgtgctgctgctagttcatgtatctttggtgtttgattagtagaagcttgttttggtttcagttttatccgaaaagagccggtactccgagaaagacggagattgtgtttgtggctccaacgggtgaagagattagctcgcggaagcagttggagcagtacctgaaggcccatcctggcaatcctgtcatctctgagtttgagtggacaactggggaaactccaaggaggtcttcaaggatcagccaaaaggttaaggctacaacgcctactcctgacaaagagcccctcctgaagaagagacgatcttctctcacgaagaaggacaataaggaggctgctgagaaaaatgaagaggctgctgtgaaggagaacatggatgttgataaggatgggaagacggaaaacgcagaggctgagaaggagaaagagaaggagggagtgacagaaattgcagaggcggagaaggagaacaacgagggtgagaagactgaggctgagaaggtaaacaaagagggtgagaaaactgaggctgggaaggagggtcaaacggaaattgcagaggctgagaaggagaaggagggtgaaaaggctgaggctgagaacaaagaggcagaagttgtgagagacaagaaagagtccatggaagtggatacctctgagttggagaagaaggctgggagtggagaaggagctgaagaaccttccaaagttgaaggcctcaaggacactgaaatgaaagaggcgcaggaagttgttactgaggctgatgtagagaagaagcctgcagaggaaaagactgagaacaagggcagcgtgacaaccgaagctaacggagaacagaatgtaaccctgggtgagcctaaccttgatgcagatgctgaagcagataagggaaaagaatccaaagaatatgatgagaagacgacagaagctgaggcgaataaggaaaatgacactcaagaatctgatgagaagaagacagaagctgcagcaaataaggagaacgaaacccaagagtctgatgtcaagaagaccgaagctgcagtagcagaggagaagagtaacgacatgaaggcagaagacacaaacagaagcttggaggcgaatcaagttcaacagcagcagggagctgcagcttccgtgagctgttaaaacctatatcgttctgtacagagcacagagcgtgaagagtttgttgtgatttcaggtgtagcattaacattatgagtggttgttgtatgtgttggtagaactaatgtctctctatgttgtagttcagtccattatcatttgacgtttgtatctttgtacctttgtactttgttgtattattaatattaggcatttagactgtcctttgtctcatacttagacgagtgatgcaaagtgaatgaatcctaacacccaagtcccaaagcagaagattgcatggtaaagattaaaaagttaaaaacaaagtgagctttttgattacaaaagagcagatcttacaaagtagaacattacataataagataaaagaggtaaaaacatagagagctcgttgattacgaaagagtagatcttagggagcgtatgatatcagtgagggagacgactccttgaagcagaccctgttgatccatcacccatactctgtgcactcctctggtcaccactttctctatagcttcctccatagtcgactccacaccgcaactcaccacctccctctccttccccgaagttttctcggtgaactccagagctgtgagtggcagccacgtttgcaactccggtaggcgacatcctttcaaatcagttgctgaaaacgtacctatcacttttctatgtctcccctgcaatctcaaaaaacacaaaatgagtaaacattatatattaaccagagtatatatgtaaaatgaagcctacattgactagctgcagatgatcctcttgtgctatatcaggtgcatgaacgatggggacagcgttgagcagagcacccttcataacgttgatggcattggaaacagtggttctctctgtgatggcgtaaacggaatcattaacagctccgagatcagagatggagcgtgagagaacagttttgaggtcatcaaagtgatggtctttaaggaaacgcaagagatccatctgagtaagcatcttgtaagcagaggcagactcaatcaactcaactcctgcaatagtgttattgctctctatgctgctctccactggcactaaagctcgatggatccctttgctaaacacttccatgcactctaacacgctggtattaggattcagtgtccagagactgagtccttcgaggcaatgaccgatgatggatgacacctgtgaactcatcttgcgatcaagatcagagagattggaatcttcaccggcgatatgagcaagtatgtcaagcatcgtgagaatcccgatatagtgttttcttacaactccagtttgtttgtctgattccatgatcatggaaccaccggctccgatccagtggcctggaggtgcagccactgggagggctgagatggagttagccaccaatgtgttcattgcgtgggaaagtgtagccgtgtatggtacctcgacgagccgtcggtttctgaccgttagatctttggccgtgacattgatcagacggctgtgatcttctttgctcttctcttcttgcatagtgttctactactgttgtcgtagcttgaacttgttgctttgagaacctttttaagtgtcgatcttggctcgaaatttgatgtgaatggatcaggacgccgtgtgatgatgatctagaagcacgtggcaatcgatacttgctaatgacatgcaacacgtggcatttttcattgggccttagctaacggcccagtagtatgtttaatgacccaaataacccttcgtctctgctttgtttttatttcttaaaatcagtatctccctcgcgtccgcaaatgaaacgacctgagaatccaagaacgtaggaaagaaatcagtgctgaagaagaaacacgaagatgacgagaatggaagttgcgcgactgtgagtatctttctttcgtctttcattttctccgctgcattactctgcctcaatgagcttgatcgttcgagatttggtcgacttctgtttggagattctgtgtgttctatgattcgatatcttggatttagagttttcttttccatttattataaggagaacttcggattaatccttcctcagttacgcttgattagtagttcggtttctttctgagattgcggatgtgaattgatgcaaaacattacctctttttgatgattttcataatggatagggatgcattttaggatttgagtgtgcaatgagattacaagagttggttcttgtgaaaatcagcttagttttcttatggttaattgggtttgtcttcctgcaacgtagtgaagagaatggatttgaagaacccaacaatggggaagaactttcctgggatgatctggagagagaagctgctagtaatatatcatctaaaagatctcatgctgagagatctcaccaacacgaatcttttacaaaaggtatctgcaaaaagattatttcttaaagtaatgttttcgagttattgtagatggtgaaacttttgcttaatctatggcaatgttatctgttttgtcatcttgatgatgtgagtgatgttacaaagcataatatctgtgattgatcaggtgacgaactttctggagacttgtacgaactgtggaggcaagaacagaacagcattgcggcaaggctagacaaagagctaaaatccaggtgggaactcgatgaactgattgaagaacagctgagcagataccagtcccattacgacaattccatggtttcaactttcttaaaggatgtctctaacctcgtcttacccacgtggataccacctcatgagctagctgctgtggcctggcttggagactggcgtcccacctccattcttgaccttgtccgcattctggcagctcaaaacccctccttctctctgtctgagtcgagtgaacgtgtgctctctcagcttttacgtgagatacgcatcgaagaggccgtgattgatgaggaatatgcagaaattcaggccaccggtgtcttgtacctccctttttccccgctctgcaatactcggttgcatgaagaagctctgcgttctgtgcaggagctgtttgggaacatacataaagtcatctcaaaggcacaacgactcaggtttgctttcctccccatcataaataaaagagaattgttgagaatgaacagaaacaaatagctgacaccagatagtgtgtgtggttaatgatgtcttagttttgttgagtgaagtgaaagctttgatcagtattatgagagaaagttgttatgattggcaggtataaagtgttggagctggtgatgaagaagctgctgaatcaaacggatacagccgagtttgtggtcgcatttgcagggattcaagacgccatacaccagtttggagagcagaagaagctaagaaagatttacccagcagttccttcacctctgaagggatcaggatcatctagttgagagctttgtagaagcaaagcaagtcccagtttcatagtaaaactaaatgctgtgatgtgggatctgcctgcttggaactaatgcctcttcatcaacccatacatgtttaggatgtacatgtttagctatcaccgtcctctggattcattgctgttgtacgtacgttgtaagtcataacaaagatattgacaatgataaaaccaattcttgtatacaagtttttcaggctcttcttaacacttaacatgcaaatttgggtcatcatcagttgtatatgaaaggatatgtagagtttcatatatttccaaaaacgttagagaacgattaacatgtgacccattgggcctgttttacacctttaggtccatttaagttgacgtgctccaactcgtaacctccgattaatgccacatgttctctcccgcctgaatcatgtcaatctcccacaaaagatctttgataaaaagaattgagccctaattccttgatgtttgttgaatcgcacagcaaataaaaaaaaatggtgttggcggagct

SEQ ID NO: 6685 - DNA, 648 bp, Arabidopsis thaliana landsberg
tggacattgcgtccttgcagtttaccaacctgcatgataaaatataacatcctagtataagaatttgctctcagtgtaaataaatttcaatttgatcctgaagaatctatgtacatagcaaactctatgattggaagaatgtgaagtggcaacaacattaccttggtactaagatatgtcgttgttattgggtaagatgaccaaaaatgtctcagtaattcttgtattgatgtccagtgctgtatacgagagaaaaaaggaaaaagtattgatgcatttgaggggacaacaatatccataggcattattaaccaaattacagtaatcagtatatattgagctgcttgttacttaggacattggaggatgtcagacttacatgtataacttcatccttagtggactttggtaatctgtccagaaagctctcttgcgggttcttcccgagaatatttttggcagttgagatagttcgggtcaacgaactgaaaacctggatagggtttagcaatatttagctcagggaacaaagcaataagccatggtttctttaggcagcatgcattttatattgagatagaatagcacctcaaaggaaacttcaagtttaatcaacggatcacttaatcccgtattctaatcaccaaa

SEQ ID NO: 6686 - DNA, 3695 bp, Arabidopsis thaliana landsberg
tcaaggctttagcactgtcggatatcacaggccacgggtctgactcactgacgctatatcccttcaacacaggggcaagggtcccttgctgtgtgtgtgactccaaaaacgaccatacaaaacacatttcacgagacttagactttctacatgactaagaaacaggctaacatggaaaatgacaaatacctgcccagaacggagggactccgctcaccaatatgtacagtatgacccctgcggtccacacatcagcctcgggtccgtagtgcttgagcagaacctcaggagcaacataatacggacttccaaccacatcctcgaatatttgacctgaaagttgcagatgatgtagcaagtgtgaaattctgactgaagatgttgcaaatgatgcagctgatgttatcacctggtttgaagaacacggaaagcccaaaatcaatggctttgagagagaagtcgtcgtccttgttaaccaacaagaaattttcgggctttagatctctatgcatgacaccaagcgaatggcaagcctcaacaacaccaacgatgatctttatcagctcagctgcttttctctcgctgtaatgtcctctctggataattctgtcaaacaattccccacctgagcaaagctccatcacgatgtgaacatacaatggatcctcgtaagcacctttaatggtgacaatgttcttgtagccagccagatggtgcatgatttgaatttccctgcgtacgtcttccacatcttcctttgatatcaactttcgttttgttatagacttgcatgcgtattcacgccctgttgagatctctttgcacatgtaagtcgtcccaaactgtccttgacctagtttgtgtcccaacgagtagagatctcggatgcttggggtcttttgaccaagaacatagcaggcttggttcccaccgctgtgcttcattgtggcttcttcctgggggcgtcttttgccagtttgtgtgctgaaacaaatcgttgaaagacaaaatgtattagaagtggtttggcttgtaaagaattgcccatcaaacaaatcccttaccaagttagttcacctccccttccaaattagtttgccatcagaggaaaacagagcaagtcccatagcaagatctgaaacattatacgaatttagcataaagaaatcgcaataataaggagagacatcaaaacaggggaattagaggaagagatggatgtgtaccagacaaagatgataagaatggatgaaaattaagtcagattggtgcagatccgatgatacacattgttgaacatggttttgcaatattctcgccaacgtctccacatcctgactaaaaataacaaaagaagaagatatctttgattaatagtcatcaacagatctgtctctttaattagaatattctaaaaatgcaggggaactccacaaggctcttttcttaggcctacttcacatgagacaaatcaagacctccaattggtcgcatcggaacaaacctttaatgatcccatggcctcagattctagttgacgggttataccagagaagatgggtcgagtgccttgattggctactcgccaaagatgtaataaaagttacttctttgaagcaacacgcattatttagtacatgtttgaagagatatgtacactagcaatagagaagccaaaacaagtgggacgaagaaaaactgcatagaatgatttgcattcgtataagttacccacaagataatcactaataaaacaactgaaatatatttaaccctgaccctttcaaggggttcccataacttctaagccaatcagccaggtcaccagagcttccttgctgttaaagttaaccccaccgctctacaaactcatccataaataccaatacaacctaacagctgctagaaggaggctgcatgcggtccaaaatcttcttttcctttcatctgcttgtgaaacccggttagcacagaactgtaagcaatggttaagatgtaaatgatgctggttggagaagtacatgttttgcatcaggaatttcgaattccaagctgcattacagaatctggcccaaccaggaatacacgtcttgttgtctggattcgaaacaccactactcctttatatgctgttcgaggcacaccatcctacacaatcaaaggggtacaaaaaaagtgacccatttggacctacaattattgaagattatagttcaatcatctcaaatttaccttccattcttcaaatataccaaattcccctgcaatgcgttcaaactctacttggtctttataccggatacgaacatcatcctttatgttttgagcctttaagacaaggtcagaaccttgaattggtcgtgcttgtctcactaagccagaaaagtacttggtatagtttccctttgatagacatgagagaacaggttaaaaactacatttctccactcaaaacatgcaaaatggtataaaaaaaaaaggccggagttctgtaaatgttacctctgtcaggtatcccaggtcctttgctttccagtcaacctttatgaatgaaataggaaaccagtgaaaactagtgatgcaacaaaagggggtaaaaaacacacttacgcttaccttcacatcgtttagctttataggttccagatactgactgaaaaactgtcccaaactagacccctgccaaattaatataacaaggttatggataagaatgaaatgcaaaaatatattatgtggtattgactgtctacatccatgtgtcgggaaactataggacgaagctgcaataatacatttttcatacagaaagcagaagtcatatgcagcgagcataggtcaatttaacagcattacaaaaacagacttgtaaaactatgatatataggatagcataatcgggtactaacatgttcaccaaaattgtatgttctacagacttccggtcgaatgaattggcggcctttatggttttcctttagtctcagccaatcatcccagtaagtggatatttgttaagaaaagtcttagaaacgtcaaactatttttttttttagaatttaagaagcgtcaaactatagtcatcgagattgaaagaaaaaaaagcatataaggatatgcctttggccactttggtgataactcatcccaagtcgatctcttgagcatccacccaaggccaggaaaaaaatctgatcggtatagcgcatctgcagattattttagctcgcatgagctagacataatgaggtattgaaagaacaggcaagagaggaagcaaggtaaagaagaagaagaagaagaatcttacagggatcatgcacaaactgcttctgtccattatcattccatgatgaagcagccataatggttctaacacatgtttggaccagaaaagaatgagaaacagtaataaaaacatttgtatactctgtggaaacttatactataagagtctagcttcagtaggtaacatacttatccctatccatgagactagctgcagcctcaaagtaatcaaagaagtctggagcaatttccatatcatctgttaaagagacaagataacctctcttaagcaatactccacaaggtaaagacagcccctcttaaacaatacaacagcaaggtacgatgagtgtgaaaggttaaaaagcgccaccttctagtataatcactcgactaaatttgtgtgg

SEQ ID NO: 6687 - DNA, 1016 bp, Arabidopsis thaliana landsberg
aaaaaacgttaaacacgtattttgtttagtcaacttttagaaaagtaatcaacaatgccaaaaaaagtggtaaatgctaaataagatcaattagctaaataaaaaacctgtagttaataaactagctaactacatctacatattgttctaaattggtgaataagtgtctataccgacggacaagtgtgttttctcaacacatctattaaactttgttaggaacaagtatttatcagtttctcccttaattcaattcttatttgtataaatcataagacggataatttaacatttgcaagaattaatgtactcgtatgaaattctttttgttgattttttcccctccgatttagatttcaattagacaaaaataaaaaaatatgatgaataggtcaggtcataatcggaaaacaatccagctttatttaagacttgacaattcaaaacaaacagatctgtagaaggcaaacactcaaatatagattttgagctgaaatcattaacatgcaaatcgcaaaacacagacacaaagtgacgtcgttttttatcatttgcaaatcacatgctttccttttcagcaccactctgtacatcacggcagcaaacacataaccccataccagtaataccaccaacaggtatgcatcggcctgcaataaacttgctgtccaattgcttgcatggttcaatacaagtagagctcttctcataactattacattcccctttatcgtagtcacacacttgcctcccatctacttctgtccaatcaataggaagatactacatttcataaacatgttttattttagatcttgggatcaaagactttggttttttttacgtacctgtaggagatatgaggagaatggagagacaaacgactactgcaatagcgactgtgctcaaccttaagctccccattaattgcttattacgttctagcttctttctttctattactggttccctctctttctttgtgattgattcatttaagcaaaggcgagttttta

SEQ ID NO: 6688 - DNA, 604 bp, Arabidopsis thaliana landsberg
  unsure (1)..(604): unsure at all n locations
cagctagtcacacgacagtaaaacgaacaacctaaacgacgaccagttacagcaatagtaaaactaacaatatattttaaaatctgatcgaagtcgctaaccgtatattacgggtcgcagttgctagcgtgcgagtttacatatagaatacaataaaattgcatgtttggttaagctctctcccaactaactattgctataaaagaaagaagctaagaagaactaagcgatcagcaagtaatggggagcttaaagctgagcacatttgcaatagtcgtttgtctctccatcctcctcatatctcctataggtacgtaaaaaagaccaaaatattttgatccaaagatctaaaataaatacatgtttatgaaatattgtctctttgtatggatcatacagaagtgaatggatggggaaagtgtgacttacgaaagggtttatgtagactcgcggacacgatctctacttgcgatgtaccatgcagggcagtggacagcaagtatcatggaggcgaatgcttacatgctggtggtggtcaagggatatgttggtgctgccgtgattatgatgctgcanagagcggtgctgagaaggaaagcatgtg

SEQ ID NO: 6689 - DNA, 611 bp, Arabidopsis thaliana landsberg
ccatcctgatactgttggatccaaaatttctctcagattattattttcaaccgccatctctactttatggcctaaccccattgctggttgggctgttatgatttgcagtagcaccacaccaaaagaatagaggtcagatttcactccaagcattccggtttgctgatactcagggtcaatgtaacaaaatgtacctgttcccgtacacgccaaaatgggaaacatacatcaacattggttcgatgttaagacatcgaaaagagatgttaagacttaccggctgcagaagtcatgtgatagttactgtaggtatcagccacagcaggaggtaccaagcgagctagaccgacatcactgattttgcaagtgagatgtttatcgagtagaatgtttgctggcttcagatcacggtgaactaggggctcaggttttgcctggtgaaggaaaagaagacctgtggcaatctcagaagcgattctgaaccttgctctccatgaaagtgggtgtgtgttgtttttgcagaagaggcgatcttcgagtgttccattttccatatactcatatacaagacagcgatactcgggacatgcacctaaaaggatccccatatt

SEQ ID NO: 6690 - DNA, 732 bp, Arabidopsis thaliana landsberg
gaaccgttacgatattggccaatgtcaccccgatcaattccatttgaatcctatcccagacatacgcgttggcgaccaatggaataaatttgaaatcttgtccctgaaaatcaaaatgagcctaatgcctttctggcctaaactcttctgcatctatcccccatgttgtagtatctcgttggattgcccaagcattgattataacctgtgttcccatgataggtttgtcactaatatctaaaaaatgaccataacacatatatgcatattatttatttacattataaaactatttataattttaaaagtaagtataagattgctcctataattgcatttgataattaaatatgttataaattataaagtatatatgtaactaaagatttgataaagatttaacctgtgttcctgcaggaatattgtatccctttaacgtgacatcttcactaaatactcgtggaaccattagtggagcaggaggacgcaaccgtaaagcctccttaataactgcttgcaaataatccatcttctcagcttctttctccgttacaaataaaccttgtcgtgaactcgaacgaatctcttcttggagtttcttcatgaccttaggatttctcataagctctgtcattgcccattcaagaaacgacccactccttgccgttcccgctaagaacatatcctaaaaaggaaagaaaaaaaaaagtaaacgtcaatagaaaattatag

SEQ ID NO: 6691 - DNA, 1007 bp, Arabidopsis thaliana landsberg
tatctactttgtaattacatatatagcatcgttaatttgaatctagttggtgttaaaatagtgaagaattacacattaaatcaagggtttctacaatcgatgaccaaggaagactcattatttaactgacacaatatgacactatttgtatggtgtctgttccgaaattatgacctattaacccctatccgcctattagaaataaagtgtgagatacgctaaacagtaccgtgtgtcagaacctatagaaatcatatctctctacaagatttggtttccgagattttttgggaataggtgtgataataaccatgataatggtgcgaaagaaagagttgtgttttttttgttgattttgcaactgcttcatctcatgtgccatcatctctctcatttctctctgtggtttccggttttttgctcctaatatgtacctttctaatacttgagtagatggaggcatgccagtccgagacgaagaccaggtctgggtcgtctggaacaacgtcacttagcttgttcatgaactaggtccacgtctcgtcgttttcactattaacaattctaaaggttagtgggaaacattggaaatttgcatcttgattgctcgccgcgacaagacattctccatacctgcccctcaagtgagtctcattgattacaacaacttttctcatgtaatcataccccttgatcgacacgtttaatgcaaagaacatatacttaaaacggataactcccaaattatccgtttctgtttttagtgcggtaattgagttttggtttgttgccatcagtagtttgaagtatggttggattaatgcaaaatttctcattgctgaccccatatcattgtccatagcaatctctcttgctctccacgctttccagtacgaaacattgaggctgaattcttgtctcagtatttttcttaaactcattaggcctaggttcttttccaaccccaacataccgtgttcttattagcctccctattaaagctgttg

SEQ ID NO: 6692 - DNA, 975 bp, Arabidopsis thaliana landsberg
aatcaatcatcaacaacttccgattacttcttattattatgtaaataataaatgaaacccaatgttcataaaacaagggatttctgggttcacgttgcaagaatcaacattccttgcataggatgaatccctgattgtttacagagagagagctaagggataaaacttcaacgataacatgaaaatgacgatgacacatgatatttattagcttcagctctacgcccacttgcttttaatcacagccgtccaatgatcttcttatcacagccgtccacgtggcctttacttaatatcctgtatcagagttttttaccccaaaaaaaaaaagaaacctaagagttttaacgaaactgatttaggagataaatgtatttttaggtctccaatatcagtttaggaatatctttgcggaggataaaccctaatatttgacgcaactaattaaaaattgaaatacggtggaatttaattccttttttaaaaatcgtaagatatttctagtttttttatatattttgtttaatgtaacttgttccccaagatattttagaacacccttttatttttattgttttggtttccagttttttatagagtttttaaaatatatattttattgtttagttcttttcaggtaatcctttttgccattttttgcaacttaggaatttaacttcgtagagtgatagaacttccaccgctgaactgaagatataaaatatattagattagaattttaaatggaaaaatttaaaactaaaaaagaaaaaagattcaaaaatcatgatcatatctacttaacatttttgaaatacaaaataagaaattttccgggttgatttttttttttgggtttgaccccggttttaaacccggattttcggtcaatttgatgaatttaattgatatttggcccactttcttcaaactttcccactactacaaaacaatgacagcaagaatcttggcaaa

SEQ ID NO: 6693 - DNA, 2611 bp, Arabidopsis thaliana landsberg
ttgtgattgagtctgggactaggttaacttgaggatctctgttgcggtggcacttagatttggttaatgaacttgttgtctagggttaatttattgagcatgtcaatcacctgtaaacttaggaatcgaaactactcaattatcccatcctcgagaattctttatctgattgattttattgtatactctactgctgtttactgcatcctgtcatctgttgcttagtttctgcagttctttactgttactcgacctggtactcgaccacccagttgtctggcaacagactttgttgtcgagtatccttgttacattatctgtcttctactcgacctgtcactcgaccacacccagtgctctgcaacgagctgtgttggtcgagtgttttattgtttctgcttgattttctgttttctgcatgttcacttaggactgctagaacacaccaaaacatgttattgcttggcttgacttagttacttctaatcacatcttgattgttagtgatatgatcctggtgaggaatcaatcccaatttcggcacttggaagatctggagtggatattctcgaaatagagacgacacacgactcaaagacgagatgatggattgaatgacgccacaaaaggatgcggaaaatccttttgataagtcgagaaagatctaaattcgacatacgaaaatggatctatttttaagagagagtttttgataaaaagatagatgagttctcataagagattacaagaggtttataaagaagaaggaagtcttggaacacactctcaagactaccttgcaaaatgaaaagaaataaaaactagtttgaaagtttaaagataactcttccactaattggctccaaaatgactcttgaaatgctattttcgtcactcctcttgaccagcaaatcacccacttggtttgggctcttcttgggcttgtgatggtcataaaattggctggacttcatatatattccattaggccaacttctgaatgttataccatggtttggatcatcaaatgggtgatttgaatgtgaatcatttgcctcattaagaaccttgtcaaaaaaacccattgtgacaaaacttgacaagggaaaaagagtacaaatgagacacatgcccatttgatgatcatgtattcaaaccaatgaggtgaagtgatataagatccaagtagatgaccacacgatattttctacgtagatggcggagccggtacaaaggaccacacggttctctttggttcagctaatgggtggaatggattgaggacgccacacaatcgatgatgagattgtgataagtcaaagagctcacgatcaaggggaagccgcacaagaccggtgaactcgtaaacactttaaagaaaattctctctttattgataataagcaaaaaaacgtgaactacaatggctgcaatggaccttattaatatatcgacagccttgaccttcaagggtcttgaaaaaaagaagaaaaaggcaacaaataattgagaaataaatgacaaaataaacttagactaatttcaacccaacctgcaaaagaaaggaaagttgacagctaattagaagatttaaacgcataccttagcttggagaggaagctcacgaccttggaagcgtccactacggacattccttaaatggcgtcccttggagtgatgacaaagagaacatgggcttggtttgtcttaaggagaggcctttcacttgttggatcacaaaagcttgggccaacacttaattcttgagttgtaaccgtaacttgttgctccgttgactccgtttcttgttctttaagcttgttactacaaagagtgagattatcgaattgattgatggtgttttccatttctctataggttatcaaactctccacagctttgttgaattcttcccgcatcgtctttgaaccggaccttgttctaggcggttgatacattgtcggaacccgagtaacttcagtaaggtttgaatttatgtcctcatcatgaagataacatctttcccatactctttctccgttataagttcattttctgtttcaaaatgctcctcaggttcaagctgctcctctgcttcaagctcttccgcggctacaagctcttgatcaaattccatgtcctttgtgctttccatgatcacatcagtcatggtggtcattgatgtggtcaagccatagacttttgaaatcaaatttgatccctagctcttatgcatcttcaaatccctcagattagcttctcttgcctacaaccgattgatctgaatccctactctctgagatgggagatgttgtggtttggcggctcctccatgttcttcaaacaataattcacaaacagatttaggtcaagatctaaaaggtctactttcgcttatctagttttctgtcgagtgaatctcaacttaacggtgtcaacatgtatttgatggttccaaagcttcatcatcgaagcctcatcaagttgggttttgaattaggtgctttaatttcttaagtttttttaagaacaaaataagaaaagtagttcagagttttttggtggttgtggcatttttcgtcatcaagagcaaaatttagatcttgaaaag

SEQ ID NO: 6694 - DNA, 1517 bp, Arabidopsis thaliana landsberg
tctaaggcatctataaaaaaagaaaagtaaaccaaaagaatcagaccaagaaccataccggaaacaaaataatgcagaacaaaatctataccaaatacagagcatcacaacaccacttgatctttgattaccattcacaaaattcaaaacctaaaacagatatcctaatctcgcgatcgtttacaaaaccaaatcaacaaatcacaaaactatcgtagatggtattgacgagaaaataacaaaatcgatctagcaaatcaaacaccaaaagattaacgcaacgatggaacaaattaagtaacataaacaaagaacgagagacgtagtaacagtaatcgaacaagtaacagagaaacacaattcataaacagatcaattgagaattcataatcatcggaattgcctcaaagaaaccctaaattcgagagtttgataactaaccagataatcgatatacctagacgaagtgagagatcgtcatttctggatcatgatcgtcgccgacaattcgtcggtgaaccaagcaagatcgccagagaaaaaaaaacttctccagacattttgcaaaaaaatgaaaatttagggatttctaaaaagtgagagatatcagagagagatttgtaaaggtttttcttcttctttaaacggtctaactccaattttttccgctatatagaaaaattcaaaatttgaaaaatcaagattccaagactaagacatgtttcgaaaaaaagaaattgaaattccagctgtgacacgtcatgattatcatgtgcaacaagtttgagctaaaccgggattttaacattttggtttagtgtgaaggcttgaattgttttttggttaaagcttaaccatgatgtaacaaccactgtgatctcatgaaccattttagatgattagtttcgttttggttttaaaatgtgacattaattctaagttatatgaatttgttatcttcccaaactacgtattctcaactatacacttaaaattaaaagtgaccaagttagaatgttagattataaaatatatagctcaagtttatatatatgatttgcaatggcagatccataaatgttaactaggattaactagattacaaaaaaatagtattgtatagttctattttttaaaataaaatattggtattttaacaaaatatatttattaacgttataaattgctttatatcgagaaaaaacctttaaaaaatctcaactaatttttatttagatatttaatacccaattgttttttcttagaagaaatatacacaaagtaataaaactgtgcaattcaatattcaaaaaattaaatattgttattttcatactaaaaatctcacaacaaaaataaaatcctaagtttacccttaaataaaaatggatatttcatttacaaacaaaatttaatagaagatatacgttagcagacatgctcaacatgtccgtcaaaaacattttcatggccatgtgggttacttaattgactgtactcttctgctccacacactt

SEQ ID NO: 6695 - DNA, 571 bp, Arabidopsis thaliana landsberg
ctgagtttgtttatgtatgtgtgtgtgggctccggcttggttcagagagctgccgttaggggtactggtctctctgccatcggagcaagtgatgcagtgtgagtcagatgaggattttgtcaaagttgtgagacttttacctcaaacagaagcttctcttctcaattgggccatcaatctcatggctgatgttattcactttgagcatgttaataagatgaactctcgtaaccttgctttagtctttgcccccaacatgtctcaggtcagtctttttttattaccaacactaaaatgcacaagttacactctcattaagcatgtgtttgattaatggctgcaataaatcaccgtatagagagctaatatgacagttaaatagcagagcatgattctacaacttcggaggtttgaaatgtattggctctgttttggtttttgtgtgtagatggcagaccctttaactgcattgatgtatgcggtccaagtgatgaagttgctcaagagcctcacagagaagactgtgagagaaagggaagcttcctcttctgtggttgacagaagatgtatc

SEQ ID NO: 6696 - DNA, 1532 bp, Arabidopsis thaliana landsberg
ttttatattctatattatcaaaaactcataagaggtgtggggttacatgtaacaatcctatccacgcgtcttttacaatacgtgagaacacgcgctcctatttgtgtggacattttatttttggcttgccaattagagatcagtgacgtctcatctcttcctacccatattgtctaaccaataattgaccatcacatattcacatttatagatttcatctttacactattgtttttttttcacttatcaaaatatctcaaccgaccctgaaattaattaggatttttaaatcggattttggctcaagtttttgtttttgaatatttaagaaaataaatacaattaagtataagtttagagatgatttgttcttttatttgaagtttttgatttttttttcttattaaaatgacaaaaagaatgatttgagttcttttcttttttggctcaagatttattttggcccacttttcttttcaatattattaagaaaacttgactcataattttttgttgggaaaaagaggaaatgagaaaagggataataataacaaacaaaaaaatgatttgatgttggtttgggttccctctttttagttcaaatataacatgagtaatagtggtaaatgtacattatttgaaaaattgtaaataatgcactatctactatttattatctgatttgctactctttttttttttcagtttcaattatagttcaacatggagttatttttttgtcaaaccccatatgatatcttatctacaaagaagcccataaatcacttatcttcatttattttagatccacttatttttaattctttttttctgttttgattccgtttcaacttgttggatacatataacttttattgtttcgctatcgtatcaaaaaaataatttggatttttcctatcttttttttcttctaacatacggattttttcctttccgaaattgaactttctaataaaaaaattcggaacaagtcaccattattttagaaaattaaaaagagtgacgaacgaaaacattaaaatagaaaactaacaattattacacttatctcatttggcttttatatataccccaccaccatctcttgtccatcatacaatcgtcttcttcatcattttctcttcttcttctccaagaaaacactgaagaagaaatggggttccttaagccaaccatggcgattctttttctagcgatggtcgccgtttcatcagccgtggacatgtcaatcatctcctacgacgagaaacatggcgtctccaccaccggtggccgtagcgaagccgaggttatgagtatctacgaggcatggttggtgaaacacggcaaggctcagagccagaactctcttgttgagaaagatcgacggttcgagatctttaaagacaatcttcgtttcgtcgatgaacataacgagaagaatcttagttatagattgggtttgactcgttttgcggatcttactaacgatgagtatagatccaagtatcttggagctaagatggagaaga

SEQ ID NO: 6697 - DNA, 1245 bp, Arabidopsis thaliana landsberg
cgaaggattatttcctatctttatccctgcgacggcttattgttctgcattttcaataaccacttttgcatctacacgctcatggtgtgtaacatgtacttgggggaaactaggttgattcaaaaccgtagcttgttcgagagttatcagaacttttgctcgtatgctttcggatatgatagcagcaaaaaccgtaaccacaaaatcttgagaaataattctgtttctggtggttatgaaatctacagtttaaaatccgattcatggaaagatcttaatgttgatctcgagaaatctatacatctttggcgactaggaagcgtgtctttgaagggaaatgcttactttcgggttataaaggtaattgaagaaggagtttgggaatataatttactctgttttgacttcacaagagagagttttggaaagcttctgtctctgccgtttgagtctttgggtgatgaaggagaaggcattatggttatatcttgtgttagagatgatcatcttgctgtgttatatcaacgtgacactttaggtatttggatttcgactgagatcgagcccaacaaggtgtcgtggagagagtttttgcaagtggacttggcgacgctggatggttttccggatgtatttatagctgggagattcatcgttgacgaggagaagcaagtcgttgtagttttcggtcaagagacagagttggatctcaaccacggaaatgctttcatctttggaagagatggatacttcacctcttttaccgttggagatgctccgcccgaagacttcacttcttatgttccaagcttagtctcattgcaaatcgacaagacgggtaaaaggaaagcaagagatgactagattgtttcttatgtttcttatctctcttttgtttcagtcatttactttcatctccttctgaacaattctgctttttcatgtttatttgggatatttgctgctgtgataacatcttgatgcgttttctgtttttacttcatttcttttaattttattgccacaacaacaaattacaaaattataacaaaataaaatgtttcaagacctaaaattggtaactcgccaaaaataaaaatcacgaaaagggttacaatatggaaaatgttacaagaatcataatagtgacacagaagcctcttgagagactccttgaagtagcttcacccgcggcaacttcagtcgaattcaccactgtctgtgtcctatatccgacctttttgc

SEQ ID NO: 6698 - DNA, 566 bp, Arabidopsis thaliana landsberg
tgggtgtgtttgtacttggtgcttaatctaacaaaccgtatacggactttggttattatcccaaacggggacgattttgataatttaactaaatcaaggggttagtttttatagattagaaaaagcatgtttttatatatatatatagttcattgcttagacctaattgagtatgtttaagtatgaagaattccaaagtagaaccaccgtatacaatatctccattttgaggttggattgcttattcatgattaaccctaatctcttctaagaaaacacctaatctctgccgcaagctattgtgattcacgaagccgaaccaccgcaggaaaagaagaaaccaaattcatgtccgtcgtttttgtcccttcctgaagaaatccttgtaaactgtttagcccgcataccgaaatcgtactacccgaaactctccttagtctgcaagagcttctgctctctcatcttatccatggaactttacgtggagcgattgtaccttggtacacatgaagacgtccttcacgtctgattacagttgaccgatcctcgtaataaataatgcttta

SEQ ID NO: 6699 - DNA, 926 bp, Arabidopsis thaliana landsberg
  unsure (1)..(926): unsure at all n locations
cctcgaggcatatgtacccatgcttgacaactatccagaacaaaaagagcggtagatgatcatgccgcatcaacagcgtgaatgcaattgagtgcctcttgaattccgccagcaccgtgttcaagatcaataacaatgaagtcatatatgaacaaacattatagtcatttatatatattgtttgtagaagatatagtttgaaaatttaacaaataaggcaactgatgataacgtttgcaattactaaattaaatgtatatgaagaagtaataaataaaattattcaaaaataactgcgaaatttatttcaaaccaaaatatgaaagtgtagaaagaagtcatacaaaacaataaataattgaagcctaaagaaaaaaattcttcaaaatgaaataaaatgttatgaacaacatagtatattaaactcctccaagaaacaccttttagattattttgaaaccaaatcctcttccacgattccaacacttcctttgacaatattatctccaatactcggaatgcataactttttggatgacgatgattgactttcaagaggatcatcttctttgtccttacgcttggatgacgtagttatcgaatgagtagccaaagattcgactctctcactactattacttaacagtagggtatcttacgaagaaaacatttgatttaactaaaaactcacacgaaatataaataaaattnntaannntcaataaaatataacctgatcaactgaaacaatagtctgaagatcgtcaagaacattagaatcaccaatggtgtcactttgtaaaggctcacgactaacccaagcgtatgcaactttgtatgtgtcattaccatcgttgatgttatctttttcaattaacaccacaaactagaatgtttcttatcaaattcaccaagggttatggtag

SEQ ID NO: 6700 - DNA, 416 bp, Arabidopsis thaliana landsberg
catatctaacttgtattcaaagtctgcttaaccttttaatttatcaaagtagatcaaggatcctagtgttctgccacaacccttagtgaattttgttggaaaaacattccagtttgtcgtatcaattgagaaggacaacattaatgatggtaatgacacatacaaagttgcatacgcttgggttggtcttgagcctttacaaagtgacaccattcatgattctgacttgcatgatgatcttcagactattgtttcagttgaacaggttatattttactagaattttaaaatttttgttatacacttcgtgattgttttttatgttattaataatgaaatattttggtaggatacaatgtcattaagtcatagaagtgatagggtcgactctttaaaaactcattccatgactccgt

SEQ ID NO: 6701 - DNA, 2165 bp, Arabidopsis thaliana landsberg
aaccacggatgtcttcttttatctgttattaaaatttctgataccgctttgtatatgtgctttgataggactacatgttttatgtgccctgataatcttcggaaattgaaaaagtcaaaccaaaaaaaatgatttgcagatcggctaatgaagaacagttcaattaaaagtctaatagatagtcttaaaataaagaaaggtttgatagtcaatagtcatttcgtgtctcagatggattaccaatgtaatatataatatatgatactatatagttttgagaaagagactagatgggaggcatgtatcatgactttctctatttctttttgttctctctcagttttccaatattgcgtataacttttggttttgagattttatatataaagagtttgccagaatggtatggtgacacccaaattacatctcgatctctctcttacaaaaaaggtatcttacttgtttgtctctagacaaacactatatcgtctttcttcctcctgtcttgcgtccttatttctctcttttgatgcgtttttaattgcaaggagttgttttttttttcagatgaaagaccatattcatgagcatgaccacatggttcagatttgtggggaagtttcatcaggagaaacaagcttggtgggcatcaagaagacatgtggagaagcgccttgcggattctcagatgccaagaccagttcaatagaagctcaagagcgtgcagcatcaatgagaaagctattaatagctgttcttctctgtgccattttcatagttgtagaagtcgttggaggaatcaaggccaacagtcttgcgattctcaccgatgcagctcatctgttatctgatgttgcagcctttgcaatatctttgttctcgctctgggcttcgggatggaaggcaaaccctcagcaatcttatgggtttttcagaatagagattcttggtgctcttgtctccattcaaatgatttggcttcttgctggtatcttggtttatgaagccattgttagacttaacaacggtagtggtgaagtggagggatctcttatgtttgctgtctctgcagttggcttacttgtgaacattgcaatggctattctgttaggtcatgaccatggtcatggtcatggtcatagtcatgacaatggtcacggtcatagtcatgatcatggccatggaatagccgcaaccgagcatcatcatgactctggtcatgatgaatcacaactatctgaggtcttaatcgagcaaaagaagcagcgtaatgtaaatattcaaggggcttatcttcacgtgctgggagattcgatacagagcgtaggagtgatgataggaggagcaatcatatggtataagccggagtggaagatccttgatttgatatgcacattggttttctctgtgattgtgttagggacaacaattgggatgcttaggaacattctagaggttttaatggagtcaacaccacgagagattgacccgacaatgcttgaaaagggagtgtgtgaaattgaagaagtggtggctgttcatgagcttcacatttgggcgattactgtcggcaaacttttgttggcatgtcatgttaaaatcagacctgaggcagaggcagatatggttttggacaagattatcgattacattaagagggaacacaacattagtcacgtgactattcagatcgaacgtcaatgaagcaacgtgacaaggtgtttttgcattatcatatctactttgtctgaccattttgtaatgtttgtcttgtgtacaaaagtgtgtttttttcccaacgtatgtatcatattgtctataattgttttttggtttgaggataagccctgcgttaacgatcaaggacaaagtcccttttcccctgtttctagatctgtttcgtgttcttcacgaaatctttatttctatgtatgttaacaaaagggaactgctgatgaattagaagatgctggggggggttatctatagaaaatggattataaaacgctaattgaagatcatagatgaagcagagcagatataagcattgttggactaagctcagttatcgaccatgactctggtttcggtttcatggaagttgattctcaattttaaacacttaacgtttaagaagaagaacatgattttcaggcatcatcacc

SEQ ID NO: 6702 - DNA, 2872 bp, Arabidopsis thaliana landsberg
cttcattaaaacctctgctcgttgtgctagctcatcacactccgcctgaacacagaagagaaaaggaaaagcttttgatcattcatacttgataggcatgatgatgctagatcagcttgaagaaacatgtttatgttacctgtttacgcaacctggatctacgagcagattccctattggattgcttccgtctctgtcgcttaatctctctctcatcctgatttcacaaaacaatcaaacacgctgcttggataaacgtaaaggagaagtaagattaggagatacttacagaaacctgtaaccatggctgtgattgggaaccatctactacaactccaggaactgctccagaaacattcccatgaccgctccaataatccattccgatatttagatttgttggtgggcctggaacacctgtagccgacactggcatgatagcgacggtctggttcactggtagattacttccattacggggtggtccatgagcagaaccaccactctctgaagctgtttcaccttgaattacgaaacaagaaagagaaacctcaaaataagcagattctaacatgtacgtcattattacatgttaagagatgagaactaaaaagctatattagctaaccatccttcccgttgtgtctagagccagagtcctacaaaaatcaataccatattcataaacgctccttaattttcatatgaaatccaacgcaacgatttaatgaaatgctagaaacttacgttttgtgaatttgcatcacttccgtcacttgatccatcagaaccgctctcagcactgttaaaccgagaacaaatcagacaatttcaacaaaattatccaataacattatcatagctagagctagcaatcataagtattcatgccaatatgatgttcatacaaatatgaagtcacatgccttttagaacaagctccattagctgatgctcctgagttttttccagcttcattgatctttcctataatcatattcaaacttcccaagcttccttttgatcttttgattggcaatttttccttcccatcaaatggtttaccatcaccctcaataacacttgcagtattaccctgaatccaaaacattcttcagcaagatcccatctgacccatactctaataaaaacagtgataacagagaaactcacagaagcttcagccatgccatgaggagaaggcattgcatagggactatatggataagacccctgttgcagcacggaacatgttaacagaaactacaaaaacattcacttttttgagtaacataactgaacatccaaactgtaacagtaccggaggtaatgaaggatgagcatacatgccacctggaggatacatcgtaacatacggatgaggcggtgttccataaggcggcatcatatgctacaaaaaggaaataacaatgtcttaagttgtcgttacattcattcattaacctaacgtactatatatggtagaaaatattaatctcgattaaatctacacaagtgaccaagggaatttatcccaagtatgcaaatatctatagtaaaagttttgggactcgtcaactaatcccctgaagctccaaagaatgcttaaaatcatctaaaaaaattcgatttacctgaacgccccacatataaggatgaggttgaggacttgatgctacataaccatgaggcggcataggagaataagcctgttcaacaagaaaaacatgaaccccataacaccaaaatgcaacaaagaaacaaagaataatctcgtattagacctggaagccagaccaatcttgagtaacagccactccagcactcacagcagaagaaggttcctaaaaacacaaaacattaaacatcaaagcatgacactaacaaaaaacattttgctagaccaaatttacaccaaaagcaaacctgtgaaacaacagtagcaggagcagatgaagaagtcgaaggcggtgtagtcttaggttctttctctttacctgatttttccatctcactgctacccattaatcacattcaccaatttccaaaaccagtgaaagcttcacacaagaacagaacaagttctgcttataaataaaaaacctaccaaaatccaacaatcagatttctccaacttaacattgatcaatacagttcctaagcatatgaactgataaaaccaaggaagctaaaaaggtcacattttatctcagggtacaaataaaaaacgtaactttttagttaataatgccacgataacaaaaaatctaaagaactacaccgattccagaatctatgcaatgtaagaaactaaactgttactgaattattgttcaaacgtaattaaaactatagatcaggggaaaaattacctgaagatctgtaatgtttgaggaatctgaggaaaaacagagatgtgaaatgaatataaaaaaaaggtttgatttttgcagaaattggagtgagattgattagaatcaaaagaggtagaaattttttggtgattggttcgtgtcgtgtttctgacggggaagaggaggaggaagctgcgtgggcttgacagggaatatattatttaaaattaagcccaaatctttcttttatttatgcaattaaccccataaaacctatcaattgcattgctgttcccacattttatcaattacatataaagatctttatttcttacaaatttagaagaaatagtgaaccggatttaaaccggattattgttgacgtgaggcttacgggattcgatagagaaaaagtagaaatagtgtgaattctagggtttaataaagagattattagactcacgaagaagaagaagatagtagtattcctatcatattaaaaacaaatacgtatatgt

SEQ ID NO: 6703 - DNA, 6849 bp, Arabidopsis thaliana landsberg
aaatttcacaatcaaggcgcaaagttctgagggacttcatacaaactggagaaggaacatccacaagagccaaatacttgagaatcaaggtctcaagtgtactaaacatgctacttattggaaatctgacagacttttgtaagcaaagatcgagcaccaactcacgcacatgacgttcaaatgcaattccaatccatattccaatatctatatcatcacatgcaggtctatcgtcatttatatcacaaactttgagatgaaaactctccaaaacaggagctttgtgtaaaaacaaagacctgccaacattctctgaaaattgatgtgtaaaatgatagttagagcttaagtttgggtactatcttccaaagagattgccatcgtttagacaaaacactcgtggttatgacttttttcgttggaagataggacaatataagtagaagcaaatcttcaggcaactcactgatcaagtcctccctcacaacacctcgctttctctcactttcctccaccaaaaccaaagaagataatactaaaagatcagttagggtttggagtttgcgttacaaaaactatctacgtgaatcaggaagcatgcttataagaacataacttctcaatttttaaccggagttccatttgggttgataggaacaatgaatctcgcaaaactgtccaaatatatgccttccctatgctatcgtatcaaaaaaattcaatgcacaagcaagctaaaaaagagattcgccagtcgaatctggctaacctagctttatgattaacacttgtaagtttagtttgtaaaaggatcggcgaaaattaaaaccctagttttagaggttgctgacatcagcaattttttaataagaacataaaatttatccatagcggtcaatgcttgattttttttactaaaccaaaccgtgttctggttgttgtcaaacggactattttagattctaattagattaacatataaccaaaaaattattactaggaaatttttccttgacttctgaaaatgtaaaactttttatttgtttgtccctcaaaacaaataaagctaacatgtcgtaaaagctttataggataagaatgagtctaagatcattcaaacccgaacacaaggtggcaagaatttgaagctctgacttatacaacatgattgtatcataacgatagataaatatcaaaagtcaaaaccctaaaccgatccaaatccttcataccggtaaaatttagaggctctaagagctaaggagagtctgatccaagataagatggatcaaatttgaacacaagctggcatgaatttgaagccctgaccacaccatccaatccgttgagcaccttacgtctctctttcaacttattgagctcttccgagtcaacaggatttgtcgagaaagttgccttgttcaatcgtcttgcgttctttagaatgtatgtagctatttctttctcttcttctcttccccaatcgaatcttctccacacaaatgtctctaaatgcgacaacaaacattcagggacatactttggctcattccatttgccgcccggcaaaccatttttatgaaatttcacacaattctgagaccaaagagacaataatcattcaatgtatagcataaacgagagatcatacaaaaatacctagctgactaataataaaatgtcttacatcagtgagcttgagaacttgtagtttaggagaatgttcgagcatgagcgtaagtagatcccaccaatctattcacgtgtatacatctctagagataccagctgatagaagatacttccagtaggatatgtaatctattcatgagaccaaatagtattattattagtgtatagagacaatgaacaacaagtcaattgacgattgcaacattaccttccagggtgataaattcaacaacaaccgtttgactgaagtgagatatccaagaaagttgtcattggttatagatgtaccatcaaaaatatttgcctccattagctccggcgcattcagacaaaacccgggacatcttaagtcttcaatcagtaagtatttcaaagaaggagcatttatcacatatccccaaaactcttgtccatcatggtcgtcattaatcgttaatctctgcaaagaagggacctcgtcaacagtgaaaacctcaatatcagaatcttcacctcgaatcacaagcaattcttcaagaatagggcagcctgataaaaggttacggatagatgattcgtctttgtagctcacaagctcaagatggagagtcctaagagacttcattactaccggagaagagatatcaacaagaatcaaaagtacgagtctcaaagtctcaagtgtgttgcaagtacacaagctactcggaaatgtgaaggtcacacccctcccgagctcagcaggataaaaatcgagcaccaattcacgtagatgtcgagaaaaagcaattccaacccaaagtccaatatctacaggattaaagttaacaaatttgagacgaaagctctctagaaccggagctttgtgtgaaaggaaagacttgcaaacaatctctgaaaatgtatagtgttcactttcgtaatcatcagaatcgaactcgagatttggcaccaacttccagagagaccgccattgtttagacaaaacacttgtggctacgacaatgtttgttggaagagaagacaatatctttagaagcacaccatcaggcaactcactgatcctgtctttacccataacaacgcgaattctcaaactttcactaacaaaaaccaaaagaagacaagattaagaattagggtttcgagcttgcatatagaatgatttgttcgaagaaaagacagtatctttaaaatcaaagcttcgggtaacagattcatcctatcctcattcacaaaacttcgatttctcaaagaatcgaaacaaagaaacatatgttttatcggatttcaaatgctctaaacataaacgaaacaaagaaacttaccgctgttccattggttcaatgtttctccggtgctaaaatcgcatttcaaacactcaacaaagtcgaagaaagtactgaatctctcgccaattgaaagactttagttttttttttatatattgaaaatcaaaatctcggttttgtttaaaatctaaccgaatccgaccggtttacttatttctaaaataataccaaaatgttaatgttaaccaacatcgctcggaagaagcagaagattgtatcatcattcattcatcatagagaatagagatagagaagattcagaaatttttcaatatccaatggccaaatgtaaaaccattcaataaaagcaagattgtataagatcattcgaattcgaacacaaggttgcaagaattggaagccctgaccacactatccaactcattgagcatcttacgtctctcttccaacttctcaaggtctttcgattcgatgggatttgtggagatagttcccttcttcaaccatcctgcgttccttagaatgtatgtagctacttctttctcttcttctctttcccaatcatatcttatccacacaaatgtctcgaggtgagacaacaaacattcaggaacatactttggttcgttccatttctcgctaaccacattatctttacttacatcctgagtatgctgatgagaccaattcagaggaaaatgtgttttactattagaccttcactaatttaaaccccgaagagagaccatcaaaagtagatagctgaataataaaatgatatatcttacatcaatgagcttgaggacttgtagtttaggagagctatcgagcatgaccgtaagtagattccaccactcttctctacgtgtatgcatctccagatataccagttgatagaagatactaccagtaggatacacaacctgtgcatgaaacaattattggtatataaatcttgcaaataacaatgagataaccaaaaattcaatagcaaggttaagttaccttcaaagctaatatatccaaagagagacgtttggctgactttagtgaaccaagaaacttatcagcgatgataaaagaaccttttgtaaaatatgcctccaccagctccggcgcattcagacaaagctcaaaatctttatataacccttcgattctcaagtatttcaaacagggaacattaatcgtatatcttctaaactcttttttgtgaagaacgtcacaaatctcaagtctcttcaaagacgggacctcaatatcgaaattcacaacattataccaatattcatacacaaccaaattttcaagaatagggcaactagataacaagttacggatagattcttcatctttgtagctcacagaatcaaggtgcagacttctaagagatttcaaaagaaccggacaaggtatgtctacatgaatcccaagtatgagtttcaaagtctcaagtgtgttacaaatacacaagctactcggaaatgtgaaggtctgcttcggggcaacatagagtaccaattcacgcaaatgtcgagcaaacgcaattcctatccaaagtccgatatctacaggattaactgactttaatctaaaactgagatgcaaactctttagaaccggagctttgagtgaaaggaaagacttgcaaacaatctctgaaaatgtatagtgttcactttcgtaatcatcagaatcgaactcgagatttggcaccaacttccatagagaccgccattgtttagacaaaacactcgttgctatgacaagttctgttagaagaaaagacagaatccgcagaatcaaatcttcaggcaactgattcatcctatcctccttcgtaaaaccttgatttctcatcgttgttatggcgtttgcttttccggtgttataatcgtatttcaaacgctctaaacgcaaacacgaaaattacaagagattgaaactcaccaattgtgagacgagacggcgttagaggatacagaattgaacagccggccggtagggttttggataatgcggggcggatacaaattttgctttaatatgatgatgacgtgagtgattgtgctaatttgaaacgataacaagtttgggccttcattgggctttagtaagcctggaccatacataaaataatcagaaaaagacatgaataaacaaattattttttaaaaaacaaacaggaaaccaatgatatacagaacacgagttaaacgaaccccattgctacccgcaaattcttaagagtcacacaaaactcaaaacagatggcacaaagacaaaaacacaatggttaaaattgactttttgtttttcgtgtcttggttggggtgtttttcccaataaagaaaacataattatgaaattactaataaggattgtaacggcttcgtcctctaccgttgtcactacttcgtttgctgccgctgctgctgctcgaaccgctgcctcccctatacggtggagaatgccttggtggtggttgcggcatagctgctagtccaggctgttgcctataacattcaacacgtcagatcagtacatgtgtcttatatatacgaatcgcatgagatcagtatagaggaatatagaaaagaacttacaagacgtatccgattcttccatcgggtaacatgattggcatcatcgacattccaccggctgcgtgacctccggcatgcattaatggctgcacaattcccacaaatttaggcttaaattgttataacgttttctcaaaagataatgatttgattgataagtagtagaaatctcacttgtgagtaggcagaagctccaaatccaccgagagcaccaaagggactaggagccatgccataactaagaagaggaggatagtttggttgcaattgtgatttctgcacattctgaactgtatttgtattcgtcttttgatcagcttgaggctttgccagagtacaatccaacatatgacctatatacaaatgaggatacaatttggtatttagacatcaaaagatgtgaggatacggaagaatattattcggaatggaacataccatcaatctcatatctttcagtgtttttcaaagctcgcatgacacttgtcctctctgcataatgcacaaatccgtatctactgtcttcctttcctggttttgctggtgggatcaccactttcagtattttcccgtgatgttcaaataatgcctttagacgctcttgtgttatatctctaggtaagttcttgatgtacaatgccttgacctgcaatcattccacacagcatattagtaagatctttttcatggttttgaaagaaaaacatttgaacacatgtctctttgttggtaagataactgttgctgcttctattatttattagtaagaaaggttctaatgaagcaaacctgggaagccgaagaatctcctcctcctccactccttgattcagcccagcttacagttggggcattatcatcaagcttaaaactcggatttgacattttttgtttcgagtattcagcacatgcatggttgtaatactcgatgaaagcaaatccacgattccggcccatattttgtggttcctgtgattttaacaaaaccaaatagaaaaccgatcaactgagtgagaaaggcatgtcttaaatttctatagaaaaaatacttctgtaagttacaaattacacatgaacttgagatgaaagttacagaaataacttaatagacactataggctgaaacttatccaagttgcaggagacaaacctttgggagttcgacaatttgaacgcctggaccaattctatttgctgctttcttaatgtctgactccatccaatttctagggacatgaccaagaaagaaaagatgcttt

SEQ ID NO: 6704 - DNA, 2081 bp, Arabidopsis thaliana landsberg
  unsure (1)..(2081): unsure at all n locations
aatcatttagatgaatttcattaggttacttgttcttgacataaaaaaaaatcagagctttattttatcatcgattggtaagattttcttatgatcacctattaaggatcgggcagaccgtccaaccgtccgtgacctttgacggatatatacattagtgagggaataatgatttactgaatttgattcaatgtttgtgataattacacttatcatatatacttttcgtaacgaatataacagcacttacaaatttattttaaatttgattccacaaaaaaaagatcttgttaaaagtttttgctatataaactaaaacggaagatgcatagataacacactaaaagtttaaaacaaaatacctttctaatcctctttaagcttcgatggtaatggctcaaaaggataggaatagatgggtcgctcaaaagggtttcgaaatgattgataagcggcttccttaccgattcttacctgattcaactgttagagaaccggttgcttctcgccagacggaacatattcacttctttggtggtgcccgtccttttgttggtaatcccaacccgtttgagaggtcgaaaggacggcctattacctgcgacgaggcggtcagactctatggaggagtgcttataaaggaatttcgtaaataagcggtgtaaacctcaagttatgttgaagatgcatggtgagtttgtaaataagtgtgatacgttttatttctgctttcggaaaaagtgcagaccaacacatatgctaaagcttgttgtaacggttttgacttagaataagctttagatcacaaccaagtgtttgtgtctgttatgtatctagctagaagtactatatgttaaagcttatgtaatgtaaaatgttacggtgctatatatgtaaacatatgtgtctttgactctttgtaaacataaataagcatgtatttaaagactttaataatcatgtcatatatgcaacaagctgggcctaatattttagagactcttgtaaaaaagaaatgtatttatattagctaaatttgattattattttatgttttaagacttttaataaatattttgaagtaattaatgtaaaataaatatattaatagaaggaattttagtaatttggtagaatccaatagtaatactaatagaaacaaggaatgaaagcaaacaataatttgatgctgaaaatgataatatttttaatgtattattgaacgtcaaatgtagttcataattcttttccctaattgtttagcagattaaaaaccagttgttatttctttttttaagagaatataaaattttattcagtcaaaaactttggttacatagtatgcatcttttaaattgaaatatccacaagactcaaagtgaaaacacacagcattgggagctaaaacagagcagatcctatcataagcaactacctgcgtgagccaaaccagagtatcaagccatcggccatatacgtcgagcctagtttcttgtgggagtaaagtcagtttccgactattcgcgcagacgaaggctgaaggggaattcacaatttcaccatgtcttcttcagtttctctcaagccatatgaatatatgatgtggacagttgtgtgatgataacatcttattttcgtctattttagctatagttttctaatgttttcaataagtgtttatcacattttccatgctttaattagagtagtttttacaagataaaaattataaatgaagggaattatgatgagcattcaaagacagtttcgtaccattagaagtttgcatccgttgaaggccttctcgaccaccaaataaagcgttcttggagtctatgaaaagctagtagagtcaggatccgccttgaagtacccaaaccgacaatccaaacgtttttatacccgattgaatggagcctgtccagccgcatcagagaaagaaaccaacaacggacaaagccttgatcgccgtgtcctgcaagcatccgtccatggccaagagccctcattgcacgcttacgtcccggtgcacatccactccaagctcaatatgcttcattanagtaaacggtagtgttgtg

SEQ ID NO: 6705 - DNA, 661 bp, Arabidopsis thaliana landsberg
ggcaggtggtgcggaggtttttctttgaatatagggagatgttcggcaccaatggcggaattatggggagtttattacggactccatttcgcatgggagaggaaagcaccgcaggtagtgttggaggtggattctgcgatagttgtggagttcttgaggacagggataagtgatcatcacccgttgtctttcctggtacgattgtgccatggctttttatcgaaagactggatagtccgaattgttcacgtgtatagggaggctaatcgtcttgcggatagattagcaaactatgctttttctttagcttttggtttgcactttttttactctgttccgaatgttgttgagttactttggcgagaggatgaccttgggatagtttgcccaaggcagatcccagaacggtaatttttagttttaagtttgaataaaaacggggggctctttgccgcccggtcacttaccaaaaaaaaaaataacctactttataaacattgtaaccaaaacgttttgtgacctatcatgataatttggtctgcaacatatgtcaacgtaaagtttataggcccaaagacgatcaatattagaatgagtagtagcacttatacttgaaacagtgacccatggggcttaaacagcatctttttgaatcactggt

SEQ ID NO: 6706 - DNA, 3888 bp, Arabidopsis thaliana landsberg
  unsure (1)..(3888): unsure at all n locations
gaggtgacgtcggttcatctccaggaacttcttgatgattaaaagagtaagggagtcaagctaatgacttaaaacatgctcacttgggaggaagtcccatgcctttctctgtacatattttttattttctttgtgatttttgatgcgttttactagtgtttttcatgagatagctgccaatgtttcagtgcaatagatccaatctcagtgtttcactcgaccacatgctgtggagatcgagtgtctctgtgaaatcgagtataaacaaggtttcatttatcactcaatttcattggccacgtgctgatgaggatccatagtcgagtgaattgatgtttgagatcctttatattcaaccatatactcgactaacaatgacttacagaggatttcaggttctcctaattttttcagtcaacagggaactaagctcaaagacaaaacaacagggcaaggaccacacgcgttttcttcctgaagataagatggagagagaatcacagaatacacctccacaacaccttttgaattcgccctcatcctaacaaaaagtatgtttactcgaccaatctcttttcatccatccaccgacactccaatctctctccttcgccacaaatcgccatctctctctcgtccaacgaatttactcgaccgcgaagagcaaagacaccggagcaccactcgtcatactcgactgccgtgaaaagaatcatctactcgaccacctctacgctgctgcagtcaagttccctgtcttattcaccgtcgaaacctcaagaactactcgattttagccgagaactactcgattccgaccactagactttaacgcctcactaccattaccaagttcaccatctctgctactcgaccgtcgatccatgattctgtcctcgccaattccggctcaccatcgaagtactcgaccgcctaatttcaccggttgtacacgacttccttaactttactcgacctcatgttctactcggttcaaactgtgaaagaagaactcgggaatgcatcgatttactcgagtactagattatactcgacgaactttttccatttcattctctgttgataacgattctggtttcattgtggtctttaagactaacatattgacatttgagttttgagttctcaatctttttcaggattatcatgagtaattatagtgacggttcgtcaatggatcctgactatcacatggatgaggctgagtcttcatcttcaaggccagaaagagaacagagagaatatgataacttcaggagaaaagctgaggtagctcgagggaagagagcaatgacaaagaggtatgtgctgatagatgaggatctggaggacgagtatatgcctacgcatactcgcagagccacacaacttctgcacaaacttgatgtattgcctgccgaggagtatatcaggctcttcaggcttaaggatgttctacagtacaagatatccttgctcgactactctggcacaacttggattactggaggatgttcagcacctgtaccagagttgtcaccaggacactctgatggcttacctatatgtagcctatgaagaagaaacgattcagttcctctccacactgcaagtggagctttaccaaggtatgacctctgatgatttggaatgcgaaggattgagattcttgcgattctctgtgtatggtaaggattataggctatcaatcaaacgcttggaaggattgtttggtttcccaagtggaacgggtactaagcccaagtatgacagagaagagttgaaagacttatggatcaccattggcagctctgtaccgctaaattcttctagatccaagagcactcagatacgcactccggtcatcaggtacttccagcgttctatagccaatgttctctactccctagagataacagggactgttaccaattctgatatggaaatgattgctatggctctcaaaggcactcttcaccaaaccaagaatggtatgtctcttcaaggtgaaaccaatgacacacctctctttgtacttcttctgatccacatgtgtggataaaagagatgggctgttagcaataaccacaagagagcacgaggcgctctttgcataggaggtgttgtgacaccgattccggtcgcttgtagagtcccaatcacatctgatggacttgagccacgggcaatggatatcgagcatctacatcactgagagttcctggagtttgcaatggttggcgacaggcaccgtttcaagtttgagcattctatagataagaaagccaacatccttcttcccagtcttgaggttacacgcataatagagggagataacattgattttaagcctgagcttgggaacctctactacgaggacgctcagccattggatgaggatgttcttatagaaaaagctacggaggatgggatggatgaagacagagaagtggagtttgaaactagcatgtatcattttagtgagctcacatgaacaacagcaagctgcagaagtggtgcaagaaacatgataagttactcgccaagtgcttcaagactatcaagtttctgacagataagctgagctgctcctcctccaccactgctattccacagggacaacctcctctggagatgccatcgaggagatttgatgagcctgagcacaggcctgagnnnnnnnnnnnnnnnnnntcacatgtcctggctaggcattcatcattcgagtcccgggagcacaagagaagaaggaaggctacactcactcgatctagcagcagatcacgcctcattcactcgaggagatcactcgaccgcggtgctggccgcagcagaaggagagaggtcgagtatcctcagagcggtgctggccgccacagagctgatgaggtcgagtacccccagggggagctgagacacaacagggagattcgtctatggcctgggagcaatcacaggcagccattgacgagcaactacgttcattcttcgactgaggtaagcgcctcacttcaccattgtattatatcatctgttgtgatttgtttcttcattttgtttctgtgattggatttgtcctgagtactctcttccaagtttattcgcacagtggactgtgtgatttaagtttgggggagggctcaggaagtgtgtgttgcattgtgtatatttttgagtctgcattcatctaatgcatagaaaaaccaaaaaaaattgaaaattttcagaaaatgatttcacaaaataaaaaaagagtgttcatgtagttgcattacatttaggatcgagtctagagtgtttcatttaggattgttgcatatgcataggggatgatgatgagatagccttgtaagcattttgattcaccagataaactcagtgccctcgttgctagttgtctgttgcgtagtcaatgaatttgaaataaaactgaaccatgcctagtaaaggttgattcattgatgagaaaaggtaaaagactttaggtgaagtaaggtaaagaagcagaaaaagtctagtaaatgttttgggatttgtaaagaaaagaaagagttcttgttagctattgaagatgggcaaaagcccttggttttagaatattaaaaaacaggaaccttagttgtttaagaaatcaaaatccgctagatgcatcaaagtgttgagaaagcttctcccagagttaagagaaaagaaaagaatgattagaacaagggcttaaaagattcatgaatgcaaagggtagagttaagttcttatattgggattggagatgggattaccattagagcttcatttgatatactctggatagatgggatcttatctctgtatgcatagcttgggacttacctttagcattctactaaagcttaatcactttttagagat

SEQ ID NO: 6707 - DNA, 318 bp, Arabidopsis thaliana landsberg
  unsure (1)..(318): unsure at all n locations
acccggagacgctgacgagccaaccggaaggtgcggttctgaacaagacaaaccacacgacggccggggggaagagaagcaccacgactccaacagaccacgcgaccccggggacgagaagaaaaccccagcaccgcacgacaccacgcgacccccagggcgaggaccgccaagagagacacgcgaacacgccacgcgacccccggggcgagcagcagcaccaccaccacaacaccgacagncgaacacccaacgccaccacaagggcgaggacagacagcaccgacacgcgagcacgccaccaccaagccgaggacc

SEQ ID NO: 6708 - DNA, 4246 bp, Arabidopsis thaliana landsberg
tgaagaggtttggcgaagatcccggggggctgatcgggcagagaatgccagtgatatatattctactttttgtgagtgggtgctgcatgacacattcgggggggctctccacgtgaaactgcttcggtacgtgactcaagcagactatgatcagagcattcttatgtggcatattgcgactgagctcttataccaaacagaagaagcaactgaaaagaatcaatgtaaccgcgagttcagcaaaatcctttcagactacatgatgtacctcttattcgtgcagcctgctctgatgtcaacagttgcaggaatcgataagacaagtttcatggaagctatagcagaagttaagaagtctggagaagctaaaatgttcttgaagaggaagaaccgtgaggataaagacctagagaaggtctgcgatgagattttatcttctcttggggcgtcaagggaaagaagaggcaggagacatcaacgcaggaatgtgctagctgatgcaagtagactagcaaatgcgcttaagcaactaagtggggaaacgaagtgggatataatgagtaaagtgtgggtggagatgctttgctatggagcaacttactgtgacccgaaacaacatgtagcgcaactgtgcaaaggaggtgaattcataagctttgtttggctattgatggctcattttggccttggagaccaattccagacaacagaggagaatgctagagccagactcattgtggccaagtaaacctctactatgttccttaatttgtccacctgtcgaacaacttgaaactttgtaatcattcttctctaacctgtcaatgggacaacagttggttttgttgctgaataatttgcggtatttggcggatccttgtaacctgttttctctaaatccaaaagatttcaaacaacaaaagttgagttataatctgttgtaaaatgtgcatcaagaggctggtaatctttgctttcgcaagttgcatgaacaacgtcttttctttttcttttttctgaacttaacaactacaagtctacaactgtttactatgaacataaacctcaaagaagcagaagactactatgaatggggactatgggagattaatggatcaccttctttccgtaacaaaggttctatgcaagactcgttccatggttcaatgcagtatggatcaaaggagacattcctttctaacttggctgtgataggatcatcagttggggattgattttttacccatcatgcctcctgcgcaattcttttcgccggaaagcagaaaccatctgttcttcaactgcaacttctcatggtcaatctgtacccgcgttgcctatagagcccaactgcataccgtgaatagaaattgatatgggtcttgcgacctctaggaggatccacagaattcaacagactaatccaataagaggaacaatcgcctgcaccgccaacaattccgatctgctgacacgattctgagaattcctctgcagttcaccgaccaacgctgatactatcctccgacataaatatgtttagggttctcttgggtaggcttttctattgggtttatcacaacaaatactttccgggctgggctgggcctttttactacaataacaaaacagctacaactgattttcgttttccggatttattgtgtgcttggaagagttttgtagaaacaaactgtttttaaaattgtagacaaaaatatcttaaaacataaacaggaggcagtaaaaagagtatcggtaagatgatgtttcaaacccaaagctagtcgtcctttagcacccaaagattcagaatgattagagaggcaacgatccagatgcatcaagctccagctaaacatatgatcttcactcttctattgtgatgatgcctcctcgggctcaattatatcacagtcctgcaaatacacacgcagtgtaaaatgctaagatgaagctaacatgagacgacttgtaaaggagataaaaatatgatgcaaatgatttttgacaattaggatttgaaagtgttcctctcctgctgagttctcaagtgtgctatacaacgttagagatgcaaaagatagctaccaaattacttttttctcggatgatatatagtagaaagttgcaacttaccgagtcctggaattttaggcaatgctcttcacatctcaggttaatgaactttgggcaattctccacttcaaaattcagattagtgagagttgacagttcgactccttcaacaactttctccagattctcacaatgctttacattcagcacttgtaggcttctaggcatctccgagaaaatcgttttgatattcgggcagcaatctaagcttaggttcttcagattctccaacttaccaacagagcttatcgtctccaatgatggaaggtttgtaatcgacaaagtctccagtgatttcaaacattcctcatccacaccatcgaatatgtctttgatgtcaaagcacatccttagccagcaacccttcactgatttggtcttgttaaagatagatgtgagcctttcaggagtacagtccacaaaagacacaaactcagcattagctagtgcctcctcatctagcttattagtttcattgatctccaagacttcttgtggaattttagaatcaactagtgataatagtgtcttcttatatagagccctctctatggggactcggagaagacgttccttgctggcatctcccatctcagtacgatcactggcgctaggttcatctgatcgaatctttcctgtttcttctagaatttcttgagatgtaacaactgcatcagaggagctggcattctcagacctatcacgttcaatgtcttcctttattttgctccatgtgtcaccttgaaaacactttccatctgcccgagtaaaacgctttagacaatggattttggtctccgttggcaactctggtgtctccacttttgttccagacagatcaacttcacgtaggtaaaacattttctcaaatgatccctcgatcttcgtcagcttggcactgccggaaacatcaatgacttcgagattttcgagtttctcgatatctgggatatattctaggttaatgcaatcacgtaggaggagttcattgagactggtcagctcctcgatggtggtagccaactcgctaagattagttcccgagagattaagagttttgagttcaggcttatcctcaaagcatacttccagcattttcactaagctagaagtgccagaaagatcaagaacttggagacctgacaagggcttcaggttgggcaatcttttcaatttgctacagttgcgcaacaagaggcgagtcaatgagtgaaacgtggcaggatccggaaagtcctggaacattggcagtcgctctatttggctctctgagaagtctagaaactgaagttttgtaagacgataaaagtttttgtttttgcttgtgttcgtattgtcaccgtatgtgttgtcgaagcatgtttgaagcccacgagcaccagaaatatcaacaacctcaagatttagtagtccctgcatgtctggcaaatcttttaataaagggcagtccttgatgatgagacagtgaagttccttcaagtcagtaatgctgcgaggggaagatgtgatcttaagcccagagaggtgaagacttcgaagatcaggcatttccataaagaagtcgtcagatattttcttcagggagctagcaccagaaacttcaagagcagttagctttgtaagagccttaagctctttaatactttctagtagatcgcagcccctgattataagaacccggagcaggtggagatgatctgtacaagactggacaaaaggttccagtgtgggttcaaaaagaccaagtacttgatgcattttcagcttctcgaagaactttgcaggagtttcgcgacgcagacgatcgccaccaaccagaatcgtggtaatctggtctgctttctttgcttgcactgttttaatcatatcatgtatctgggtgatgttcccaatacctttatccttgtgaccaccatagactctagaaaatccctgtcgagatctcccgaaatgccctccacgccgaggatcaattaaactgatcatcgccatctctggtaccaccacatagttttcttgtatcttaagcattccacgggttataagatccatcaagatagaatgaccgtcctggtacgccttttcgacagacctaacaggatcaaag

SEQ ID NO: 6709 - DNA, 7708 bp, Arabidopsis thaliana landsberg
ggagagggtcgtgggcagtagaggtagtggggtgcggagagggtaggcgcgacaaatagagggtatgtcgcgagtaaaggggattaaagtcgttaatgcgtttgggtttgggctcgagatttaagagcccaggatcgttaggcgtctgtcgtctgttagtcgtggtaccgtcgttaattttattgggtatgggcttgggatgtcgacaacccagcaaattaattatatttataagtattcatgataattataagatttctataatatttattcaaataattaaacattatatgatatattcttaaacaaaaaatttcaaataaataggaaaattaatatacatataaagcacacatttagtactcttcatcatcttcgatttcatcatcgtctgaagacgataaattacatcggaattcatcctctggttcagcatctccgacatcgtaatcgagtatgattgggtttaagctttctaccggattgtctagtaccagatcttcaattgtagtcagcaatacaacttcatcattttctgtttgcaaaagagtcggatcattgttttcatattcttcagaaatgttggcacgaggattaacttttaaaacatttagccaaatgctttttggtttctttgtatatggatacgcaatataacaaacttgatctgcctgggatgctgcatacactaattatacatattaataaatatataaaattatttaataatttatagagaaccttatgtattcttaattacgtacctagaataaatggctcgtatttattgtatttcctagatgatagaacgtctacaacaccactatggcttcgccaagtgcctctaccaacctttgggtcatacaacttacacttaaaaagtgtgattttcaaattgacgatcccctcatactcgagttctatgatatcagttaaggtaccgtagaaatccggttcattagatgaatccgcgtaattttttcctttaacacataccccatagttacatgtttttcgtccagcgccatgatttttcgtatgaaacaaatatcctcgtgtgaaatacattggccaagttttaaccttgttcaaaggcccatgcacgatctcttgaacccaagtaggaaatggagaagtagggttccaatatgttacctacataataaataaacaatatcaatatcaacataattttaatgatcacttttaaaaattactaaaatgatgtagacttacatattctttaacccattgataatattcttcagctatttacgcgcagagatcaaattcggacaaggtcggatatttcacagaaagaaattcacggaacatactatttttacaaccaatgataaatattatcaaagttatcataatggaaattttaaattagggagtgattaaaaatacctttcaagtggttgaaaatagacacatatttcttaaaacatatgcatgtgcgctttggaagtctttctctgtaagccattctacgtgcatttcaccacttggacggccgacgtgcataaatatgttaggtactccagggacatgatatacaggaacttctccttcatcgaatcttgttaacctgattcatgtaattgattttaattctgaagtatagattgcgaatcgtaaaataaatagttatatttaccttgattttgtttgtatatgatcgtcaaagtagtgttctgaaaaatatgcaatctcgtcattgaaatatgactcaacaattgatcttgctgcatatcttttgttctttgcttttcctttcaactttttgaaaaacctctcaaatgggtacatccaccgatattggacagggccacccaattcagcttcgtatgggagatggataggtaggtgttccataacatcaaaaaatgatggtggaaagatcttttccaagttatagattattaaacctatgttctgtttgagaatttgtacccgacatttctataaagttctcgaacataggtcccggaaaaatgctccaattcctaaaatatatgtggaagttaaataattacataaaaaaaattcctccataaaaaatagttagaattgtacctgataatgcaaggtagacattccggtcaagaagttcagcaaagataaatagaagtagtcgctccataaaaacatgacaatcatgactcttcatgcctgaaaacttaccattctccaaatctacacaactagccaaatctgaagaataaccatctggaaatctaacatcatgtttcacacattgaaataaactctgtttggcttcttctgtcaatttatacggtggaaaaggagctttacccgtactatcaatatgtaagcctggccgagaacaatatttctcaatatccaatcttgacatgatattgtcttttgatttacccttaacacccaagagagtgttcatgatgttgtcaagaaaatttttctctatatgcataacatcaatattatgtcgaagattgaggtccttccagtaagacaactcccacaatatgctttctttgtgccaattatgttccttcccataacctcacatcttcttttcatgaccgttcccaccaacgtccttcgttttgtggatttacactagccaacagctcgtaataaacttgctcccctgtcaaagactcggtggatactcgctagaagcgtctcttcccttcagaaagtctttcttgttcctacgggatggatgaccatgaggaagaaatctacgatgacaatcaaaccagcatgtcttccgtccattgggtagataaaaagactttgtactttccatacaaattggacaagacaatttaccatgagtaatccatcctgataacatgctatacgccggaaaatcgcttatcgtccacagtagcactgttattagattaaaattctgactcaatgatacatcgtacgcatcgactccagtagaccacaactcttttagctcctcaataagaggttggaggaagacatcaagactagctcgaggatgatttggctcaacattcaaaattgtaagaaataagtactttgtattcatgcacatactagggggtaaattatatggagtcaggatcacaggccacaacgaatgattacgagacatgccaaacggattgaacccatcagtacacaacccgagataaacgttacggggttcttcggcaaaccggggatgtaactcttggaaatatctccactttgctgcatctgaaggatgattcatttctccctcctttgattggtgctcagcatgccatcgcattgccgcagctgtcttatggctctgatacattctcttcaaccggtccccaataggtagataccacatacgactatatggtactttggttcttcgacggtcgtccttaggcttccatcttttcgcgccacaaaatcaacattgatcttctttttcgtcttctttccaaaatagcatacaattgttctgacaaacatcaatcgtatgatatggaagtcctaaattgcgcattaacttctcggtctggtaatgtgaagtggttgcctggtttccttctggtaaaaaatctgtaaacatttcgcaaacggagtccaccaacttttcactcatattatactccgccttgttgtgcatgagtcgcgatgctaaggataattgcgactgtccttcacgacaaccatcgtacaaaggattatttgcaccttctaacaagtcgtagaacttatttgaatggttacggaccggttcttccacattctgataactatcatcatgacgatagttatcatcataccccacgttaaaattaaatgcatcgttcaccatatccacatatggatcttctacaatattacccacttcttcatgattctcactaaaatacgtcctattcgtgtaactcgttcctaaatccatattcatttcttctccatgcttataccaaacataataatcatgcataaatccatgactaaacaaatgactactaactcttctacccgagatgatgtgtttttcattcttgcatacactacaaggacaatgaaatttacctcgactactctgtactattggctgactattagcgaatgtcatgaattgctcaactcctgcgacctattcggctgacaaattccccgtcacttcatcaaatctcttgtacatccaatctcgatgaaaaccgccactaccgccataattgtagttttccaccattatacaataaaataaactattattttcttcttttaaattgtttttttttcttttgatgttgttgttgttttgatttgttggtgaaaaaagagtgtcgtgaagttttaatatatagacgaatttttatgacttatttacgattacatgttgtagtcgctcacaaattaggtgtacctacttagcaatgcgaaacatgtttttcaccaactttatgcgacacctttgcgacgtttctacgactacaggccgactaagtcgtctagtcgtcctgtagtcgtagaaacgtcgcaccgtagtcgtataaagtagatggaaaacatgtttcgcattggtaagtaggtacacctaattatttagttgtagtcgtaaattagtcacaaaaattggcctatataataaacgttcacgacactcttctttcaccaacaaatcaaaacaacaacaacatcaaagagaaaaaaaaaatattagttattttattgtataatggcgggaaactacaattatggcggtactggcggtttctatcgagattggatgtacaagagatttgatgaagtgacggggaatttgtcagccgaatacgttgcaggagttgagcaattcatgacattcgctaataatcagccaatagtacagagtagtcgaggtaaatttcattgtccttgtagtgtatgcaagaatgaaaaacacatcatctcgggtagaagagttagtagtcatttgtttagtcatggatttatgcctgattattatgtttgatataagcatggagaagaaatgaatatggatataggaacgagttacacgaataggacgtattttagtgagaatcatgaagaagtgggtaatattgtagaagatccatatgtggatatggtgaacgatgcatttaattttaacgtggggtatgatgataactatcgtcatgatgatagttatcagaatgtggaagaaccggtccgtaaccattcaaataagttctacgacttgttagaaggtgcaaataatcctttgtacgatggttgtcgtgaaggacagtcgcaattatccttagcatctcgactcatgcacaacaaggcggagtataatatgagtgaaaagttggtggactccgtttgcgaaatgtttacagattttttaccagaaggaaaccaggcaaccacttcacattaccagactgagaagttaatgcgcaatttaggacttccatatcatacgattgatgtttgtcagaacaattgtatgctattttggaaagaagacgaaaaagaagatcaatgtcgattttgtggcatgaaaagatggaagcctaaggacgaccgtcgaagaaccaaagtaccatatagtcgtatgtggtatctacctattggggaccggttgaagagaatgtatcagagccataagacagctgcggcaatgcgatggcatgctgagcaccaatcaaaggagggagaaatgaatcatccttcagatgcagcagagtggagatatttccaagggttacatcccgagtttgccgaagaaccccgtaacgtttatctcgggttgtgtactgatgggttcaatccatttggcatgtctcgtaatcattcgttgtggcctgtgatcctaactccttataatttaccccctggtatgtgcatgaataccgagtacttatttcttaccattctgaattctggtccaaatcatcctcgagctagtcttgatgtcttcctccaacctcttattgaggagttaaaagagttgtggtctactggagtcgatgcgtacgatgtttcattgagtcagaattttaatctaaaagcagtactactgtggacgattagcgactttccggcgtatagcatgttatcaggatggactactcatggtaaattgtcttgtcctgtttgcatggaaagtacaaagtctttttatctacccaatggacggaagacatgctggtttgattgtcaccgtagatttcttcctcatggtcatccatcccataggaacagaaaagactttctaaaaggaatagatgcttctagcgagtatccacccgagtctttgacaggggagcaagtttattacgagcggttggctagtgtaaatccagcaaaaacgaaggacgttggtgggaacggtcatgaaaagaagatgccaggctatggaaaggaacataattggcacaaggaaagcatcttgtgggagttgtcttactggaaggacctcaatcttcgacataatattgatgtgatgcatacagagaagaattttcttgacaacatcatgaacactctcatgagtgttaagggtaaatcaaaagataatatcatgtcaagattggatattaaaaatttttgttctcggtcagacttacatattgatagtcagggtaaagctccatttccagcgtatgcattaaccgaagaagccaaaaagagtttattatcatgtgtgaaacatgaggtaaaattcccagatggttattcttcagatttggctacttgtttagacatggagaatggaaagttttcaggcatgaagagtcatgattgtcatgtttttatggagcgactactgccatttatctttgctgaactccttgaccggaatgtccaccttgcattatcaggtacaatatatgttttttaatttgccacacttttttaaacctctgatttaacttaaacacatatatatatattttagggattggagcattttttcgggacttatgttcgagaactttacagaaaactcgggttcaaattctcaaacagaacatagttttaataatctgtaacttggaaaagatcttttcaccatcattttttgatgttatggaacatctacctatccatctcccatacgaagctgaattgggtggccctgtccaatatcggtggatgtacccatttgagaggtttttcaaaaagttgaaaggaaaagcaaagaacaaaagatatgcggcaggatcaattgttgagtcatatatcaataacgagattgcatattttccagagcactactttgccgatcatatacaaacaaaatcaaggtaaatataactatttattttacgattcgccatctatacttcagaattaaaatcaattacatggatcaggttaacaagattcgatgaaggaaaagttcatgtatatcatgtccctagagtacctaacatatttatgcacgtcggccgtccaagtggtgaaatgcacgtggaatggctttcagagaaagactaccaaagcgcacatgcatatgttttaagaaattgtgactattttcaaccacttgagaggtatttttaatcactccttaatttaaaatttccattatgataactttgatttatttatctttggttgtaaatatagtatgttcgaggattttctttctgtgaaatatccaaccccgtccgaaaaagaactctacgcgaaaagagcagaaaaatattatatatgggttacagaatatgtaagtctcatcggtttt

SEQ ID NO: 6710 - DNA, 2689 bp, Arabidopsis thaliana landsberg
ccgaatcagaataatcagcagcaaccgaaactttcgtgaggccgagatcatgtccaccggatgatacatgaaatgctgatccaaaaaaaggaatcttgcatctggaactgaatagaggaaaacacattacatgacaatcacaaagatgataagatttacacttcaatcaaattcactccaaaatcaaaacaatggacacacgtttcttcattattgacaaataccttaaaacagagagattagcagagccacatccatcaaacacacgatttcttgcattgctggttcttttgtaaggtatggaggaagagaactcatccgtgtaagattgatggcaatgagatggacctgataaatacataccaagattgttcactgctcccaaattttaacagaaaaacaaaaaaaaacaaaaattgaacttttcagggaagaagaagcaaaaggagagacctttagaattactaatatcagatttaaagatctctaacaatgacattagcatttaattcctaaaaaaacaaaaaataattaaaaaaaaaacaaaacttgacacagaaataattgtctgaggtctcgtttagattcaaagcagagaaaaatgaaactaatttcaggctaaacgccaaaaagcataaagattgaagaaaacaattcgacgacagagataacccacgaaccaaaaaacaaatttcgatcgagctaaacaaaccaattcgattaaatatcaaaacaagtcaaccaaaaagaatctcccaaatgctttcgccattaatgaaaaaaagaagttaattttaattcgtctctgtcagccatgcactaacttcagattagtcaatgaacaatacatatgaaacaaaatgaagagagatctcgaagaatggcgaagtaccgagggaaaaagaggaagcagccgcgatcaccatgatttacacaaacagagagagcggatcggagaagctgatatctaagccgccgtggaatgtcaaagaatctgatcgttgggaatcctcgtgtccgccgtattcttcgccgtcttcgttgccgtcgctgatcacgtttttgtttggtgttcttatgtttactgtcgcatctattaaatgttgcagagagacttcagaaactttcagctttctttattgtttttattttttttgtttttgtcctttttttgtcgtcatggcaatactgaatttttttttctttctttttacatcatgggaaaggttggtgtggttggtatttttcgttatgcttttgtgaaattttcgttatccttttttctatctgaaaaaaaatgaattgtaatgaattaaaatgatggatatatggatattcttttgattcttttatttaatgctcatgaaaaaactcttgacgaccaattgtgacttgtgtgagttacatcagtttagtacggttttgtttggtataaactctggtttagtgaacctaaatgaaaattcacacaattatgacttgtgtgagttgcatcagtttagtacttgtttagtttttcttctttttcagacattggtatacggaatgaaaattcttccgaggactattcacttcaatcggtaatacgtgcattacgtggtatgttttttacaatttagtttttgttaccaaaaaaaaaaagtcatcattccaccgtttattcgtttcttttcagatattttgcagttttcttttgacttttccgtgatttatatacttcacgttaccaaaacctatatacattgacataattcttttattgttatttgttacgtgaagtggacaatgtattacaaaaagacgtataatatcaaaatacatatgtatatagcaaaccccgagtgaaggttgtgcctctctgtctctctctttacccgttacaaaattcctaacaaaactcaatttggtcgagaattattttttgtaaagaaaaagcaaaataactgatgaagctgaggtattaatccaataatatgactgaccaaaccccaacttacctgaaccgaccataaaatttacaaatccaagtcaaactgattgtgttctgttctttgatgttttctctttttaccatgataagtaaaatgggtaaccgtgattggctcgaatcttaccggtaacctccaccataaggttgctgctgctgagggttgtaaccgccttgacccatcattggattataggcaccggtcatgccttgtggtgcaccaggaggagccatgcccattccttgttgtggttgcatcggatacccttgtccatacccgcccatgttcatgttcatgcccattcccattggatagttttggttcattcccatgggatagttctggttcattcccatggaaaggttttggttcatgcccatgggatggttttggttcatgcctatgggttggtgttggttcatgcctccatagccaccaacattcatgcccgtgggcatgcttgagcctaccattgaatttgttggaggtctcatagcacctgcaccagcgcgacctaagccagtaccagatcccatggctttccccatgttgatagttgatgttacttgttgttgtgtgatagttggtttctctagccgtttctctttcctgttgattgcctcgaagtcaactcctatatccgccaatggatttgttttcactgcacagtaagaaacaaacgttagaaactttgttagagc

SEQ ID NO: 6711 - DNA, 8883 bp, Arabidopsis thaliana landsberg
  unsure (1)..(8883): unsure at all n locations
tctaacgttaattttaggcttcattcgctgccgacgaagcaatatgtacatgttctacatgcaagacaagagaacaaagattactgatatgatattaaactattattgatccatatataagacatgttgaagaaccaaacgattgataataatgtggtggagctactcgcacaatgctaatgttaactgtatgtgacaaaattagcaaaagtttgcgtgccatgtttgattcttagtacacatacatgacttttaacatactgaggttagaaaatgaagtacagtaaaacctttataaattaataatgttgggactgcaaaattttattaatttaaaaagtttttaatttatcgataaattaatattttttaattatagagagattttcctaatttggtaactttttaaaaaattttataagatttttttcattatagaaaatatctttctaaaatcaattacaagtacaaaattatatcatgtctagaaaacaataccaaattttttttgatacagtaacacattagaactaaatttcaaataagaataactacaaatttaagtaaaaaaaaatcaaaaacatttcttacatataatgtatatatatagttgatacatttatgtaattattaatctttgtgaataagcaccttgatgaagctggcaatcctcttttgaaaataatgattctgttctatgctgaggcgcgtgatgcatatcactttcctcgatagatctacttatttcggaaggtataacccagtttgctgacccaccaactaaaccaagaccgttttggcctagaggactcttccacatttgccagcttccatcattagcttgtttttcatccgcagcccgtgatctagacaagggagactcaattggagatggcttgttggcttcacaagaaggtgtattcttcatcgcctggtattttacctgtcctatgccagtttcatacccagcagctcttaaatcaagtgattctgaaacaggtcctagtagagatatcggatccggaacataacatggatcttcaaaacgctcatcttcaccgggttgaggaaaaacaaattctgttggaggtgagaaacctaaactactggtagtggatccactagagtacaccggtatggtgaatggcgatgggagcccaaaactgatgggattgtcgaaggttcgtattgaggaaacttgactgggaacctgtgagctctgaacatttggctggggattcgtgctaggtctacttatagtattaacatttgaggaaacaggagcaggagttgaacgagcaaacagttggtgccatgattttttaggttctctactcggttttggctcagaaacaacctgaggaaacagtatcaaatattcagttttcattgacaaaaataagtttcaagtaaattgaattagattttacttgaaaatttatcaagacgaaatcatttataacagaaaacatatgagtgcaggtgaaatttattctttaagcacactagtcactcgaaactatagaccccaaatagatgagacattttggaaagggtacttactggattattagtgttcctttcctcttcattagggacatatttcatagccacgaattcaggaggattagtatgactagaatgagcataggtatgagaattatctgcagaaccaatgggcttgttttctcttgcaattgtagcagaagtattaacacctctcccaaataaacgactatcagtaaaagcctttgaagaagacaaaaatgtacccttcattcgatcaaagtacctaccaccagattttgtaccgttactggtgacattattttctaaaccatgtccatgtctcctttccatgttggggacccttaaattatcaggtgcgtgcctctcatgttccagatgatcactcttattaagcccacgcttctgctcggtttcctttcttgttctcttgtcaacctcttcaccatcagaattgctcttacttgaggccctatctctctcttttcttctctcctgacgtttcttttctgcctccttagtgtctttctccttagcagccactgaaaatttgctgcatttctcggcctcaagtatctcatctctcagccttctccgttcctctactaatcttgctacttcctctctttgttttctctcttcctcctctgaatgctccttctctagcctagcttgtcttttctcctctgcttttctacgtgccttttctaccctactttcatgactgcttgtcccgttctcaccctgcctagccaacatccgcctctgctcagggtcaagtgatgaatcaccaactgatgagctaaatctaaatatctttctccaaagccacaaaatgctcatgaaaaaagaagtcaacaacctgcaagcaaaaacaacaccaccagaatatgatttctccaccaaacaattttcatctccttcaaacgtatcgccactattattccgccaatagcttgacccgctagtccatgtgctgttgtcagaccactcttgcctgtgcaaatatccattctcactccatcccttcccattcaacatctttccacctcttccaacaagatccttcaaaatccctgaatcagaaatctctaatccggaagacaaggccatgtctaaaacaggccgttttgatacatgtccacaatgcgaacacataaatttcccaccacctggattttggtccctgtaaggatttgagcagatacgacaacgccttgtggcatttttcttcaacttttgcagttgaatagcttctaatctttctctctccctaagttgggcatttctacgtaccctccaagtagagagctgaggcatcataacctcgtaccagaacaaagtaaccaagagctcaaatacacaagcaagcctgggagaagtaatctcaaaacgaaaagctggtggaagaagctgagagagagcccatagtccaatcaaaggtatggcaagccaaggtagcatcgttgcaacctgacgagtccacttttgtataacgcacaatatacacattatcctccaaaagccaacaccttttcttcttcttattagacccaatagatggaagaaccctaatgacttagagaaatttcaaccgaggggatgattgtagtcacaacagaaaacccaaaccctaatcttattttaaggttatacaccatcgaagtaaacaagtctctagctcgaagcaactgtagttaaagattgttatagcaacatacctatgtagcaacagcaatggaatcaaattagacgaaccacaacgttctacaaaaagaaatcgatgaacccttgtacgcagagttcggattgatttgttgtgcaatgtgaatcaatcgagagattgtaagaggagacttaccgatagagaggccattgaacaaagcatcagccaaaaagagaagagctttgaaattggggatgaaatatgttcaaaggagcttcctgattcggatcgtattcgggttgaatcacgtagtctcgtggcttttcgttcgaatcctgccaacgaagaaaccgtaaacgcgaaagatttgagaagaagatgaagaagaaaacaaacgaaagaaaatgttacaaggctaaaccggaactaaaggaacgaaccgggtgggtactcgggtcaagtgagcgcctcttaaacgccccacccatatatccaacggtttgttgggtgaaaattgcataagtatataatggactaataatggacatttatatcaaagaaatgttcaaatgacatataaaacattttaaatttttgtttttttaaagttattttataacatagtttggtaaaagctatttgaagtttaagcattgataaagatttgtatagcacattgcacatatatccaatcatgcaatatttaccaaattggtgaaattattttcttggatatgttttgtacatcttcacaaaagttttggaaaaaatgataaaatgaagtaagaagtttcttgcaattttattttcttatatatttttacctcatttaaacacacatattactcaaaatctgaccctatttataatgtaaaaacccaaaacaatgcatgtgatctttcgtctgtgtcatgtacttcgtgctggttggtcgtaaaggtggttgcacggagacttattatataacatcttctttcgactcattattatgcaactccgatcctagctagctaggtaggttcttttattgtgtatgatttgtttcacccctactttttcttatatcttgttttcacagatgatatatatatgttgtattcagtttctttacaagcaaaatgaaatatgagtgatgcagtaattaattatttaaacattacaaaaagaaaaacattatatgttggaatcttgcatgatttatcaagtggtctttcctataagatgtacaaaaatgtataataatatcttgcatgaacaatcaggaaaatacaaattccaatgagagaaactatttgtgtacaagaagaatatacattaattacactgcctgaaacacccagaaggagatgaaaaaaagtgtgagcaaaagaaaggatccaaggccaaagctgtcggagtcagtagaagtggtggaagccggagatggtaaaagaagaagagaagggatccatggatagatccaagaagaagataagacatggagaagcaaaaggagaagcaagagaaagattcctacaatgaacgttccggtttgtaagattggtaatacaaaatcttctaatagtgagacaaggtacgagccgcataggaaccatccgaagagtaccacaagcacaagtggaactattggcgatggccctttgctctccatatattttgctcaagttggtgttgagtgaagatgagcttagaatgtgcagttgtgatcaagtttttaaatacatgatttgttttggatgcatgcggttagataacctaattaacgcaaatttcctttgtatacctttatatatattttgttcttataatatatgatcaactttaattaacactttttaatagatgatatcatcttttatttaaagaaagtaaatctttatagtttttcgacgaatggttataccaatctaagaacattttcgtttgttaaattgttcaactgcctctacgtttgatacgagatgataaacaactttcgtcgtatcaagattagaaatatactttaactagatgaacacccatgctacgcatgggtttttgtttttaaaattgtcggaaaatatgattatggttttttgttgattttgatgttcattttgatattcattttgataaattcatctatttaatataattattattttttatgattagattcatctataactcaaaatatcaattctactacaatatgtatatttatatatttattattctaatatttcactatcatgatcacatactacaaaaatatatgatatattgatacaatgtatgtagttatattacttatgtgtgttgaaacttgcctaacttaattgtaacaaacgattctttattccaaatattctctcgtcatctagtacacaatcacatcatgatatgctggtaatttaagtcaacagtgtaattctcatctctaccatatagttatatagagtctcatgttgttgttgttttggtatgtctaatgtcttggatgactcttacgtgaatgtacagaaagaaggtcatatgataaatcatattcatataacgtaataataaaaaaatatccaactaaaattactaaattaatatgaggttagatagcaaacatttaaactgcaacacaagtaaaattttagccattatgggttaatgactattgataaaaaaattaataaaataagtagaaaagaatgaaagtagtgcttggtacattattatgattttttattcattgattatttttagaaaattcatttaagagtgagattagtggagaatttaacacaacaaaagacttttgattttttctcaattatttttgctagttttttaatttaactaatgtagaatgacacatgtcattttttgtgtgatgatgtgtcactcatatggagagagttggccaactttcatatatatgattcaatttcctattcaatttctttaagttctatatttaaagtttcaattactattttgttattcatcctatttcaataaaagaataattcatgttttgattatgctttattatctttgatatcagaagacttnctccccattggtatctctggcttttgtctacatatatagaatagacgttaatataaattataaatgaataatttaaatttgtcacactagtaaaaaaaatttgtatagctacgagttcgccacgtcgattcgtgacaaatattagactaaccacgacgtagcaacgaaatagccacaaaatatattttaatgttttacgtggctagtttatggctaaatcgtgactataaagccacgaatttgtcatgttactaattcgtggtaaatatagccacacaatagcgacgaatatattcgtagccgaatggtgacgagacaatgtgtggataattcgtcgctatacaatagctacgaacaagcaatgcggttttttcgtcgcatatccaccgaattaaacatcacatcatataacaccaccgaattatacaatagcgtggttatttcgtcggaataaaatagccacgaattggaaaagtggttgagtcgtcacaattacaccaaaagaaacatcaaatcatgtagtcattttcatcaagttgtccaaattgaccattgtggatggtgtcgtaaaagattctaaaatatagccacaaaatagctcgtggtaaatttgtggctttcttgcttataaatacgagtgcgtttttccatcatttatcagagcaaagaatagaaaaaataaaaaccatttgaaattttgattacctttttttgtgttttctgttgaaatgtcttagtattttcaatataaagggtcgatggatccccgtgttgatccattaacaaatagtgtttcaaatgagtttgttgagggggtaaatgtttttatcgaattttcttgtaaccaaccttcttaccaagaaacaaatactattttatgtccttgtgcgcgttgtaaaaacggaaagcagcgggaagcaaaaatggtcatgaaacatcttttacgagtggggtttaagggaaattactatgtttgattgaaccatggagaaacattattatgacgttggagaatcatcaggaacaagtaattttaccggtgaagaagcaacatggccaccaaattatacaacttttcaagttccagaaaatacgtatgagtattttccatatggaaatgtgggcatcgaacaagagattggggcttcacatgaagaagagaatatgatggaaacaacaaacgaagaaccatatcatgatagcgtttttgaagcttttgaagccgccaaggaacctctttatgacggctatccagaaggaatttctcagttatatctctcttcgcatatgctgaaagcaaaatctgattacaacatggtggaagcttttgtagatgagctatcatagactttcaaagctgtcctgccacaccaaataaagctcctgcatcttattacgagacaaagaagttgacacaagcgcttggcctaccagtacataagattgatgtgtacgaggataattgcatgctcttttggaaaggagaagatcgagagttgttgcggtgtcggttttgtgataaagatagataccatccacacaatggaaaaggaaaaaaaagagctaagcaaagaatgttttacatgccgattaaagatcgattgaagcggctataccagttagaggctaccgcaaaggctatgcgatggcatgctgaacatatgtctcccgaaggagaaatgcaccacccgtccgacggagcagcatggaaacatttcaatgagatatatccgaattttgctgctgaaagtcgcaatatttatctaggcttatcaacagatggatttaatcatgttggtatgaatggtgtggcacactcgatttggcctgtgatagtaactccttataatttaccccccagcatgtgcatgaagagagaatttttctttctatcagtccttgttcctggccaaagcatcccaaaaaaagtttagatatttatctccagccactgatcgaggagttgcagagtctgtggattgacggggcagaagcgtatgacatatcaaagaaagaaaaattcacgatgcgagctgctttgatgtggacaataagtgacttcccggcgtatggcatgctgtctggttggatgacgcatggtcgtttgtcatgtccatattgtctagataataccaaatcattttggttaccaaatggaagaaagcatagttggtttgtttgccacggaatgtttttacctctaggtcatatgtacatgcaaaatgttcaagcatttcgcggagggaaggaagtgagagatgatcctccaccgtggtggactagagaggaaattcttcacgagagaataaacaatatttgttgggttgtttagtacagtcgattgtggagggaacgaacacgagaagtttgcccaaactatcgatggatacgggattcatcacaattgggtgaaaaggagtatattttgggagttaccatattggaaaaatcttattcttcgacataaccttgacttcatgcacataaagaagaatttcttcgatattctcatcaacacagttctgaaagttgttggaaaaacaaaagatataattctttcaagggtggttcttgctactttatgcaacagaggtggctctcttctcaccagagatggatcactgctagtacaaatatttagattc

SEQ ID NO: 6712 - DNA, 2475 bp, Arabidopsis thaliana landsberg
ctcgatctcgttctctactatcggtagcttctctagcgacaacaacgtcttgtttctatctccgactccgtctctatcgcttcttcagttgcagactcagttatgtgatatgttgaagaaagaatctgttgagattggtgaagagtatcgtgttgattcttgggttccgttttgtccggtggctcttgatgttcctaagtcacgtatggctgaggctttctctgtgttgagagatttgaagcttccggtgaatggttatggtatggagattggtcttgttgagttttctcctgttcgtgaagtcttctcatttcctcttggtaacactttggagtcttgatctgatgttgttggtttttatgtaatttctctatgtaaagcttcgatctttactgttgaattctaaggaatagttggagaatttgctatttatctatctgaatgatgttttgattgctagttaactactagaacacatagaagctctgtgttgtagtcaagtcgatatctttagaagttcctatgatatgtgtttcatgtctttactgttaaactcggatatttctaaggaatagttggagaattgctatttatcaatctcacctttctcacttctcttattatgttctcatcttttgtcgatgtgtgtttcgatctgaatgatattatgattgctagagttaagagttaggatacaattgaagctttgtgttgtagtcatggttggtgagtaaattagctgttaccatattctgtctcaattctctgtagtttttagtctctggagtttgggacaaggtctgttcaaggtggtcttttagatcgcaatgatccgttgaatgaaattttccgtttggtttctgtgtcatccattttgagtttatgcagtttgagattcttaggacgatcacatggacatttttatgtttcatgtcttcacatgaacactaagaatggtggaaactgttcttcctctgctcaatgttttttgcaggctatgatcatgagtacattaaagttaaacaatgccaggtatgtgcagttttgtatatgtcctgtaaatatgtgtcttctctttcttacacatataactaaaggttgcaatgagaattgaattaaagacatcaccttatactttttaaaatttcttatcctcaagatttacctgagttgtctgagtatggccatgagaaacttgctccaggcattgattggtccaggcaagcaccagtgagtacagtcattgaaacccttcatccatttatttccccagtaatgaattcgggtgcccgtctggtctcattagcataaccctagtcacatccaaaacctcaaactttttttttttaagctgtcacgtttaatctcttcaagctgttctatctgagttgttctgatttccatatcgctactcttctggttgatttcatttacctttaaagggatcgtcctcttgcaagctcctccagtgttgcaagttccattctcaaaataggtaggcgaaaacgtcctgagaattgtcactaagttgtctttgcagttatgacatccattgatgtgcttaaaagcagctgagaaaaccagcttaaaccactggtaagttacagaagatgcaaccaatttcctcatctcctctatgtatgtatattggtctgaataaccaatgacaagctgaaacaatggcaatgtctgtatttggcagatcatttgcccattgctcatcgatcttgtcaatgtcgagataataaattcctgttccggtctggttagcatgagtcctttcgagtccggcccctagaaactttgccatgaggtagatatctttcggagtttcttcctgtgaaaccaaagcaaagaaacgagatttcttaaggcacaagcttaaggagttatgccacaagatcttctccaagaaaaatctcaccattaacaggaggcagagaagagactccatgtggtttctggctacagaatcaccaatgaaattcatctttttgccacagacaagatcgaaaacatatctagaagactacagttggataaattgtctatattgaaaagtttgtgtagagacaatataatctagaaaatttattaattggtccactgtctacccggttggtatcggtcttggtcgaactaaatatgtggtggtcaatatttacacgtggaaagactcaaactttccaagtcaagcgatgtgacatataactctttatctttattatatatgattgttagaagagtagactgcaaaattgaccaaatcatacataccaatttcttcttcatatcttcatatgatgaaatcgaatttggccgttttcttcataacttgtttcttctgttgcgtctttgtgaccagcgattcagattacactttaccaatttgctttcccacgcgatcaagttgagattctgttggaattgaataatgaatttccatctttaactgggaccttacttggaaactcg

SEQ ID NO: 6713 - DNA, 2848 bp, Arabidopsis thaliana landsberg
aggcccataaattctttttaatttgattaatattttttcttcatgggcaaagtggcccatatttaacctcatatatagaggatacaccaggatcgaagcctggcttgataagataatggcaacaaaaatgaaccacctctagcccaactgttccttcttaacgtgtaaagtttgttgttcccataagtaaaaatattcatatataactaaatattcagttttatattttgagctaaaaaaataattttattatttagcaatttattgttttttttatcatattatatttacttattaatgtggacaactaattaaattatagagcgaccgacaattgtgacaaggacactgactggagttggactcggctcaatttaaaggggtagttcagtaatcatacctcacattactacactcttgattaatatataaaaccaaatcagtttttaaaaataagggaaaatcctaataaaggagaagaaaaacagatctgaaatcccgcttgatactccaccgactttaaactactggtttttgtttgatttaagtatagtgttaatgactcctctctccaccttcctttgattctacctatcacttcccttgccgctgctccatcttcatcactaatcactatacaccaatcttagatccgggaagctaatttctcttctccgatcggtgaatgcagttacattgacctcggatctaaccaagctcttctggtttcttcctctctggaattcaaaaaaatggaggagaaatccaagtcaagaggttggtgcggttggttcatcgccattatcgtgctagcttccgtcatcctcgccgtcgtttacactgttaaattgagaacgaagaaatccggtgacgatgacggtggcggtcccgttcctggacctcccggcgccattgataagaaatacgccgacgctcttaagctcgctttgcagttcttcgatatccagaaatgtaaatctttctaatcgtgtcctccacgatctcccgcgaagtttcaaatctaatttattgtgattttgattcctatgtagctggtaaattggagaacaataagataccttggagaggagattcaggtcttaaagatggtagtgaagataatctggatctttccaaaggattatatgatgctggagatcatataaagtttggttttccaatggctttcactgctacagttttatcatggtcgattctcgagtacggtgatcaaatgaatgcagtgaaccaattggatcctgctaaagactctctccggtggatcactgactatcttatcaaagctcatccttctgataatgtcctctatatccaggtttggacttcaaatcatgcatgctactatagctagattagcaatgattctcacttgttagtgttgtttgatgttaggtaggagatcccaaagtagatcatccatgttgggagagaccagaggatatgaaagagaagagaccacttactaaaattgatgtagatactccagggacagaggttgctgcggaaactgctgcagctatggcttcagcgtctttggtgtttaaggatagtgatcctacatattcagcaacgcttcttaagcatgcgaagcagttgtttgattttgcagatactaagagaggctcttacagtgttaacatacctgaggttcagaagttttacaattcgactggatatggtgatgagctactatgggcagctagttggttgtatcatgcaacagaggataaaacttaccttgattatgtttctaatcatggaaaagagtttgctagttttgggaatcctacttggtttagttgggacaacaagcttgcaggaacacaggtaagcttggaagaagaagtaactgttgaaaattttgtgttttgaatttttgcccgggtaacatttatgcttcccaatcattgcaggtactattatcaagattactcttctttaagaaagatttatcaggaagcaagggacttggaaattacaggaacacagctaaagctgtcatgtgtggacttctaccaaagtctccaacatctacagctagtagaacaaacggtaatctcaccttattattgtatagaagataaagcctctcttgacttaatttccttataaagcttggatcttgttcaataggtggtcttatatgggttagtgaatggaactcgatgcaacaatccgtttcctcagcgtttttagcctcgcttttcagtgattacatgctcacttcccgtatccataaaatatcttgcgacgggaaaatcttcaaagcaacagagcttagagatttcgccaaatcgcaggtaacaagaacaaaacatgaaagtctatagataacgaaatagtcaaagaagaagagtaactagagtttcttcatgcaggctgattacatgctggggaagaatccgctgggaacgagcttcgtggtgggttatggagacaaatacccacaatttgtgcatcatagaggagcttcgatcccggcagatgcaaccacgggttgcttagatggattcaaatggtttaactcaacgaaaccaaacccaaacatagcatatggtgcactcgtaggtgggcctttcttcaatgagacgttcactgactcacgagagaacccaatgcagaacgagccaaccacttacaacaatgcactcctcgttggtctcttgtctagtcttgtcactacatcttctactttacagtcgttgaagtgagctttgcgtgttttagccttcttattgaaaatcacattgcttcatttttatttgtaatatataaaaaaaattcgtgggtgtgtgtgtattcacgttgtgtattgcttagtatgtta

SEQ ID NO: 6714 - DNA, 1864 bp, Arabidopsis thaliana landsberg
caataagagtactatttgttgatgtgttaacgtgttagagcatactaaattatgattgatatactaatttatcttaaaaatttgaatttagaaaaaaaaaactgaaaaaatgtgaatattaccttttctaaaaacaaactactctctctaagagcatcttttgtgggtaaaatcgaagagaatgtctacaaatgatttactttaactatttatttgatttttatttctttaaattatttaaactaattaataatactagttgatacgtggagatacccattaaagatcgtgttttcagtgtctccttagaaatttatctgttttgtgcaattaattttgaatttcctttagttaaagatacctccattatttgtccaatgggagtgttctaacatggtctattaattagaaatgatagtcgtttagtatatagacaaattgtcaaacaaaaaagttgtgaagttaaacaaaactatataaaatcaacatttggaaaatcatattaaaaaaatggttagtggtaagatattgaaacccgggaaagtcaacaaagcacatgggatttttagcgaacgtgaactgccgttgaaggcgattgtttcgaagtttggacctcaaagtaacaaacggcagttttggctcgacagtgtgagccgtcggatcatggagataactcatctaacggtaattgcatagtcttttagcgagagccgtccgatctaaaaatattaatcacccagagcataaatgggcccaaaaaaggccttttaaattttttttgaacataagccaattcaaaaatataatatcaacggatcactcaaattttgaaactaatcatctctctccttttttcaaacatacacagagaatggtggattcgaaaacccctgcgaaaaccaaattgttagattcgtcttcgatttctaatgtcagagtcgtccttagggttcgtccttttcttccccgggagatttcggacgagagttgtgacgggagatcgtgcgtttccgtaatcggcggcgatggaggagataccagcgaagtggcggtttacctcaaagatccagatagctggtaatcgtctttttgcttttcccttgttcaattttgattctttattactagaaatttgaatatggatttggtgattcggtgtaatttggagcagtcgtaacgaaagctatcagctggatgcgttttacgggagagaggatgataatgtgaagcatatattcgatagagaagtaagccctttgattcctgggatctttcatggtttcaatgctactgtgcttgcttatggagccaccggaagcggaaagacttttacgatgcaggtctgttaaaagctattaactttcacaatttagaatttacggttagaatcttaattggattctcttcggtctgtgcttccttgtaatggtttcagctctctttgcatttgattatcagggaatcgatgagctaccaggtctgatgccattgaccatgtccaccattctgtctatgtgcgagaagacaaggagtagggctgagatttcatattatgaagtttacatggacagatgttgggatcttctagaagttaaagacaacgagattgctgtttgggatgataaagatggacaagttcatcttaagggactttctagtgtccctgttaagtccatgtctgagtttcaagaggcgtatttgtgtggcgttcagaggaggaaagttgcacacactggtttaaatgatgtctctagtagaagccatggagtgcttgtgatctcagtaacctcacaagggcttgtcactggtaaaatcaatctgattgatcttgcaggttgggttttaccattttccaagcatttgc

SEQ ID NO: 6715 - DNA, 701 bp, Arabidopsis thaliana landsberg
aaacacacaattgttcggtcaccactctggtcggaaatcacccgggggaagaaaaggacgaactcgaaggacgaccctgacattagaaatcgaagacgaatccaacagttttgttttcgctggggttttcgaataatccattctctgtatgtttaaaaaaaggagagagatgattaatttcaaaatttgagtgatccgttgatatttttatttttgaattggcttatgctcaaaaaacttttaaaaggcctttttgggtccatttatgctctgggtgattaatacttttagattggacggctctcggtaaaagactaagaaattaccgttagatgagttatctccatgtccgacggttcacactgtcgagccaaaactgccgtttgttacttcgaaacagtcgccctcaacggctgttaacgatcgctaaatccaatgtgcttagttgacttttccggtttcaatatcttaccagtaaccatttttttaagggtaaattatggacagtaacctttgaccaagttttaatttcaggtcttgacaaagtggattgggcctttcagtaattaaccattgaggcaaaatctgacgaaaatgcccttgtcgctcataactgtacgtacggacgcgttagttataatcggacggaagtacagtgtacagttagttaattaaaaattaatattaatatttttattttc

SEQ ID NO: 6716 - DNA, 8790 bp, Arabidopsis thaliana landsberg
  unsure (1)..(8790): unsure at all n locations
atcaattgctatcagtagaggagacacatacataccttagaaaaattcttggaaccacactcaggtatgataaaacttttctaacacttaagataatcaagctgtgaacagtccatcacattgatttcacaaatttcacgaaagtctcaatctttcacaaatcaaacctgagtttggagctctaacgttagtttcccggcgagactgaaacgcttggctaaagagctaacattgcgcctttgttgaaacccgaacagcttcactgtcgaaatgcagaatagcatctccagccaaactggatggcgcgtgagcaaccaccgctcgtattatggactcgtgtttcgactgcggctagagcagagcggccaggaccagacgatattctgatgcggtttgtttcggttttaaatttcagataaatcggtttgtttttaattgattttgtagatagccttccaattttgactttttgataccttacaaagtgaaatggctttgagagttacttgcctctagcaacagtgtctgtgtctcctcatttttcttccacaatctcaatggagagctcacctcttatgccactattggagaagaaataatcactcgtgccattcttatgtttggaatattattattgatttttatttaaatcgaaaaatgaggaaaggacgaaaaacctttgcgaaaccacaaaaactacaagaaaacgtaatttgttgggctcgggcccaaaaaaaaatgtaaatactcggcctagttgtattatttactcggcccagctgtattatttacagaaaaaacctaagttctcccttttcacttctcgacttcttcctcttctctccgtcgtcgtcttctctcgtctccgacgataccactttcaccggaataatcaatctcttctattcttctttcttctccgttttcgttcgtctttgtctctttcatatccgcaaatttattttccaatggctagagtaaaagactcatctggagaatatgaatcaactagggttgaagcgaccggcgaaattcctccatcagtcgaagagaccgccgccgagattccccaaagagatgaagaaggcgcagagcttcttacaacagaagaggaagccagaaaattcagcctacaaccggcgattgtgacgccgccgatttgggtaattcaaacgccgtcgcatgggaatcaattgacgatctttcagacccaaatgccgattcttgtgcagaagaagaagagacaacgaatgcaattgttcaacatgatgatggagcaaataaggtatgagagaagaccgttattttttggattaggctcgttttaggatattatgcattggtaaatgattggatttgtgaatggtgcttcagataaaacaagtagtacaattaggtcgtaaatttgtgaatggtcattcaggaacaagtagtacaactaggtagttaatgtggaattgaaagtattttgaattgaatatgcaggatgatggtgatgatgataacctgccgcagaatatgcaggatggtgatgatgataacctgccgcagaatatgcaggatgatgatgatgatgatgatgataatcaaccattgccgccagaagttatgtactttgatccaactacctacacgaaggtgtgtaagataggaacgaggtgtcagttggtacaaacagtggaatttatagagactttggatgcagaactgaagtggtttaggaatcatgaccaatttaagcacatattccacatgcctaaggagcccaatcacatgattcaaggcatgtggatgcttatggttcgcacggctaagacagaattggcgagagagtgttggtttgttgtcaatggagtacctataaggtactcaattagagagcatgcattgttgaccggtttgaactgccgtgagtacccaaaaaactataagactttaggcagtttgaagtttgttgagaagttgtttaagaggactgaggacatcaagattaaagacgtggaagagaagctagaagagtttaagagtgagaagtctactgctaggttgaagttggcaattctgttattcttagctaaggttatgaaagctgattctaaaggggattcgaagatagaggagttgcttcttaggattgtggacaatgtcagagcttgtgagacattcccgtggggacgtttttcctttgagaagtgtatggaaggggtgcggagagtaatgaagaacatgaaaggtgtggtgaaacccaaggcacagactgctttttatggatttattactccaggtaagtagtcgagtaaattatatgagtggctagattttgttattgtgaacttgcatttacttttatgtttttgtgtctagattcttacatttgagtgcattccgcagcttgggaagagatttagagaagttgtacgtgcagacaaggaatgtccaagaatgtgcaagcacaagttcagtgaaagttgcatgaagggatttactttggaagaaataaatgaagcacttggagatataacggttagctttgttctcttgaaatctatgtttataatctttgtggtgtttgaaatatatgtttacttgacaggatatttcaagcatcttggaacctgatatggatgagagaaaaatgttgtcacgcgttgtagagaagcatgttgatgatggtattggatatatcgatccaattgttgatagttggagagagaggcttatcgtagagaaaaagaagattttctggcgtagtctctaccaagcagacattgatggtagacgtattgaaactgttgatgatgttccagctgtacctgaaatccctgggacatctattctctcgttccaggaagctatggagaaaggatttgacaagctcacggacaagcttgctttgatggatagcgaaatcaagcggatttgtgtgagagtacaaggaatagaggaatatgtggcagatcagcttgggaaagaggcagaaaaagacaaatatgaagatatgcgtcctggttcagctgctgattttgtgccaccgtcttatcagccaagggatactcagagcaaggccttggttattcacagtggaatccgtgacccagcacctccaactattgagtctctaagtgagtttttgttgaacttttgtgtagtgatgctttcacaatagttcttagatgtttggttacatatttttgtaggtgatggcagcgatgagtccgatgaagaggataagaagaagaagaagaagaagcagatatcgaagaagaagagaaagcatgttggtcctactctggaatctggggaaaaacgtggaaggaaaccttccaagtataagggggaagagtttacaactgaggggaagcaaacgaggaagagacagaagaattaggactttgaaaattctttcttgcttatgtgtgtgtgtggactcttaggtgtctgtcaaaatagaactttctttttgtgtatttgggaatgttatgcgtagtttatgtgtagaggacaaacttattttctgaaatggtttatgtgttttaggattttattaaaatcaaaacgtttggctaagttgtcccggttggccggtcaataatacaagagtagctaagttgtcccagttggccggtcaatacacataacttaaaatacaagagtagctaagttgtctcagttggccggtcaatacacataacttaaaatacaagagtagctaagttgtcccatttggccggtcaatacacataacttaaaatacaagagtagctaagttgtcccagttggccggtcaatacacataacttaaaataggtaaatacatgtctaattaggttcaaatattacataaaatcccgaaacataacatatttaagttcaaatgccatacaccatcctcaataacataaatcacatcataatcaccatgtagaaagtaatgccctaagcctatcaatctcgacttctttggcgagtaacctttctttaagggtttcaatttcgccttgcatgagatgaatagtttcccggatggactccaaagcatgattgcatgctagttgtccatgtcttagtgcggaatcaagtttgtgatttaccttctcaagttcctcagttaccgcctgatcccaccactgaataaggtggtttcgggactcgtactcttcagcctgcgaaagagagaagacttcataaatataattcacttgtactttgttgttccaatgaagtgaaaacacaataacttactttaagcattgggcatttgtagactctgtcgccttgcctgtaaccagttttgcacacttcaagttttacaggcttaccacaaaaacatttttctggaaccccccaatttgcatcggcattcgcctctccactattccaactagcttcggacgtggatggttgagagtaactatagggcatctacaaaacagagaaacccgtaagaaaccctagatctactaattacggcggctaaaaacccgtaagaaaccctagatctactaattacggcggctaaaaacccgtaagaaaccctatatcataccttggttgttgttgttatcgtcggcggcggcagataatgggaacactaatttcagttgtcgtcgccgatgttgggaaggaagaagagagaagaacgagagagaggaagaagagagaagaacgagagaagtgaaatagaagagagagagagagaaagagagattgaaggagaataaataggtagaaactttgtagtgtgaacgcaataatcgtagtgtgaacgcaagtcgtggggtctatttttaaaaaaaattgtatttattagaatattcagaatacacatagttgtatgtatatgtacagttggctggaatcacaaacagttgaactattctaaattttgtgtttttgaagttaaatctgaaaaaccaactcatttttttagttggtcccataagttttaacatattaatggattttaataagttttgatagaatcatatttagtaaatatctgttttcatacataacgtatgtacattggacaatcatgaactatatgttccttgttatacataggtgatttattaggaaaccagtttatgatcaagtttattaataacaatgttgtaatatcatattttggatttattcaatgtttagatgttgataatagctgaaaatattgagaattattttatcattttgttaatcctaaaatacagatacatatatcagttgtctcagttgaacttaaaaaaatacattaaacttgcaaataattcaataaacttgcaaagaattcaataaacttgcaaagaattcaatacaaatacgaaaacataaaacatagtacatcacacttacaaataatataatgcaaatacaaatgaacttagttgtattggttgaacccttcctcaggctgcagccaagcctccaagtttattccaggttgcgattttctcctctttcgcgcttcaccagctgatggaaaccgcttctcttgatttcgtcctggtccttttggtgtgtattccggcggaaaggcaactaactctttaatatgggcaggaagaacccaaaccgactcatgtgggactacatacaacgtccggtaataggccaatgaccaactatctatcaagtaatacacagagcagagtccgtagatggttgtattcgcatttctcccttccttgcgggcgaggtgccttgctgcggccatagcatggacacacgggatcttgtctatatcaaaacatttgcatgaacaacttttcattttcaaatccaccagaaaacttaccgagttgagatcaatcacgttgtattcttggttgtaactgttaagctcaaacacagttaatttggctgcaacttgacatctaatgtgcaatatgttctccacagtaggcacaacttgtgctgtgattggacaagaacctgaatcttgcctatgctcgttgaaccattcagaaaacttagaaatcatcacatcaatcattggtaacaagtgatattttctcgcttttttaaacacaccattaatggactccgcagaattactagtgtcaatgttatacttgtctcctttaaaatggcacctcgaccatttctcaaaccctactttcacaagaaagtcagcagctttaggccataaacttgtaaaatgaccaaactctttctcgaactcactctcagtatatgcatgagcacaatccctgaacttgacagcagctccatccttgtcaattttcacacgatctctcatgttttgacacaaatgccatatacaagctgcatgaagcgcattcgggtacaccgtcttgacagccttctttatgctttgatgcctatcactaataaagaccaatccgggaacatccgaatatacagttttcagcttttctaagaaccaaatccaacttacatccttctcgctatcaatgattccaaacgcaagtggataatgatgatgattaggatcttgtgctgttgcaataaccaacatcccaccatacacagttttaagatgagttgcatccacaactatcactttccgcattgccctaaaaccttcaatgcaagcgcctaatgcaatgaagaggtacttgaactttttctctccttccaactccacataagttactgtccctggatttaccttctctaacatgtaaagataagaaaataacatcgtgtagcttctttccggagtccctcgcacatcactaacatgtagcattttgcctcttaaggcagtggagtatgaacaatgcaccccaagtcttcctcttacaatcgacataatgttttttggagttggggtctctaaatttccgggatagtcacaatgcaaaaccgatgctattaatcttggtgtgcctcgctgtatactgttgcttgtagtctcaacactccgagagcatgtatgcatctttctatgcactctaacactccaaaaatgagatttcttagttctcgcaactcttagataccaagtacaccctttagaagcttggcggcatcgtagcataagtctcaacgggtctgacttaatagtatagactccaaaaacttcttgctttgcagctctgttaaccaattcccacacagcctcccttgaacaaaattcttgaccaatttcaatacccgtaccatcatcccattctataacctgcggagtaacttctacacttcgtggaatatcgtgaatatcatcataatcaatcctaacatcctcatcttcttcctcaacagaattcaccggcctttccatcggcctttcgacagccacgatctccgtacctactacattctcacaatcattcacatcattctcatatccatcatgcaccatctcacctacttcatttaaaacatcatcctctcttacatttacaccaactgaacttcgacgctccggtacagaaatttcctctctcctctcaactcttataccatttaattcctccacatgcgaaactggaatccgactctcttcatcagattctgttaaaaatatgaagacatcctcatcatctacaatatatgtctctctcctaactttagacagattgtaactcagtttcaacttcacagaagcttcatcaatcgcaaccttcttcattatcttgtcaactaacatcgaatatgttatcttctccaaactactcatcttaaacaatatagcatatagtgaatttttaccaatccactcattcacttcagaatagtatcctccaaagttaaaatgtaccttagtgtggatcttcttcttcatcgctcctgaaaatacaaccagttaaactccaatcaaacattttaattgttataccacatgtactcttatcatacgtatagatgaaatcaatctgtcgtcgcactcgatttagaatcgactgaaccttccattcaattgatttccaatgttaatacatacctattcgttaaactaattggttaatctaaactttgcaaacccaaaccttatatctttaatatgaaatctcggaattcaaattcaactcacattcaacctacattcgattgctcatcacctcaaataacgtttcggcaacctctaatcgattagtctttactttgcaacccaatcatcaaactatcatattgaatctgggaattatatataattcaaaatagcaatctaaaatcacaatgcaccattgtcagaggaaatatgaaaaaatttgacctaattcgttaccttttacgacggattttcaagtcggcggtggccagaatcgatggtggccgacgaagaagatgaacgtcgacgaaagaagaagaacacgacgacgaaggagagagaactgaggatctcgattttctttatttagcttttgaatttctttttcatttttttaatcaactcattaagggtacaactggtatatcacattttcggtggcattcagattaacnnnnnnnnnnnnnnnnnnnnnnnnnnnnnnnncataagtgataaaagttcaagaatttgtaggatccgaatttgtaagactatccggttaataattttatttccgaaattgaatttgaaccgaacttacccgaaaattcaaaattaggtgaaatcattcggttcgacttttagggttattttcctctaggcgaactttgttttgtgcttattggttggaaaaaatgttctcgctctcaacttttgagagagagaaatcctcacttttccgacatcgctctatttctttagcgacgccttctctttcggcatcgattagcttccgtagtggcattggccgactctcttccggcatcacc

SEQ ID NO: 6717 - DNA, 1239 bp, Arabidopsis thaliana landsberg
aaaacaatccctgattagctcaaaaccaaaaaatagaaacgccaaaaaataagcgattaaaacgcaaacgcaattggacttaccacaggatccttgatctttgactggattaacagcacctttagctctccaatcgatagcatcaggtaagctatctccaaccttatacaaatacttctctcccttcaccggaaccctagttctctccatcttgctcctcaagtaaatcgcacgaaactcatcgttagtcaaatcagcgaaccgggtcaacccgacttcgtaagtccgattcgggatggaactgtgctcttcgacgaacttcaagttgtctttgaagatctcaaagcgtctctctttctctccgagaccattatagttcttccgattctcaacaagccacctttcatacatccgtcgtgcctccgcctcgtttcgtgtagtctccgtcgctgtgacggagccgagagacaaggagattagtaacactgagaatatcaagagagctagggttatagatttgattgaagtagccatatttgtttgctttttgtgtttgttttcgatttgacatttttgtaactgttgcgttcaagtatttatagagtttgaaacttttgtcgtcgaagagcagaaaagtggagagcgattgggatggatagatgtcttcttcgtattggctccaacgtgtcattattttattttctggaataaaaacaaattgaaaataaaaaacacgtcacatcacatgggcaagataattccattcgtattttgtccattgtttaaattttggttacaagcatgtttcttagtttggaaaacctaattctaactttttacagagtagtttcttgacgacgctaaccattcccggaaggtactaggaacccatatgttacacgcactttggaaacttttaaataacacactactatataaaaattacatacgatatcatattattattatttgatgatgtcgtggtcatacacggtattactattaaaatgtacactaactaatgaaaaatattcctttttcatttcttattttttgtttttttgtgttgcttgcatcttaaaaactcttatattgatcattttaatttttattcaaattaaaaattaaaatgaggaactcttagtccctaagactttagattactattacattatgtaatcctagtttgtaacaacatcatatgtcttgtttaaccaaatattcatatgaacataatct

SEQ ID NO: 6718 - DNA, 1023 bp, Arabidopsis thaliana landsberg
tggagctataaaaatatacctatataatttatgttgggactgtttatgataaaaagtttgtaattatgagaagatgaacgttaaaacgtatattgaaataatggcatatttattctatttgtctgacacaacgcatgtacatgtcccacccatctgtctttcttatggcgaaaactacaaattttacgcattttttccttgtttcgtcgaaatttgaaacaaaggacattctcgttcaaattcattcttttgaaccatcaaagttagtttcaagccaagactattttaaataatacgtgtcaccaaaaaaaaaactaaaaataaaataatgattatcattattcattattaggccaacttgtcataatagttagtgcccatacgaaaaatacatctatccaactaaccctctcgtcctccacttctctctttgttttttgtctcaacgactaaaatttttcattctacaaatactttgacttgagagttgctgaaatatcaagtaagaaaaaaaaaaacagaaggagaaatggctataagttttagagctctagctcttttgaccctctcggtgttactaatttccgtgtctctcggcgtcgtcacagcaacagagtcgcagcggaatgaagcggaggtgcttacaatgtacgagcaatggcttgtagagaatgggaaaaactataacggtcttggagagaaggagagacggttcaagatcttcaaagacaacttgaagcgcatcgaagaacacaattcagatccaaaccggagttatgaacgcgggttgaacaagttttcggatctaacagctgatgagtttcaagctagttacttaggtgggaagatggaaaagaaaagcttatcagatgtagcggagaggtatcagtacaaggaaggagatattttgcctgatgaagttgattggagggagagaggagcagttgtaccaagagtcaaaagacaaggagagtgtggtatgattttcaatatccttagcattatttgatttttgattgtgct

SEQ ID NO: 6719 - DNA, 610 bp, Arabidopsis thaliana landsberg
  unsure (1)..(610): unsure at all n locations
caacgagttctcgcggcgacaaagatatcaactctccggttttgatctggttgatcctttccactgctccaaccgcagaaaacgcccaagaacttcctattcatcgatgaatctcaatcgcttctagctctaaaacgttatccaataatcaaaaagctaagaaaactaaaatgcatacataccacagtttccttgatctttgactgaaacaactgcgccattcgctctccaatctacttcatcaggcaaaacatctccttctttgtacaaatatctctcagttttcaccgaatctttagttctttccatcttcttccttaaataaatcgctctaaactcttcatttgttagatcagcgaacctggtcaaccctacttcaaaagtccgatccggaacagaattgtgttcatcgacaaacttcaagttgtctttgaagatcttggatcgtctctctttctctccaagaccattatagttctttcgattctccacaagccattgctcgtacatcagccgcacctctgtctcgttccgctcaatttctgtctctgtggcgactcccagagacgaggaaagtagtaataccgagagggatcacangagctgagac

SEQ ID NO: 6720 - DNA, 531 bp, Arabidopsis thaliana landsberg
tgcttttattgaatacagttgtagctgtttctgatggtttagctgcgtgggaggttctaaaggagaagtcacataacattgatcttatactaacagagctggatttgccatctatatctggttttgctctgcttgctttggtaatggagcatgaagcttgcaagaacattcctgtcataagtacgatggtgatcccctaagtcctttatacctctaaaaacgcctctttgttagttttttggttcttatgcttttgttgtttgtttgaaatgaatagtgatgtcttctcaagattcgataaaaatggtgttgaagtgtatgctgagaggtgctgctgattatctaatcaaaccaatgaggaaaaacgagttgaaaaatctatggcaacatgtttggagaagactgactgtaaattttttatttccttttttgaggtttccttgtgttgaagtttgaaacttgaaagacttattgtcttttttggttatggatcagttgcgtgatgatcctactgctcatgctcaagcttac

SEQ ID NO: 6721 - DNA, 1659 bp, Arabidopsis thaliana landsberg
ctctcctactgatgaaatctccgggttctttgtattctattaaaaccagaaatctcaaatagggactgtggtaaagacataacattctcctataaccccaattagaagaagaagaattacctcgacggcactagggagtttcaaatgcttgcaacaatcactaatctcgatgcaattcgggttctcacatgacttactcacactgattcttcttccctcagctacagttttctttgagttaatatagactggatatatcactacccatttcttaatgtttatcgttccactatccatctacatatcaagaacgaagcagattaatccaactgctcttaaatcacaacagaaaacgttatgattggataaaagcaacatcaaaatctgaacccaacatttgaaatccacgaaataggcgattaaatccataacaaattatacagatctgtttcgatctcaagcatagagaacccaaatcgtatacatgcgcaagaaggaagataactactatttgaccccacgaaagatcaatggatgctgaatttaacacagagagaagagaaacgaaccagggatcagattcggaaaattcaggaagtgaaattgctcggatcagagatgctcgtatcgccggagaagagcaacgacggagaaagaggaatttcgcaattgagatttataccatctaaaaacttgagccggtctaaaccgtatttaaccgtaccaaatcagatttaaccggagatgaaaaagtgaaattgattttcataagaagaagaagagccaaagaggacctgacttttctcggacttgggagacaatggagactgaatacgaccaagttcttcgatccgttgctcaggtgaacatcgccgaccaaatcggagaatccgacgacgtagaaagagacggaaacggcgtaaaagtttcgtgcttcactgaagttttcgatgatgttactatccagttccagatcatccgtctcgcgaaacaggttcccgccaataaacttagcttggtccttttaacctaattctcaagtctttgagcttcgtcggaactaaaattggacttaatcgaactacagatttacgtatgggtcggttgcaattccgccaaatttgggagtttgtacgcagccgcttcaacacgaccggtgagctcagtaaaaaccttgattctaactaaagcagcaatttttagggtttctgtttaaattgatgtttttttttgtttctatggcagagcaatacagtgagtgttacatcggtacttggtggaacatctgataacactggatctggcattgcgcgtagattaggttagactctgattataacaattcttgcaatttcaaatccttttctttcttgatgattcagtgtatttttctgtgttctagtgttgaagactggtctcaatataatactggcttgcaacatccctaaaaacaatcccttgcttgaggttcttctttttacttgagctattgtattatagaaatgtgaaagggactagctttattcgataatactcattgtttgtttcttgtttgtgttgttgtgtaggcaaaagctgacaaagtgttgaatagaaagctgattgatcttggttacacaatgtcaaaaccttgtaggagcaacataaccccaatttagc

SEQ ID NO: 6722 - DNA, 464 bp, Arabidopsis thaliana landsberg
aagacgaaacactaaccaatagaataaattagcaaaacattgcaataaaatacaaaattggacaaccaattttcaatctttgtgtaccttgcagcatcaactaatgcggttctgatcactttcaaaggatcgataataccagcctttatcatgtccacatattctcctgaaagtaaatgccaaaagaagctagttcagatttcggaatatagggaaatatataacaaggtggatcaagaactatagaaagtgaattatctaatgcatataagagtgtaacctttagcagcatcataaccaaggtcaggattatcttgttccaaaagcttgcctacgacaactgcaccctcgactccagcattggaagcaatcgtgtaaacaggtgtctgcataaaagaaagattttgtgtgtaagattctagaagctgtttatgctagcgaggatgaacaatgtatgagagaaa

SEQ ID NO: 6723 - DNA, 967 bp, Arabidopsis thaliana landsberg
catcacctttataattggaccgtttcttcaaacatatatccaatgttttatttgcaatttctccatgtaaattcatatatatgttccctgagaaactatcttgaaactgttaaaagagaacatttaggttgctatcctcggaaagtgactgaaaatcggaaaatgacacgtttctagagaattcagacacacttcccattgttttaaaaattataatgttctcatacaattgaccacaaatcaatacttgcaaagaaaatgttatcatgatatatgtttatctgtccatatatattacaaattgagaatcttgagtagaaaaatatcttgagtttacaaggaaaaatggaaaatcttacttgttagttgcattggaatcacaataaccctttaattcaggtggaaccctgaattccattctctggaatctgaaaaaaataaaatataaaaaaggttagaggtgaagaggtttgacatacagctgcagtctggatgcaggaaaatatgaactacagaagaaaatttcatgtcaagcaagtttccaaaacccggataatgtcagcaccaacactttctgcattggaagataaatacgctctcaaatgagccaagtagaatatgtatcattctcgaaacactttgcagaagacgaggaagttcagaggtgtaaaaccggcctatttctgttctattttgaggtgtacaaacgagaattctacattaccgtgtcatagaccatgcatttgtaatatgaataaacttaaagagatagaactcacacacgagattcaggatctttccgtggatcatagcctcttttaatccagaacctaagaaatggaccacccgagaaataatatgcagccctaagaagaaacctgcagagaaaactccagaaagttggttattgcagtaataatacacataagaaatgcataaaatttggtcacatgtttaacatatgatg

SEQ ID NO: 6724 - DNA, 1125 bp, Arabidopsis thaliana landsberg
  unsure (1)..(1125): unsure at all n locations
tacaattttctaaatttatatatactattaataattctaaaattttaaaaattactactttaaaaaaaaatcttgggatgggtgaagaaattacagaacgggttttattttggaattgggttacatggtggatgtatttgaatcaatatttataaaatttgaaaatattgttaatatgttgttttaataagggttaaaacttcagtttttttaacaattgtctcatggattcgtagtatagcgttacttaataacaattataaattgcaaaatataaatattttataaaaataaaatttgcaagttttaatttatattacttttaaaaaataaatcgtcccgcggtataccgcaggttaaaatctagtctctttacatttagctacacacaccgagtttcgtatttatattcaaacttcttcactcatcatcctncttgtcatcgtcaggagcgttgggatcttgctcgtaaatcggatactctncatcgttatcattatcatcattggcactaccatacaaagctgatgcgctgcttggaaacctattgaacaaaccttgcagataggttctggagttgttctccatgtcaccatcttatcattgtttaagaaaaactttaaaccaaaccagatcaagctctaaattctctcctaatcccctagaatctgcatgtactaatgactaattggtgcttatattatgaaagtttatgctttgaaggatacatccatgagaacttattgatatgtcatcatcatttgcagcctgcaacacaacacattagattaacagagaaacgatgaacaagcctttcgggaaaactaatgggtgaagtaaacaagaagtagtttgtaagcatggttacctcctcgtattcatcatccaagtcttcagaatcgtcatccgcattaacatcatcatctttctccttgtttgtgtttttacactttttcatatctgcggataattttacaccaacaactgttaatccatacttcttttaaggagaatgtgtttgatgacaaatgataataagcagagcatgagatgtatgacaatataaaatgcctgccttattcgattttggctggcacatgtgattgtgcacccttatatatttac

SEQ ID NO: 6725 - DNA, 723 bp, Arabidopsis thaliana landsberg
ctccagtcaagttcaccatgctttaacacaattttgagaccattgagatttgaaaaagaagcacttggctccatgcatgtcaacaatcactaactaggctgcctaacatgtaaagatgaaaagaactgaaattgctttgtctatcttacctttagttgtttcctggtgattccgttgacttggttgcagtgcatctttctgaatacgtgtcttttcagacctctcaaactcttcttgaatagatttaaaaacgtcttcgaaacctggctcaggaaacacagatacaaacctcacagctacacggagtctcaaattgtcaagcagcgcttcagagaaccatcctgttttatactagcaacaaaaacaaatcagtacagataaccaagacctcacataaaacaattttccactcaatatatcatttgtgtgtgattgatgacgcagtgttttggtagtggtattttttgcaagtgcatgtataggtttgatctgtaataagcaagactctaatttttttggaatctacttcattaacaaaagctttagctgataactcacattacaagtagtctgcttgggaggctttcttatctcttgttgaatgtactcatcgtcaagttcaaataactgtagaaatgtttggcatttgaaaggaaatactttaaacgcacaaatgtcatcccagcttggctttgacctgtcacaaataagaaagaaagaaaa

SEQ ID NO: 6726 - DNA, 2563 bp, Arabidopsis thaliana landsberg
tataccagccatttaatcagtctctctttaacatcaatagatcaaatcttagcttacaattcccctagtccctctttcgcataaataacatcattgcttgtgtgcttacagctggaaaaagctatatctgaaagcgtcgaagaatcttgctttccaaatcttcaacaacagtaagctgtttgctaacaaactcgaggaaatagccctgcaaaacaacccacaactttggatcaggagtccaaccagaaacaagcacaagcccggaactgacagacaaaacgaaagacacaacatccaagtctccagccaccgaagaaaagtttcttaagaacagagtaaatgtctaagcgctaatacaaaaccggccattgaggcattgataacttcatattgagacattgcagaaacaagcttcaaaacctataacagagtaatcttttgaactagctacaatttctttgattgactagaaccaacctacaatttcgcatcttgtttagaagaaacataagaaaacaaaggttccacaaagtccaacataagtagcactgttcaaagcaacatatatgaattgtgaatctctgactaagtccacaaagttgtaccaaaatccaaattcacaatgtacctcagaaagatttcatcatcttgcaacaggtttttgaagcaaagccgtcaagaaaacttcaccatgtttcgaatccgctttgttagccaccgcccatttcaccttcttataccccaatttcccgatcatcggtgcataaacattttcaagatcaacttttttactaaagaaccgatccaaccaaagataaccaccaccacgaagaatcctatccaaatcaaagaagaaaaattccataaccgtcaccggaatccaccgattcaccgctcttccacacctaaccaaatccacaacaccatcaaacaccggaagccgttgctgtaacggcacatgaagcggcacaagtcctctcatcgccacagcttcactatacggcgcattaaaattcatcgtcgtggtcaaaaccgtaacattacgagccttcatagccgcagcgaaagatccagtaccaccaccgacatcgataccaagacggagaacagaattagcagatttagcgatctggaaaagctgcgagatcggtaaatcaagctcggatttgtaagcagagaactgagatttggatttctctaaggagagatcaaaccctagatcagagaacttagtaatcaaacaatcaaagctcttgcaagagtagtaagaccatataacattagattcaggtttcgaatctgaaggatttcgcggcgttcgtgagaagcaacgacggcgaggaagtggatggcagccacggaggatgagtttctcgacgagatcggtgtcagaaggacaaagagagaaaggagtgtagttcatatactcatggagaaggtcagggtagttatgacaagctgaagctataggtgagagcttagagtagattaaaagctctttaggcgcggtggaggaggaggaggaggagacggcggcgcgtgaggtcgaggttgaagttgatttgtctggttggtgagttgtgaggtggttaatagcggcgcggatagtgtggagctgacggaggaggtgatcgggaactgtgggaacagaggattgtgaggatttgacggtggattggaagaaatttgtggtggaggagaggtggtagagtgagaggatgtttgtagctaccattgctactagtagaagcaagttcaagctcatggtgaatcccgccatttttcttcttggatatggctcggatccaagttcttgaagtctctcacacagagattcttgagctttaatggtgtcttaaagacgagatttgtgggttacggttttagaatcttggaggtagtgacacttagcgaaataagtgtaagataagcttttttcatgtaggagactcgctagtcaaaacagagatctgagtttataaattactactattacaatgggaaaaagagaaatatcgaatccaatgtcattattagttttttttccccaagttttttgcatggatgagtaataatcctggtgaaatgttgttggaacagtacagaaaacagttaaatttcttggtttaataagcacaaacaaatttaaacagatctgtaatgtgttcacatgtcttgtcctctttcttcttttttcagactagttgtgtctttattgcaacaagatgggatcattaattcattatgtgtctaaaaagactaaaattagtggtatcaattttgtttacttgatggagaatataatcagcatcaaacatatgtccagcaacataacctagaatgttatcttcacacattcacatagttcaagtgttttactcttctaattttttaggcacttaccataatatgacatattttaggatcatgttttattacaaagtgagatccccctatgatctttgaatcccatccataacacaaatctataagaaataagaaactaatatcttaacatggatcaatttgggcaaaattccagagctaagaagttggaagcttc

SEQ ID NO: 6727 - DNA, 2769 bp, Arabidopsis thaliana landsberg
ccttctaacatgctccatctcttcctcttctcctccgccgcctccaccaccaccgccgtagaagacaattccaccaccatgcccccttcttctagatccgccgctaatcaaaactcctcctcttctctccatctctgcaaacattcaccgtcggcgactctcgacctcttaatcctaatcctcgtcctcttctccggcacattcctcctctcctcttacttctcataccttatccactccttatctctcctctcctctcatttcccttcaatcaccatctccctctcctctctcctccctcctctaatcatcttcttctcctccgatcacagcaccgaagatgaagatcatcatcatccctcaggaaaaatccctcctccggcttcgttcttcttcgcattcgcagtttttttcgcggcttcaattgcgtttctcgacctgtgttgtggttcaagatcaaggaaatgtcgtaaccctaagtgtaaaggaatgaagaaagctatggagtttgatttgcagttacagacagaggaatgtgttaaatccggttcggttaaagagattgatcggttaccgtggaaaggaggtagtgagagtaatcctgattatgagtgtttgagagctgagctgaggaagatggctccggttaatggtcgagctgttttgattttccgatcaaaatgtggttgccctattgctaagcttgaaggttggggacctaagagaagtcggcgtcataaaaagtaagttcctttcgaactcaaaatgttgtagttttaagccttgaatgattcatgttattgcattggtttgtgaatcttggccacattggttagatggaacttggtgactagtgaatttgtaggttctgtttatcctgttcttgcgacgtatttattgccattgatcattttgagaccagtttgtagtgaagatttatgtttatgtaatcctcctcactggctatggattttagacaagtctttaggctttgatactcgtttcttatcgataatggtgattcggctttgttattcctcgtggtcggttggcttattccagttgtaatgatgaatggacttgtcaatttgtggacatatgagtagttttgcgggtatgctcttcaaagccatgttgtgatcttttcagcacattgaatcttgtttttaagaggaaagaggaacaattgaacatggaatctagttttttgatgtaatgtattgtatgatagcttctatcaccataacgttttattggttgagagacttaacgcacatgcagccgtaacatgtgcatcatatacaatctgtgatttgaaatttccccagtttcactttttaagtagttatgtgatagcagtgagatgctaaaagattcaaactttaggatcaggtttagaatatgaagtaatgggtgagtcaattgcaactaaggcgggaaatgtttcttcggcctcaatgagattttgttctaataggaaataagctgcgttgaatgacgtattcataatttgccatcaacttgcccttttgatttttttttttcctttgtgaaaagtagttccacactctctaggacaatatggatagcttctgtctagcttattgcctacccatagaggacacaactccatttttagttgtaaccaatacttctatttaaatctgctggtgcattgctttatttggtgattcctaaattcatcatagctgcttagaattcttgattttaatatctctttaggattccattttgattcactgtgactagtatatgattgtccaatcttctgttgtgtatcttacttcgtttgcaagtattctctgcagatcgccggcaaaattagctgtaaagggatgcatagacaatcgctgatccagaaactttccaatctatacttacatattatcacattgaaatgttgcagttgcagaggttcttcttcatcttcttggataacattcatttagtattaggaggaaaaatataaaattattgattttttccatttcctatagagttaaatccctgaaactcaaatgtcttgttactctcgaacactttctctgtgtacctatatatacactcaagaaatatttaattcgaatgatcaaatctaatgcattgtgttgtatatttttagtctttgtttcacataaaataatgtaaaacctatatatacactgtgtgagctatagaagccgagagagaagtataaaaaaaagtcaagctttaaggtttagctttgttgctctcatgatctcttatgatcaaattgattcgttttttccggtctcggcgctgttgggtcatttctctgcaggcgagatgcttctctgctccgagtcggacccacttcgatttctccggcgaaagctccgatactgaacgagctctcgtctctgctcttggatcgtgcgcttccagtaatgacgtcacttgtggtagacagattcattgccgtgtcttgaaatccggtcttgattctaatggatacatatgtaatagcgttcttaacatgtacgctaaatgccgtctcttggctgatgcggaatctgttttcagggatcacgcgaagcttgattctgcttcgttcaatattatggttgatgggtatgttagatctcgtagactttgggatgcgcttaagttgttcgacgtaatgcctgagagaagctgtgtctcgtatactactttgataaagggttatgctcaaaacaatcagtggagtgaagctatggagccttttaaggagatgagaaatttggg

SEQ ID NO: 6728 - DNA, 1866 bp, Arabidopsis thaliana landsberg
  unsure (1)..(1866): unsure at all n locations
aactcaaaactagaatgtgaaaagcattacaaactaatatgtcaacaatgggaaacagaagatacangaaaaaagatataaggaatgaatctatggagtaaaaggaatgtgtttatgatgaagagggtcggatccagttggaacttgtctttcttcaacttcattagctgttcctccatcaatcttcttctcctgttttcagtaccaaaacaaaaaattaatcatctttgcatcaaaatcatatagaaaaatacaaacgaatatcaaatgcaaagagctagctagaaaacaaaaagtttcatactttttattgtaaaaataagaaacgaattgttcatttccttcaaaacagtcgcgttgtgtttctaggaagagattttcttacctttttcatggctttcgtatcttgtgtttctcctaaccaaaagaaggctagaaacaaaaagaacaaagaggattgattcatcatgttttgaacccaaacgatgaataaagatgagaatattattaaacatatcacatgacacttacattttgtagaagaagagtgagcaagtagtgaggacgaaagaagaaggatgactaatatgataaaaacgcttcctttgtatttcatcgccgccatttcaaaaacctctttgtggtaagagtctcgacaagagtgacgagaggtgtgtcgtcgtctaataaggtgaaagttccggttttaacctcgttttacagctttgttggggccaaatccgtcattttggttgttctttttgggatgagatttaagctgtacggacacagattaccgtttccaggctggctcgaaccaagacaaattatcattctcgtacaaatgtcgtggtgccacgtatcgccgccacgtctccgcttatttgtcgaaccaaacattgtcacaacttcccgccattttttaagttgtctttcaacgaagcagaggaaactagggctaatccttcttagaagatcgtgggctttccttatcggcccattaatgaacccagttgggttgggttaggctagggaatttttgaaagctttgttgtcgctgtatcttataggccaagcaaaagttgttagtaagttccttatcttcctcgacatggaccaatggaggtcttcaactaaataattaaacagtcattaaatgatagataacgtctaatttatagatgaatactacaatgtttttacctaagcgatatattgaaaactaaattacattaaccctaatcatccatgaagataaaaaagggataaattaagatcccttccctgtcattacaatgaagagatgaatcattccttgtttcgagaagagcgatccttacgatgacctccaaggatacgagagatctgaagacctctactgaaagcttgattaaagagcatacgcgtttggaactctgacacaaatggaaaccatgccaagaacgccactggcgtgaacagcaacagtcccattactatctcgtatccacgagctagggtcctcactgatccccagaatcctgctctatgaaccaccggcttacacgcttgcgcaatctgcaaacacacaccaagtgttagtcttgtttttatccacacacgcacaacatttccattttaataggactccagtgaaaagcttttttttttacttaccaagagcatcccccaacctgtgggcataaaggcaaggatacacacaattatgtcttgtatcgtcatgtgagccagtgtgatcaatatcacaataattgcgataaacgtcatgaatatcagcccctttatcaaccggaacattagctgataactcgcgctgaatctttcccttccacccgaacagtctgagacatacaaacaacaaaaaac

SEQ ID NO: 6729 - DNA, 852 bp, Arabidopsis thaliana landsberg
atttattgaaattctctatagtaaataacgaagttgagcattttcaacctgaaatagaaatttaacattcggataaacaaaactcaaaactagaatgtgaaaagcattacaaactaatatgtcaacaatgggaaacagaagatacagaaaaaagaaataaggaatgaatctatggagtaaaaggaatgtgtttatgatgaagagggtcggatccagttggaacttgtctttcttcaacttcgttagctgttcctccatcaatctccttctcctgttttccaatctagaaataaaaattaatcatcttgcatcaaaatcatacagaagaatacaaaacgaatatcaaatgcaaagagctagctagaaaacaaaaagtttcatactttttagtgtgaaaagtaagaaacgaattgttcatttccttcaaaacagtcgctttgtgtttctaggaagatattttcttacctttttcatggttttcgtatcttgtgtttctcctaaccaaaagaaggctagaaacaaaaagaacaaagaggattgattcatcatgttttgaacccaaacgatgaataaagatgagaatattattaaacttatcacatgacacttacattttgtagaaaaagagtgagcaactcgcgaggactaaagaagaaggatgactattataaaaacgcttcctttggatttcatcgccgccatttcaaaaaccctcttggggtaagagtctccacaagagtgacaagaggtgtgtcgtcgtctaataaggtgaaagttccggttttaaccttgttttacaacttttgttggggcccaaatcccgtcattttgggttggtcttttttggggaaa

SEQ ID NO: 6730 - DNA, 1182 bp, Arabidopsis thaliana landsberg
ctgatgaaggagaatatttgtgtgaatactttgcggactaagaagggtggagcctgtatcatgtagacatagattgtaaacatcattgccaaaagaagttaaatttttacttttgttcattcttaatggaacttcagactcacattgtttgctttcattaaattcaagtaactgtttaggctttttctgatactttgccaatgtgcaatcagagcttgttgagcaacagcatttgcttgtgctcttcctttcaccaaacttgcccttgatgtccttggtgcctgtagcatgtaaacattcccttaaacaaaatcgaaaaaattaacgaaactaaaactaaaaagtttcagcatatcaacttccacaaaagagaaacaacaaagaactacacgaattcccttctcagaagcaataaaagaaagaatattcctggatgttttggaggcgttagataagaaatgtttatcctgaacattctggttattaacttttaagccgtctaattattacctctcttcccagaaacttctatgaacaccaagcaacaaaaaaattacctgtatacataagccaagaagaggagagatctctttctttaggttatctctgatcattccatatatcttctcgaggaatgcagtaagctgctgcttgaaaagtagtgcggggtactttgctttatacttgctctcaagtcgtcaagcttggtgagcccttgtctattcagaaaagagagtccagcactttgaggagatccccttaatccctattgagattgttaaagaggtacacacgatgaattgatgctgacatgcgaggcagataaaaaagtcagaaaaatgatctgatttttacagcttcttacttgtgacatccttccaaaaagggatgctgatgttgttcttcgcctctgcggagtcaaactagctgctccagttgctttgagtgtgcgttgcagaagcaataataaggtggccgaattagataaccaatacgccaaaacctcattggtatctggcacctggatgaaagacaaaatttccaattaatattcagaagcatatcccttctgggctttagaacattgaaatagtacataaatgcttctgaacaatgaagcacgaaagaatcaacttacttcaatggctgtagctattgtttgaatgatacggtcaaagacgc

SEQ ID NO: 6731 - DNA, 8969 bp, Arabidopsis thaliana landsberg
  unsure (1)..(8969): unsure at all n locations
gtctcatgagcaagcacatgtcctctctctctctctttcacaagtttttctctactcatttgaagtttatttactctattccgacgaccacgactcctcttcatatctactctttccttctttctcttcttcttcttcttctttttccggtgactggagcaggagaaggtaaagcttctgccttttgactctcaagattacaaatttgtttatttttcttgatgcatgattttcgtttataatctctgtgttaaaaaatgtcagatacagattctttattctatccannnnnnnnnnnnnnnnngaaaagttgtttgaaatttcagagtagtttggtccattgtgttgttgttgttgtatgaaaagaagctttgataaatggagactaatcagattgaggaaatggatgtcgaagtcttgtcttcgatgtggcccgaaaatgttggacctgaagctgacaaacagttcaacgtcgagaaacctgctatagatttagacatgttgaaagaagtcacaatcgaagagaaaccgaccattgcagatttgacacggttaccagaactattgagtttgactcagcaaggctcctctcaactaaccaacctcgtgaaacaatgggagtatatgcaaaacaacgcggttcggctattaagagaagagcttaagaatctcgatagacagagagaagaagctgaggcaaaagagttgaagatcattgaggagtataagtttgagagccaccagcctgagtatgtttcggttttggatgagacgagtgatttgttccgcgggtttaggcagaagagacgagaagtgttggtcgatagcaagaagattgagatctatgaggagtttgatagcaagaaagttgatgatgaggaaaatagcgagacagttgctactactacagatatgaatgaagctgtgaatttcgaaaaaagtaaacaagaggaacaggaagaagcagaagttaaagaggaagagagcgaaagcagcagagtgaaagaagaaacagccgaaacaaaggctcaaatagaagaattaccagaggaaggaacaaagaaggaaggggtgcaagggaagaaggaatctccaacagcataggctgcaagagaactcgatattaagaacaaggttagggaacaaggttttgtttcttgttcattttctttctgacaaaagtgaatatattgaaagaactaaatctgtatcagtagcaactcatttggaattgatggtgctcgtcttggaaggcgcaacactcagaggatcggattgtgatctgttgtactttaccagtcgtcttgtccttggcggaaacagtgacaatgccattggcatcaatgtcaaatgtcacttcgatctgagggactcctcttggagatggtggaatgccaactagatcaaattctcccaagagcttgttgtctgttgccatttcacgctcaccttgaagcaccctgatcccaacttgagtctgattatcggctgcagttgagaacaccttcaagagaatgaaacgagacaatcaacattttagtaaaaacttgacaaaaacaatggtagctttggatggctcataaattagtatatatcacaggaatgtgctttcatgacccctgttaaagaagaaccagagagatctcgagcgtacaaagagaatcgaagagattgtgattgcaaaagtgttacttatatagagaagaggagattctgtgttcgtagttggaataggaatcgcaggagttatagagataagagctccggtcccaagtcattttcgatttggaggactcgcatagagttttaaattttttaatttttttaacaaacgcaaaaattagcctgattaaagttattgatagaaattgcattaaaaattaaaacatcatcactgcaaataaaacaatattttaactcatcttttcctgaaattgaagttgacaaatttcatgaagaaaacttgtagcaaaaagagtaacgtagcaacagaactttggtaaacatttattacatcattcaaaaaaggtctgagaacaaagaaaagcaacaaacatacccccaaaaaagcctcgaatccaaagaaacaggtgctaaatctttaccttttcaagacagagtttaacaaatgttttcttgtctccttattaatcatctcaaagaaactcttactggagactttggcggcttcatcgaaagagctttggtaaaggtttttaatgggtcaagagtgagtgagtactcttgatagtatgataaatagcggctaatgcagtaaccgaggtgatgactggaagttgctgttgtgtatggtaaaggacttggtagaaactcgggtaggtgaggcagatcatacccatcttcaggtagagaaggtagccagcgaaagtgacaccggtcaagtaaacccctgagattctgttgaaaatcgatagcatggagttcatctgaggctggtaaacagaaaggtgaggagataaagggcgaaagcttttgatttttggttcctcctgtgttgtctttatatcccctgagattgtagaaaacaatcgtttcgatgttcccacatcaagagcacggaaagatcgagtcaattgagcaccaacaattgcagcttcagtagattttgacttctggaaaaatcgagacaaggatcaccaggcaaaaaggataagttaagctgctcttaaacattacaaaagcaaaaatcaaacaaaatgtagacaaagtcattttacctctctctcctctctaatggcattgttagtgcccaaaccagtaccaagaatgtcattcacaacaggttttgacctataaaagaaaacaacacgtagtcgaaatgacatccacagagtaattctaataggtataaaaagcacaagaaacaaacacaaacctacccgaaagctctggagaaacttgcatagttctgaccaatgtatgaactaccccaggaaggttgagcattaccagcaagctgcaatggggttacaacgtggttcaaccacagccaacgttttcaggtggtccacaagttatgactagtgttggtccgcaagttatgactagtgtcggtcctccaatggggttacaggaaccttattcacagatggggaagcctgtgtactatacggtggctggagaaggcatgatggttcaaccgccaccagcccagcctcagcagcagcagcagcagtaccagggaatgggtcaaccggttagtggcatgaccgatctcagaaccggaccggatgggaaagtggcggttaacatggctgcaccacaagtttcagattcggtgtgagtgtgagattgagttaacattgaggttaatgttatgattatccatttctttaaactttatgatatatgtgtaaaagtgtttttttagatcaaactaggaatctggatttctgatgaatcaattgaagcacttttgatgtttttattttattttattttggtaaacttctttcagagttctgtttttttaacttttgaagtatgcttttggaccttttcgtctcctgtctattgttatgcatctatttagtggtgtataaagaatattatccaatttcatattcattaaaagagttacgtttatgtatctttaattcactcacactgaaacaagaatttgagaattagtaatcctttaaatctattttgtactcgttaaaactagaaatagatttgtataaatgttcattgcagagaaaaaagtggtccaaaatctaagttaaatagtatggacatgtgttgtggagaaaaaagatgttaggtgagaaagcattggatgttaaaaagagacttgctctctcatactaacaaactaatccacatgacccatacttgtcaattgtcatagtataattcaattttgttttactaagcgacaatcattatattgtcatcatcattttggtcatctcaagtctttgtccttattattttgttgccaaattaattacatgtttcaatccagaaacaggtgtccatgtaaaagctaccatgtctttgtcattaggattcaaattgatatccttcttccccttgatcccaaatttgtcttatcaattttatttcttgtctttacatcatctcaatcggattttcttttctaccagagtcgatataaaaaagttcttaactaagatatctgggcatagtataaacgcaagaaattttctaaaaataaacacacatttcttttaaagtgtttgcatagttaacagagtctattacacaagccaaaacaccaaaaaacaccataacaccactacgatagactagaccaatgaaaaaccatcagaaaaccaactaactaaaaaacaccaaaaagcactcatcagttcacatatccagatttatctggtaactgattaatccaaccaacaatttcttcttgaatcactcgcagtgtgttcctcccacgcccaatctccatcttcccaaagtgaggccttagcttctccacaaactctctcaacagtggtctcatctctttctccttcatcactctcaacgcacactgtaccacaaagttgccaaacttatcagttgtcattcttacccattctttggcattccctctaaactcctccaacacttggtctctcgcaaaatccgattttaaacacttctccaccacatagcttccttgtctctccatcgctaacctgaagaaacttccacgaagtctctcagcgattgcggttgttgcaaccggattctgaagtatcagaatgttctgcacaacgtgtgttccataggggtcaaaagataaccaatctgcgttgtttgcgacgcactcaaagattaggtctctgtatatgcctctgatttcctgaagcacattgtttagggcaaggcatccagtttctagcctggcaaggtgcagagtgtattcgtaagtgagcttgtagagagactccttcttggttttatcgacggctcgtatagcggggatgatcaagccacgaccatacttatcgctcatgagcaagaagaagtttgtgtcgacggcgcagaataagagatggtctaagctagggctgcgtctaaagaggatacgtaaagcttgtgagccgtattggttcgtagccaagtggaggaaaatgcgtttggttgtggttaacgctgatccgatcttgaacagatggctctccctctcagccgttggataggtatcgagatcttggaggtacttttggaactcagtgaaacgttgtgcacacgtcatcatgtccaacagacttgatagccagttttgatccttgtcgacgccagggctcacgaaactcagaggaggaggagggaagggtttgccggaatatctggaggaagaatcatctggttgggtcaacgacgacggagtgaacggaggagcgttgaagctagcggcggagatatgaccaacgttataaacgttgagattggggtagttgttgttgctggattctccaggttcttgatggttgtagttggcgtagagtctaagattgtcgaacgcagtgagaagaggaggattagggttgttgttgtttatgttggtggttccggattctccaggttcttgatggttatagttggcatagagttcaaggttgttgaacgcagtgacaagaggaggattagggtggtttttatttctgttgatggttgtgttgccggattctccaggttcttgattgtttttgttggcatagagtttaagactcttgaacgctgtgagaagaggaggattagggtggttgttgttgctgttgatgttgatctttgatctgtgagtttactagagaaatatttatacacagcctttgagctactagtttcagtatcaacataaatcttaagcctcttcttgtgctcttcctttattaagccaatccttttcaatgcggagttccgatgatcaaagcaaacgatcctaaacccaaagaacaaaatcaaaccccaaaggacttaactttttgaacctaaatagttgtaagataacatcactgaacatactcgcaagctgttttctggcaagcaaaatcttttggaacaacaaaatcgagaaggtaacacctctcaaacccctccaaacacaaatcttcaaccctgcaagatttttcaaattcccaattatcaaaaccttacatttcttaagaaaaatctgcagagagtgaaaagtgtacctaaagggtatgacggaagaaaagggtaagatgagacaaggaagacggagtcgatagtggtagagatgagcgaagagagctgaaaaagcgccggagaaggaagggataattgtataacacttaagtttggtacttttctcttctaatgcattagctatnggcttcgagcgnccgcatcagatcggaaactccgtttagctttcgaatttaagtttacaagagcgggggaatcgcagttaggaaatctcccggagaatcgccggaaaatcatcgattgctgggattttggtaaaggtttatgtgcgcacacgactgagattttgaagcggaggaaattggcttttaattgcattgaacacctcaaagtttatagatattattaattgtatccttttatttgttattttgcgtttaaagcccctgatgttcttctcttctgacactaacaaaaagaaacgtgtaatgaagatcctaaaatcgttcaaatgaagaataaatccatgagagaatccatcttctgcttaaaatgataaaacaatgcaagagtcattttcagagaaatatttgattggaaaataagaatgattgacgtgaaaaagcaaaattaagagtccaacttggaactcttcttgcacccagacaacatgttcatgtagagctggcacttactgatgtctgtttcataatcgttgaggcactacacacaaacaagaaacgcctcagagaataaatggagaatcgacaatgaaagaacgaaaagaaattcacgttaaagtaaagatggagttttgaagtaaaacaataaaattaatgaaggaattggttgatattgatctaattgctattataggtttcatgttaattatgtgatataataactccatcataaaagatcccataaaaccaaaagacaataacataaaagatcccaaatctttcaacaagaaaaccattagatttcaacaactaattattaaagacaccagagttgttcttagcacagacatctcgactagttgattaagcagccaccacggaaccagaattcttcttgcattcactcagcatgtccatgtagaactggcacatactgatgtcgcttccaaaatggttgacgcactacacataaacataataacatccaatgtcaaaccagataatctcggatacacatagtatcaacaatcaacaaagcaaaataacgttcaagaaatccatagtcttttgagtttaagcacatcaacacaatcatgttctattgtattcattctatcaatgtgcctgcttgtccttcaatttcgatgtattttgagaatgcatacctaaccaaaacaaggtcaatcaagatctagctactgattcacattcaactgttaacaatcgcttagctagatttttaacaactgctctgaaaagattggaatcaacctaaaatgctcaaggagaataaagaaagtgtttttaacttacatcttggaaagccttggagtgaatgtcacaagcagtcatggtatttgcagcagatggaacctgagaaacaacggtttcgtgcttaaaggttcgtggacccatcacagaatccacaaccctgtgtccaaatgcagttccagtaccccaagccagacctattgttccaaataaaacaaacacatcataagaaaccaaatccaaccaaaccaccaatctatgaaacaacaatgcttaagaaaatcaccaaaagaaacagataaaaagcacaaaccttcagttatggatgcaccaatattgcctaagaaagaaccaccgctactaggctgagctgttgctggaggaggagcacggttcactgaaaacccagaaacaaaacacaattacataaacagagcaaaatcttatacaatcaaatcaaaaaattcagtgaggttaatattaaccagattgaggaggcgggcttcgtgcagctgcagggcgagaaggacggtagctagatcttcctgcacaaaaattcaatcacacaaaaatcaatttctccctcgtcgccagaatcataaaccctaaaacatgtgcaaaatcgctcaggagactaaaatattctctaatcggaagatataacacaacttgcaacatcatatgagaggattatcacaagtgcaggaacaaattacagcaaaccctagattggaagaacggcaaatccttaaataacccaatgtgaaggtagagatctgaatattttttttaaaacgagaagactcacctccggagcttcctcgaggcattttgaatttcagatgttatagatttaagtgatgaattctccggcgaaaacttgacaatacgaacaaaaagcacctgatcggcgagaaacgtatttataaagaggaaaacggaatagtcagatgcggtgaagaccacgggaagatttacaagtgtaaattcttgattggttttcacttgcgaatccaactctctagatgagaatattccccttgcccgtcacgtttcttgcgctccaaacccaaaattaggtttccttttttaatttctccggaaaaaaaaaagaatatgggctttgactggcccatcaaaaattcaaccttggtatgacgtcgttttgcgaaagcttcttccaagggattgaccatctcaaaagtttatagacctgtatggttgatcaacgctctgaagtctggaacatctcatcattggacaacgaacatcgtaaagagcgaatctaaacttttgtacgactagtgatttagattactagtggtggttcactgattcttgatcgacagagtacgc

SEQ ID NO: 6732 - DNA, 993 bp, Arabidopsis thaliana landsberg
gtcaactctaatttagatttaatgttaattaatcttaataattgtttactaatctttcgcgccatataatatgttctcgttatttaacaatagaaggaatagaagacgaacaaatgaattaatttcttgtttgttttcttagatttttaatagtttaatttatgcgaatacaaacatttctataattatggaaaatctaaaggaagttaatagggtcttactcattgataggaatttttttaaaaaaataaaaaaacagagacagttttgtgggggaaaaattgttaaaaaagaattaaaaaatagggaaaaaagattcgacaggagaaagagagagagaagaggaagaaaaaggaaagagagaggaaggagagagaacccaccaccctttggccctggagagaccaaagatggtcgaagagagaaaactctgagatcatcatcttcatcatcatcatcctgtaaaaataagggcaagttctacaagaaatcagaaaatatcaatccaatatttgtttttaaacagaaattctatctttttaaaagtttttttataatcattttctattttctggggatttttttttatattttaatttttcatttctcaaaccctatacccaattcttggtgaagaagtttcttctttgaggtaatcattctgccatgttcttcatttatcaagagaaaaaaaatgttttttttttgtttggtgggttccatgttttcttcatattgcttcttcaagagggttattcttattctttatttttttggtttaattattattggtatacattcgttgttaaagttttgatatatgtttgcctgtttcttgttggcattttttttttccacgattaacaagaagaagagaatttacgtacgagttgttgactctttaggacatgaacattgtttttagggttttatgattttgcaaaactggaaacaatgagagaccctgaatgttcaatcatcaacctcgtcgtt

SEQ ID NO: 6733 - DNA, 1443 bp, Arabidopsis thaliana landsberg
  unsure (1)..(1443): unsure at all n locations
cacaagccacaagcaacaagtaggtcaaattcttcatcattatatatgcgtttaaacaaccaacgattatcaacacacttcacgattaggaaactaaccttggagaccttggcacgactatttcatcaggagtccgctccgtttcttcatgactaatcaaaacatcaacaattagagagattctacagggaaaagtaaaaaacagttaacgctttctataataaaaaaaaagatatgaaacaaatcaatcagatctttgaagtgagagcataatcgagaataagaaacacttcaatcaccgaagattatgcatacgttatgaaatatccaggcatttnnnnnnnnnnnnnnnnnnntgtgatgagaatagtgcaaaaatcaggaatgacgaacgagatataaataaaggcgccaaatggtgccatctcttcgtaacttatttgggcctataataaataatgggcttttataggccgtagttaggccttatttaagtattcatctcgctattcttcttttctttgttttaatatttgactttttggatatttttggttacagttgatcagcaaatacagcaacaatatgatggagagaaatctttgtgatttttagtatttgtaacatcatactgtagaaccaatgtgatcatagtgtaaggctatatatataaagaggccttttttcatccctgaagttctgtagaatatgctctctcttttatttgacagctaaaaaataaacattaataaaaaggaataaaatcgttttcactttttttttgaattgttattgtatcagttgatgagaaaatactgcaacgatatgatgaaaaaattcttaatgatttttagtatttgtaacaatcaaactatgatctcaatatgatctcaatatagttcttttttcaatctatgattttaacttctcgttagaatattacaaatttcatatgtacttcagtttttttttttttcattaagaataaaaaataataagtagataataatgcttttgccgaaggtcaaattaagtaaataaagaaattaagtggacgtaaagaagatagcaaaaggtcaaactttatcatagtgaaattcctacatgcatggcaaagcaaagatactcgataaaccatcaagaactgaatagagagactaatttagagattttgatcgtatcatttgagtagaaaaaatatgacaagataatttcaatagtttcttgcagtcgagctaaaagagtcttctacgtcatcatcaagagctatcttgtatccagttggcaaaaaggtgttaaatccgataatcaattcgttgtgctccttgaacaactctttcaattgagcaaacgcactatgacgaccaatcctgtgaatgcaagaaataatatgagcaaactcatcaaaaccttaaggctaaaccaaaaaaagaagtaacgcaa

SEQ ID NO: 6734 - DNA, 2114 bp, Arabidopsis thaliana landsberg
  unsure (1)..(2114): unsure at all n locations
taccagaaaagtgctcggtcacatgaagacggttaatagaatgattctaggttttgcagactatggtacagccgtacaaggaccaagtaacttacttagaccttccaggtgaagctatagcattaccatccatgtatgataatttaggagtgtatactctaatatcaggggaaaagagtatctaacatccttactgaattcggacaaagtctagctcaataatatcgcatatctagatatcaatagtgccctatgtttgtttcagttgactttgttacctttctgtaactacaagaacaaaacacacgataacagctcgtggttcaagcaagtgaagattgaaactcaccagggcagcaccagatcttccccatccagaagacatatttacaataattccttgcttgcgtgggagcatcaaagggataaaatggcgcagcacatttgcaactcctttaacgtttgtatccatgacattgtcaaaatcttcagcagagacttcccaaatcttgctgttcttattgatggtaccagcattgttaactgcaacatgcatataccaacatctaagagttcaaaatttacagtaaaacgatgcaaagaagcaatgtgcccagaatgtgcaggagatgttgatcatgtaaccatcaaacctacaatttacagatatcaacctcgagaaaaatgaaatgaattcttagatgacaacaatagaaacaactgaagatggggtagagcgtctatctcagggttcaatctaccaatgaaaatatatacctagagcaaagaaagcacctatattacaacggctaccaaacacttgaggaacaatcaaaacaatccaaaacaactagcaggtgcacaaaaggcagagacttgaaagttgttttcttgagacaaaggttgaagactctcagacgcaaagtgtcaagaaatatgtaaatatacctatgatatctgggacacccttctttttcacaattgtgtgtgccatttcttcgacactgctgtttgatttctgcaaacataagaccataaatcttcctcacttcaaaaaccgaactcaaatgaaaaataaattaggccgttgctgaacaacaaattcaccaggaaagcaacgattcatccaagtccaataaaactatctttatcaaaacttgggcaacttccaattcatttgacatcacacatttttgtggaacaaaaaatattatcaatcatcagcgcccagaaagtttcttaattacagataactagcatcaaatttcacacagaacacggaagaaatcaagcacgggagtcggaagagcggcaattaccacatcagcggtgaggaggagatgattggtcgaagaggaaagctccgattgaagagcggtgagcttctcttgactacgagcgcatcctatcacagtgtgacccctcttggccagctcgagagctagggctcttcccagacctttgctcactcccgttatcagaacggtcctcgccgccacaatagagttcgcagccccactgaaaggcgtcgccatcgtcatcgaggccgattaccttctctttctctcgtctaaaatgacaaactgttccgcgaagaatatgtatacatacagactttgttattttatttatttaccttagcataactagtattaaaattcttattatgttgccaaggtgtattaccaaattatacttttttaactgttataaaactcaattcgatttttaccaaaaatctcttttaatatataagtagatcaaactaaaatatttacagatgagagaacaagtcacaagaacatctcttgttttgtttcgttctgagatcacactggtctccaacgctcaatctcttcttccacttcctctgattccttaggattctggtcgtctgagttttgtgtccgtcttctttttctatggcgatgacgtctctctttgtgtgtttctctatctgaattctcttcactttgtcgttttcctttcctgctttgatcagactctggatcatcgctcttgtatctctgnctctgcttgcttctgtccctatctttatctgactgatatcctacgggactagtctcttcacttctcttcttggctgattcttt

SEQ ID NO: 6735 - DNA, 1457 bp, Arabidopsis thaliana landsberg
agtagttggattagatgatcccagtgtaaccttttggcgcaagaacgtctgcataattttcaaaaaattacgaaaactaatgttcaaacttcaatttccatacaacagagaacatgcaatgatgagttcaaaaggcgaaacaagagcaaatgaaaactacgacttcatcaagttttgcttgaagcctagtgctttcccagaagtgatacaattactctttatgtctatagcagacacattatatcattccctaatgattttagtttccacaaaaaaaaaaaactcatttcctcttcttaaaatgaaaacaaataaaacggtgttatcttttatgttctctattacctttgttccagctggcatatcagtcaagtcatagttacagaggaaggtgtgaagaggtgttttctcagggttactaagaacctgcaatagaacagtttatgtcatgagtgaagattcagaagctttttgacactatctatcagcaacattgacaaacagtttaacttagcctattagacatatttagcactgacacttgacatggattacaattacaaatgtttaggtgacgattcaacattcaaagaaatgtctaactcatacttcatacgcacttggctatttggaatccagggagaattgcagaatgcagctgttaacccactaattagtcttttaaaatcatttacacgagaaaattgcggttatgacgaatgatatctactgcaaccggcaaatgagcttttagccataccttgatctaaacgcagaataaatagaacaaaaaaaataaagagaaaggagataccagttgaatccgacccttcatggggatccgcagttggctcttcgaactctgggcatcagagttcatttgacttgttttcactttttggccccagaatttgttcaatttagatcctccagcgagatctatggaggcgtagtataacaagaggcaatcatcaccagcactagttactgagaatggaagcttctgtgattttggagagatgtttcccccagcaatactaagaacggcaagaaagccgtcaatcttctgtacacaaaaagcagacagaagtcaagaatctaaattacaaaacaaacaaaaaagtgataacgactttttccttttagttgttgcatatatacaataaaaactataaacagtcttctgctatagccagttttaccaatcctcaatttctaatgcggcacatttttctttcattactatcttttgacatataaagtaagtcattaaagcagcagagttgaagatgaaaacctgatttgttggcccgcatgacaatcgtcctgtcaagagtgactcctcaaaagaaccaaccaatgacctctgaataggccgtccactcaagcttctaatgaaccttttacatggagatgcaggagctgattcagtacttctctccaataaaacgctctgc

SEQ ID NO: 6736 - DNA, 827 bp, Arabidopsis thaliana landsberg
accaaactaaaccgtgttcgtccttggctctgacactatcacaataaaattatccatttttcgtaccagcttgttttatagataacttgagcaaaaagaaacccttttgaaactcggttttattattattcagttttacgagaacccggaaatggtaaactgtacaaagtgggtcagagccattctgatttgtgactataaatttgtatgtacagaaaaagtccattgatttcttcttaaacaagaaaatcattgagcttgtgtaaccatgaagttaagttctcactcggtgatgtcgaagtatcttgggttttcagggtaatggtactcgacattcaactgcaacacagacaaataaatgatttttgttatcacttttacaaaaataaaactcaactaattttagctatttgctgatttgcaaaacgatggtcaacactcaaaacacacaaatctcatacgtacctttccttcatcggaatctgtgtgacgttgaggaaacacgactcttaagtcgttgtacagatagaatctcctcttcccatctgaatccaagtttttcttttgccccgtggattcggtttcttcagatttctttgaacttttcttaggtaatgggcaaagaaatctcagatgaagagcgtagcgtagagcaccagaaccaccgttacattctttcgacggctttaaacagatttttccactttcatgcaacacatctccttccactgaatctactgaatcagatccttcacaactctctttgtccccatgtttagagttttctttttccaagcttgtggcttttctagtgttctcttgcgttg

SEQ ID NO: 6737 - DNA, 484 bp, Arabidopsis thaliana landsberg
accaccaacaaattacttattctggtcagtctaatggattctgcaactctgtcgcacaagatcacataaaggctaatacccctagtaggttacatctctccactactcctacaaccacaagttgctgggagtggaagaatgtctcaaacagtggtagactctcgtctatggtcttcactgatggtccattgcttgactctgtagatctccgccaacccgtcaaaggaggtgaggtttgcttatattccccactatatgaaacgtctagcacacccaataagcccttaccttgtgataaggaaatatctgtctctccgccgctttgtctgtcaccacttggtccgaagttttctgagagagtaaaagctgtaagaagttgccaaactgggaaaatactggaagatttaaggaatatcagtgaagaagcagaattaagagttgatcgtagattgtttgatgatgcatatgccattaggagagcgtt

SEQ ID NO: 6738 - DNA, 941 bp, Arabidopsis thaliana landsberg
atcatcaccaacacttgttactgagaatggaagcttctgtgattttggagtgatgtttccaccagctatactaagaatggcaagaaaaccgtcgatcttctgcaaagaacaaaacaaaacgagagtaagtgagtcaaatcttaaatgtttaatgtttttaacaacaaagagtttttgcttcgaggttttgtgagtttcatgggttttggtagagtgagacctgattagcttgcccataagataatcttcctgaaaagagggactcttcaaaagaaccaaccaatgacctttgaatgggacgtccactcaagcttctactaaaccttttacatggagatgtaggaactgattcaatagctctatccattgaaaaggctctctggataccattagtatcatcaaacgatctgtgaccagtcctgagttctgcttcttcaccagtattctttaaacaaacatcatcttcgaaaatattcccatttaggcccccttgaagagctttcattctctcagaaaatcttggcccaagaggtgacagagaaagtggcggagagacagatatatttctatgacatggtaatggcttattaggtacttgaaatgtttcatgtactggtgaatataagcaatgtacatcttgactaggctgcagatcgttagagtcaagcaatggaccatccgtgaaaacagtcgatgaaagtttacccgtgtgtgatgtgtcattcccccattcagagcagttagaagtggtgaagagacgcaatctcccagagatattggcttttttatgatcttgtccaacaggaatgtgaaatcctttaggaagaccagcagaagtcatcggttggttgctatggctgatatcaagcgagtcgcctctaaatttctcagggaaaagcttattcagaggagagcttacccgtttcctgactaacgatcca

SEQ ID NO: 6739 - DNA, 1942 bp, Arabidopsis thaliana landsberg
  unsure (1)..(1942): unsure at all n locations
atatacattataatcttataattttaaaggtagagttgaactattcatcgtgagggcttcgatttaacatattatatgtcaatattttacaaaattaatggtaacaaaaagagcaaaaaaaggatacaatgcgtatttagacttcatagaattaatctacatatgttggaggtggagagtaaaattgcaaaaatggatgagttcgaggtttttttgcacaaaagttaaagttttaacctggatagactttaatagtcaatgactatggcaacaacaaaaaggaacgaagaagatgaatagatagatagatctagcagagaagaagatgaatataagtggagttaaataggaaattaatcaattataatgttccacaatttaaataaagcgttgtagtgtcagccaattttggaatacaaatatttgttataggtttttttataataattctacctaaaagatgttattgaaaagggcctaaaaattatgaagcccgaaaattcaaaataaacaatttggacctctttttgttatttgttttggtttattatatatagaccttcgtttcatgatttataaggttccttggtagaatacataaaacaaaaagccgaaattgattgggggttatggtttaggaaatttagaaacacttaacaaataaaatcagcaaatctacatggatcgtagtatttgtgaaagtggaagataaatactacatagttgtattaacatttaaaaaaacaaaaaaaaagagttacaaccaataaacacacttggtcttgaatattcttccgactaagattcttgaaaccaaaaattttctgaaaatggaaattagataaatgttatatttacagaaacatttggtaatacataaacaatgtcaaaattgaatatatttttttagagaaaaaggttgtaccagagtatgagtcatcattctctgattttcttgaaaatctctttaaaaacaacattagttgtttttgtatctcttttctcctcatcatcaacaactaggatcttcatgacacatctacataaagttgaccattcttaaacatggatcttggcaaataaattccaacatgagataaactctgatcttggctcttcttaattgtcattccaaagcacagagatagtttcccatatctccgtgctttgggaaactatctccattgaaatcgaaaaggcattttaacatctgaaggtgtaagcgccaatctagggatataaactttctcatcatcaatgtcgttgtcgtcggttacggagataactcttggttcaatgatctgttctcccaaccttgttatcaacaatcttgtctcactacacaaacctttttttggtcaagttttcttaaaagcattaccgaactcctttcttcaacttcaggacatgggtcagcaatcctgaacatttgattgagctaaggaactcaaggaactcaattgagacattaccgtatctgatagtaaaaaaattaaacttatagattttgtcataactaaaatactcctttgcttctcctggtaaaagattcatgatatagttgttaatcgcgtcgagaacttcattggtaggatataatattgcatgtccctaagaaagaagcatcttctacattttgaatcaaagatggataaatggtattggtaattgatactatagggttaagattatccataagaagcatgtcacttggagtattaatcacaacttcaccatcatttggttctgaaagctttccatctcctaatttcagaatcccctcagaaaattctttgatggattttatctcagcaggatctgaaacaatagttagacccatgttttttgtcaaatgaagaactgtgcagaaatgccataacaatgaagaaattaatgataggtgaacaatttgtcgtctgctaccttagcantacaggaagca

SEQ ID NO: 6740 - DNA, 912 bp, Arabidopsis thaliana landsberg
taccaaatcaacggtttggcctttgtctctgagagctgttgcaactgtggctgcagctccttggagatctttgtccaacgcacacactatgttctctacttcttgtcccagttctggcaacaaatccttctctttgagcaactaaatgaaagtggcaaaaataagaaccagatattcagagacacacaactattcgctgcgggttataatagtgaccagaagcaaatttaacttacttcaactattacagcatcgccgaaaccaaaaccacaagcaggaaagtcatcacctccataagtagagagtaacctatcatatctcccaccaccacatatagctcgcagcttcccttttcgatcaaatccctatcacaaaacgttgtctatcagttgctattacaaaactatagaccagtatccatgtatggagaaaatctaacctcgaagacgataccagtgtaataagcaagaccgcgcacaacagatgcatcaaactgtatccactctgaataaccaaacttttcagcaagtgagaagagttgtttcaaatctgcaatggcttctcctgctccaccaattatatctgcttatacaaattagagattcttatcagcagaaaatttcggagaaagggactcaccagaaaaataatggaaggacataccttgcaaatcatccaaggacttcacagaaagcacttgcagtaattgttcaatagcatcttctgatatccccgtgaacccaagttccttttttatttcatcaatcggtatcttttctatctatttagcatgcaacataaaaaaaatagggtgacaaagtcagtaaacacaggaacattcctaaagctggagtatctgatcatatcagcaaatgaagtagcctggatttgacagcagtagtatattgatgt

SEQ ID NO: 6741 - DNA, 2771 bp, Arabidopsis thaliana landsberg
agacttaactacaccaaccaaccattaaaaccctagaccttcttctcttatacctctctctctctttcgtcttcgtcgtctcttcttcctcctgatttgactctctcgagtctcgtcgatttcctccgggaggagacttgaaattcgtgactttccgattgtgaattccccgatggatctgcctagcctcgccttaatcgttggcgcggctgctttcagtcccaatcctgacgagcgcagagctgctgagcagagccttaatcaggtatacaccaaatttttctttttctggtttttattccttcctctctgcttagttcaatttctctctttattattttagaattgtgatagaactaagcttatccaaattcggagtatcgatgttttttttcttcattagattgacttgatttgactgtggttgtattatctgctattaaggtttaaaatctgattgaaatttcggtttttttttttcagttgcagcacactccacagcatttgataaggatattgcaaataattgttgatggtggctctgatctttctgtacgccaatctgctagtatccatttcaagaatttcattgctaagcactgggaacctcattctggtaattgtttatttagtttgtttattaatcaaatattgttatgttacctgtttgcttggattacattgtttttgttttgttatgcaggtgaccagaacataatcttgccaagtgataagaatgttgtcaggaaccagattcttgtatttgtctctcaagtgcccccgattttgaggtagcagtttgtgtacaccttgcagcagtcgttaagaccaatctactttttttggttaatttgtctacggactgatatgtttgtgttatgtagagtgaaatgggcttgatttatacatacatgttaacaatgaagtatagataggaaagctagcctctgtttttggtccttattcttgctcgttattggtgtgtatgatgcagagttcagatgggagagtgcctgaagaccataatttacgctgactatcctgagcaatggcccgaactcctggactgggtgaagcaaaacttgcaaaaaccacaagtttatggagcgctatttgtcttgaggatactatcttcaaaatacgagttagtctgctttatcaacttaaatttatgttatgaatctgtttgtctgaaatcaccatgtgcgtaagaattctagctcaggtttttgccttctcattcatagttcatgttataagcataggattggcaattggccaatcatattattattattattagttcttcctctgaaaacaaccctggccatttatagttcctctacaccttttgccacttaatagtgatatgtagattttatctactctggtcaattttgatagtcatagagagttcatatctttgttgccatctcctgcttatgtttctgccatggtatcaactcttgaacttgcaaagcatggcatatttatcagtagcagattagtagaaaagagatgtgcatttaggtaagttggggttacatgctgtggggtttctgtctattgcgaagagttcggattatcagttattatattaaacatcatgaaaaatataatcatttttttaaaaatttctctttctgcttttcccacgttctgtttataggtttgggtcagatgaatatagggcacccattcaccgagtagtcgaggagacttttccccacctgttgaacatatgtaacaatcttgtccatgttgaaaatccttgtctcgaagtggcagaccatatcaagcttatttgcaagatattctggtcatgtatttatgtaagttgtaaatcttgtggtcattatcattaatggttcttcactgcctgcttcctggcttcaactaaagaaatttgtggattttgaattttgtaaggagtttatgggttttcggtggtttgccttgaagttttttcatataattctcttttatccttgttccgtacagctagagcttccgagaccattgtttgatccaaacttttttaatgcttggatgggtctgttcctaaacattttggaacgtcctgttcccgtagaaggccagcctgaagaccctgagcttagaaaatcctggggatggtggaaggccaagaagtggattgctcatatcttaaacaggctatacactcggtatgcggggacatgaaaatcttaccgttaacttataacctagcatttgttcatctaccttaaataacagttttgaaaacttgttataggtttggagatctgaaactccagaatccagataacaaagcctttgctcaaatgttccagataaactatgcagccaagatattagagtgccacctgaaattgttgaatgccattcgtataggtggatatcttccggatagagtcatcaacctaattcttcaatatctaagcaacaggtcggatgttctatatggcctacttttgatcaattttagaaatttatctgaatatgagttctctggatcaattaaactggaaaaatcattgcacgtgatgtccccatgatatgatatttttggctttattggagagttttgttagttatattttcttttgattttataaaaccgttggtgtaatcatactttttctcacagcctgttgtcagagccattggtagaatgttttgggtagattttctagttgcagtttctattgtttccttgaaaactgataatggttgtgtatctagattttcgttttcattagttggggtct

SEQ ID NO: 6742 - DNA, 1719 bp, Arabidopsis thaliana landsberg
taacagcgtccaacacaaaatatcgacaatgatccgagatacataacttgaacaatctgagggataagtgacttcattttcttcttcttaaaccgttcatctaggtcagcacgagcaaacctctgaaacctcacactctcagagatctctgcgttattagccttgacaaacaaaattgcaggaagaacctaaacataaaaagctctgctttagtaattttcccgtaaattaacaagaagaagaaaaacaccaattgtagaaaagactaatacctcattcaagtaggtagaaagttgagcagaggcaatctgtgcttttctagatatcttacgaagccggtcaccaagatatgctataagaagcgcaacagatggtatcacctagaacaatacccaaactaataagaaaactctagagcaaaagagacacaaacagagacaattgattcacttaccattgcagagactagtgtcaaggcaggacttgcaacaatcatatgtgccgtcattacagatatctgaatagcactgggcacaactgtctgccatataaatgaagtgtagagcttatagttgttagccaaaatcaccacaatgtatcaaaaaattctgaaaagaaggaaactttctcttcgcaaaacattcataacaagcaaaacactcacgttgagaagagcatagatagtgtcagcaacttcagaagcttcagcagtgatcctgtaagcaatgtctcctgatgaaatcccattgccaccttcaaagaactctagttctctctctaaaaccctcctatacgcgaaaacccgaatcttgtaaacagtattcaaagcagcttcccaaagaaacgcttgctgcagataataagcaacaaccttagccaaaaccagacccgccaaaacgagacattcgcctttgagcttcgtcaagctcgcggcgtttgcgttaaggttggaagtgaaggagccgagcctaggaacaatctgagaaagcgagacaacagagacacagctgcagagccagccaagtaggacggttttagattccgattgaagatagggtttaatagtttcgagggcttttagtgaattgactgttgtattggctcggagacggagagcggagggtttacagaagctcaaaggtctcggagatggttgaaatggatgtttgagaaagagagatgagctccggcgatgagatagcggcggcggaggaatgagaagacacggcggcggtgttaggaggagaaatgacatttctctccaaaacaaatttaatcgaaccaaaacgaatcaacttctaattctaattcggtgataattcttctgaaccgaacctaaaccgaacatttaagcgattgctaagaagtaagatctgaggcctttatgagtttaatacccgaggcccaacctgatcttatcaagtaagaggttgatatttaaccccaaatagttttactttacaactattaaataaattttaaaactcattatacacactatattgaatatttcaagagatttatagtttttggtagaaaaacatttaaactaaatttcagttaattttgtttgcaatttaaaacgtttcgattaactttagttgaaattgtaacatattgatatatgtattttagatttaggttccgtacatgtctaggagaggtccaccaccctaggtataattattgagcaaaggtccatggaataagaagtgtggt

SEQ ID NO: 6743 - DNA, 2210 bp, Arabidopsis thaliana landsberg
  unsure (1)..(2210): unsure at all n locations
gatcttgtccataactcgctgttgaaactcagctggatttcggctgttagaccacgattagatagtggagcaagaagatcgttgttcagccatccaaagtttgtgcctaatggcctttcagcattaacgattctaactaccgcctcgtcttccgagtcttccttataaatgacctcgcactcgatctttacaccagccattctagacttggagattcccatatggctcaagttttcgacttgtatatggaatcgatcattggagccacactctagctccgcgccacatttcttaagtggtatctcctcacaacttatggtagaagatgataccttttctcgggtagttacgtaaatgacaaaggtgagatccgacaaggaaattttgggtttggtaagtttcacttccttagctccggaatgttctccttctttggccatcatcacctgtgacttctcttttctttgttttggaatgagttttatgttattcaccatccatgtttttagtgttacaaatcttctttatatctcaccacaatgactctcaattatttttatgtttttttgcattaattctcattaattgttaattgattaattaggagtaatttttataacaaaatattgaattcctataatctccttttcacatgcatatattattaacttccaaatttattgctcatggtttaaacattatgtgttaacatatttttatactacattattattgtatgtatttaatatcataggtttaaatataaatttaattaataatatgcaattatgcatggcacggggaaccactaagactattgtcatgatattaatatgctgttaaagggctttaacgggcttcggggtttaaaaggcctcagatcttagcaaccgcttaaattctcggtttagcttcggttaagacgaattatcatcaaattagaattagaagttgatattccttttggttcgattcaatttgttttggagagaaatgtcatttctcctccgcttaacaccgccgccgttatctcaccgccggagctcatctctctttctcaaacatccatttcaacaatctccgagacctctgagctccggtaaaccctcgaaaataggggataaaaaaaaaataggggattggtttcttgttcatcaagcatcaacgcctttgcagtaaattttttggtgcaaaacaaagctcttgattatttaggtagaaacgcttacatatttttaaatttcacagactttgtatatacataataattagtttttagaggggaaaaaacattgaagatatctaagagtatcttcaggggaaaaatatctctggtcgctttcaatgaatatctcaaggctgatcttgtcaagtaagtcgccgtttaaactcaccttgacatcgccggttaggccacgtctgattagatcttctggagcaagaagatcgttgaacaaccatcgtaagtttgtgtctaatgaccttcgacctttaacgattgtgacaatgttttgccaatctttcttataaacgacttcccaagtgatcattacatcatccataccagacttgggcagttcaaaacgactcaagtctacgatttctattttgaaccggtcattagggttaaactcgcggtccgcgccaaattctacaactgttaacttctttgatttggttgtgtacacgcctatgacaaaggtgagatccgacatggagattttgggtttgggaagttccttagctcccgagtgttctccttcttcggccatgaccaccggggacttctccatctacttttaacctctctttgttttggaatgaattttgtgtttatattttcaccctccataatttatatatagtggtacaaatcctcaatgaattaggaatactggaactaaaattgattacaattaaatatctaatatagagttttaattttcggcatatattctaataatatagagtatttttttgaataatttacaaaatatatggaaatttgtagatttatactagctaggtgtattatgggccattctgcagcatttcatggttatgagtccaacatttcatactaggtggattagatattaaaataatgaattaatttaattactataataaattaataattntcagattgtattattcttagagattttttatgatttaaattagtattggatttttcttattaaatatta

SEQ ID NO: 6744 - DNA, 2464 bp, Arabidopsis thaliana landsberg
gaaatttaaactggagtcttaaatgttaaaattgaagtatttacatttgaggtcgaagttataatctaaagccttaaatcaaaaaagaaaagaaatcgaagcactttataaacccccaaatttgtgcaagttaagactatacacagtcacacacacacacacacacaaaaaaaacttaaactaaagaccagaaccagaatattttatcaagaaagaaagtaaaaatgactacaccagagaaatagtaaaagatgatggcctcatggggcacccaagagaatcgcatcacccaaacccgacccatgttttccaatggccgagatgcttaaagaacgtttcctcatcttttctttacccaaccagagtcttgtgttcccattctcgcatgtgagcagtgatgcacatagctgaagtggctcgacaagctgctggtttgcggtccgtagaaaaaggtctaagttctgtatgtacttgtcttcttttgttgcttgcttgttgtttttttcagacattattgcaatcgtatctcgtgactcttcctcttcatctgtccagtagcttttgtcttccattgcaagatcatcgtactcctcatctgactttgttgattgctcatcaaccgaacccacctgcagacgtacaaggcctcatggttaccacttcattgcatatgaacacataaatgagtagaaagatcattaagaagattttacctcgtcatggtctcgcttgttatcgtcatcgctaaaatctgtatctggctcgggaggatcatcctcgacttcttcatcgctcccatgcactgactgatcttccttaagctgttaacagagaagatacagaatcatcaaacaaccttccacatacaaatcacatcagagaaaatagttttacagtacctctttagaagttccttcagacatcctaggcgagctgcagcaagaagagtaataccgactgctggtttcagccatgtcagctctacagtcatctacactcccagcgcggctcgtggctccatcactaggccaagcactgatcccaaatagaccaaactgaagattcaccggttcagctttctgtaggtatccatagaccgggtgctccattccattttcttccatcatctcattacaaaagactggctttccactctcatcgaccttaccagtaacgggccaagttcttgcgaaagtgccatcagtattgagaagagccataagatgcctagaagaaccttttctttggatcagctgaaacattcctttggagctcaatgaattagctgtacactggtttctatactcatcgtcaatcactgagacagtatttgtagtagcatcatagagatgctctcctgcttctcgcctacgcaggcaactgaagactgtagcgtggatcgcagccacactcttgtcgacattggtattgtttatcttggggactagatgtttgtcagctcgtttacacaagtaatcctgtattgttcggatgttacgtatatattttacatacttgtttttctctgggtccagggtcatgtacttagctctaactgcaaatcgttccaaatgtttctcctcgtttgcgatgtataccatgaaaggaactatagaaggatgctttttcatcagtcccatctgaaaacaagttagaagttagaattacaactttcaaaatgaaatgtgttaaagagaacaaattgagtcttaccacaaagttgaggcttaaatggacaccttcaacaataacagactctttcctttcttcccatgcggtaatgagcctatcgagattgtcaataaccatttcactttgagccttaaatccttctacagccatttgcttgggacttaacaatacaggggtggttttttttgatccaacatcagtctgttgagtattcttagccttcccaccttcagaggctttcgctttttcgtcctcaatactatccatttttttggctcttcttcttctggcttttgactcagcaactgccacagggtcaaggtactctccagcatggtatgttgaagcccatagcaaaggattctgcttttcatcaacgaaactcctcatcatgtgacggattgagtcggttgagaccaccgttgtaatcccaagcctacttccctgtaaggaaaacagaatccagtattgtaaagcctgtggaaaaaagaagtgaaacagtacctaaccaaatattgaatataacaaaacaaaagagtgaagcatcatcttatgtcaatctaaaacgattataatacatgtgatgaaaaataccagaagtgcggagagtgtagatttgccacagccactagtaccgcacagtagaacagtcacagattctttcctttctcggattctgtagaaaatgacaagaatgttaaaatgatgtgtgaagggaaagaagatcaaatgccttgtagttagccataaatggcatgacttatgttatgga

SEQ ID NO: 6745 - DNA, 1140 bp, Arabidopsis thaliana landsberg
  unsure (1)..(1140): unsure at all n locations
tgtcatgtacttggctcggacagcaaaccgttcttagtgtttttcctcgttagcgatgtataccatgaggggaacggtcgaagggtgctttttcatcagtcccatctgcaaaaaaggaaagaaagaaaataagttagattgaaaagacctagtagccttaaatgattaaataacaacatgtaatgaaacaaagataagacttaccacaaagttgaggcttaagtggactccttcaacgactactgactcattcctctcttcccaagtggtaatgagcctatcaagactgtcaatcaccatctcactttgtgccttatacccttctatagccatctgcttatgacttagcaactcagtggtgctagagtttgatccagcatccgtcttttgggcattggagtttacacctcgagagcctttcagttttttggcttttcttttggcttttgactcggcaactgccacagggtcaaggtactctccagcatggtatgttgaagcccacagcaaaggattctgcttctcatcagcaaagctcctcatcatgtgccttatagagtcagttgataccacagtcgtaatacccaacctgctaccctgtaacacatatttagatattgcatctgattaagaacacattgaaaccagttacaccgtacgaattgtatcactctgaaaaacattgaataagtacatagcctaggagttcagtatacaaaaaaacaaaagacaagaacttcttattgtcaatctaaagcatataaatggagggcatagaannnnnnnnnnnnnnnnnnnnnnnnnnnnnnnnnnnnnnnnnnggtgccacagagcaaaacagttacagattctttcctttctcggattctgcgagtgataataagaattaaagacaatgtttgaaataaaagagaaaaactacagttcaggacaagatatatgaatgggaaagtagcaaatccgaggcacaataaaatcaaagtacagccgtgcatgcattactaatgtaataggagcactaaaggggattaatgcaggaacgtatgaagataaacacgatcataacatttaacagtcagacaaccacagaccacattaattatttatgtgaaattcatagtggacaggaaaagagagaca

SEQ ID NO: 6746 - DNA, 2139 bp, Arabidopsis thaliana landsberg
  unsure (1)..(2139): unsure at all n locations
actaataagtgtgtttacctttcttagtttgattttctttagctttagaatgatgtggaatcaaatcaatcgaagcagtatccttttatcgtgactggattgaccaaatgataaaccaatatggatgatctcatgcgccaacattgagtgaaagtttccttgtcgtagcttgatgttcttttgtgtgttcttcttccattgtaggtggttttacctgaggggtcaaaggatatatcagttaccactccattcgccgtcaagcagtctcaagaggtaacaaagtcttggctttatctgttcctgatttatcctgtctggatactatctctggtgattataagtctttccctgattttgattctgatattttaattcttcatgttgcaatcctgttcatttgcagatcaaatattcacatttagatatagctggtagaccagttgttgtgctcgaaaagaacaacgttgtccctgatcacaatcagcatatccaggtaattatattatacgtcagaaatgctgtcattctacatccacaatattcctactttaattgattatgatatttgttttctgtacaggtctactataagttcagcaacatcaatctgctgagtgagccattgatgttaatctctggatttttcattttgttcatcacttgcatcatatacacacgggctgacatctcaatctccaagtcctctccgagttatttggcgaaacttcaatgggatgaggtacattggaaccttttctcatgtatattttcaagcgatttactgatattctctttctctgaatggttgatatttaaacggctccatttgtttatcaggtcctagcaacactccaggaagtccaaagcatcgtccaaaaatgcttagccacacatgataagcttgaagcatcgctgcgtgatctctcaagaactggtgacattcaaacctgcaaagcagctcgcaaatccnnnnnnnnnnnnnnnnnnnnnnnnnngaaagaactgaaaccgttgctgggtttcttacagtctttcccatcagcctctcacatatctccaaaggttctaaatttctccctctacctctcttagtctcagctctacttaaccgtcacttttgtcaaaatcattccattaatgcaggtcgaggagctagttgtgaaagagaaagaacttcaagagaagttaatggccaaacataccactgttgttgaagggtacgaaaagaaatcctcagggcgtgatatcgaaaaccggatcgcttctcagcagcaaaagatcatagctttgaggcaagaaattgaagatcttctagaattcattgatgagatctagaaaagttaaatgtagcaaatcctcttacgcttaaataccagacttttgaactcactcccattagaaaaattttgttcctcaatgagcagtgtttatcaactttgaaagacagctctagtttctctgagtttaacaaatgaatcatattatcttaaaatcatttacaagaatgtatatagatctaaccaatgttggtgaatataccagagaagtttgggattttgtcgatgtgcctcaacgccttctctgcaatctgtcgtgtcctaaaatcggcgttttgaaaggcgtccacaagtgctgcagttacattttgttcttctcccacttctctagctatttcttcaatacgtaagatcctctcgaccatccacacagctctaatccttaaattctctgttcgattctccaaaagaacatttaatataggcgtaatcccgtctgcttcatcaattaatctcactccttgtacaacatctaaaccgtcctctaacaatgtagagagnnnnnnnnnnnnnnnnnnnnnnnncttgtcattttcatggtctaagagatcaaccaacttatctactgcttgtccttcaacgagacaaaagctttctcttactgaacatatcccttgatggatcttgcaaatccctagaacaacaggcggtttgctcagacatgaaaagatggatacacagtaagtaggaggaggcagttcaggtatctttgtaagatttttggattcaagtgaaagaatctccaatgctgttgcagaagccctctggatgttatcttgactgttggattgaaggagatcaa

SEQ ID NO: 6747 - DNA, 1678 bp, Arabidopsis thaliana landsberg
aaatctctatcccttgtttttcttcttcgcttcatcgattactcaaagaggtttctttctctatctcttatctatttctttctgcatctgtagtctctttgttcgaaaaaaagatgtttaatttctgtcaaatttttctccttttttctttgttcgattattggtgtatctgtcttgtggcgtgcgattgatgtttactgattctgaaaaattcttgctaaaataattcatcttcaagtcaacgactttttgcccaaaagtgatgacgggaacaagaaatttttcttggtcggaaaattactaattttagccaatcgtagcgatctctgcaatcgtgttttggttacccaagatagtacgatcgaatcagttcgtttagagaattaaaaaattactcaaatttagaaacttccaacttctgtttctttctattctgggttttttcacccacttggattattagctttaaaaatctaatctttgagtcatttttgattgttatttaggttgttggttgtgagaataattagcttgttaaggaagacgttatgatgcatcagatgttgaataagaaagattcagctactcattccactttgccataccttaatactagcatctcttggggagtggttccaactgattccgttgctaatcgtcgcggttctgctgaatcactaagcttgaaggttgattcaagacctgggcatatacaaactacaaagcaaatcagttttcaggaccaagattcatcttcaacacagtccactggtcaatcttatactgaagttgctagtagtggtgatgataatccttccagacaaatctccttttcggctaaatcaggttagattgttggtatatatatgttttacttcttgtgtcattgacaaaagaatcatccttttgccataaagaatgttatcctctttcttactttctcagttgtttctctaggatctgaaataactcaacggaaggggtttgcaagtaatcctaaacaaggctcgatgactggatttccgaatattcactttgctcctgcacaggtatttgtaactctatgaatacagtaatcatagcaaagcttttgattgtagactgatatcttatgtttatacatggttcaggctaatttctcatttcactatgctgatccacattatggtggtttattagctgcaacttacctaccacaggcaccagtaagtacacccttcgtttccaagtgggagatttacctttcagttttatctgtccatcagatctcaagtctcttaatctcttttgcagacatgcaatcctcaaatggtgagtatgattcctggtcgtgttcctttaccagcagagctcacagaaactgatccagtctttgtcaatgcgaagcaataccacgcaattatgaggaggagacagcaacgtgctaagcttgaggctcaaaacaaactaatcagagcccgtaaggtagttaccaaattttggtttatattttaaacaaacgcatacacgtagaattgctttgctcatcttttctttttcttattgcaacagccctatcttcatgagtctcgacatgttcatgctcttaaaggccagaggatctggtggaagattcctaaacaccaaaaaacttcttcaagaatccgaacaggctgctgctagagaacaagaacaggac

SEQ ID NO: 6748 - DNA, 1649 bp, Arabidopsis thaliana landsberg
aatgtggaagatagtaatagtagtagtagcaactataggttctgcagtctgactatctacagaggggtagagacttggtcggagaaggtggctggacggcttgttacagaggattgggaccaagctgcgcttctagtcaatgtgttctatgactatgatatatgatataatcaacaccggaatggagtgtatgaatctggtttagctttactaactatgaataagcaaagagcagagacttatcggttatcagatttacatttacattcatcactccaatccaatcactgacttaacacacgatgatccatggtacaaacgacagacgaaaagtaaagagttgaagcttgaaggtttttggtcattcaaatgatatctggacaaagcgtgtgaaataaaaactagctaataagcgaagtagcagccaaggatgacttccctttttttgtaggaacgtacacatcaccagattccaccggctcagatatggacagagaaatggtgtgtgttcctacctccatgcatgtcatttgattgaccatgaacatacattgttgggtttgtctgagatgggcaatctgatatcagaaattcagagtgtccaaagagattaacgctgtcagaagcagatgtgatgtcagagcgagaagtggttgaacaatcacagtcattgctgttctgcaactgataaagcacaaatcttgacatgtttcccgttgcgtgttgctgttggattggcatgtcttgttttggatctgtagattcttgaagctttttggtgtttaggaatcttccaccagatcctctaggtcgtttaagagcgtgaacatgtcgagattcatgaagatacggctgtatgatatttgataatgagttatgtttagtcattaaaccaaagtaagataccgaaacgctgaccaaaatactataccttacgggctttgattagtttgttttgcgcctctagcttagcacgctgttgcctcctcctcataattgcatggaattgctttgcattgacaaagacaggctcattctctatgagatcgaatggtagcggaactcgagtcatttggggattccatatctgcagaaagtttttaagcaaactgaaatctcaaatggagaaataaattgcaagactaattcaccatttaaggatggcatttctttctatagctgtatatgtaactacttcagagcataatgttacataacaagtccaccttaagtaaaaatgaggtttagcataaatatcctcctcaccatatgtaatcaaggaggatatacttactgttgcctgtggtaggtaagccgcaggcattaaaccaccaaaatgtggatcggcatagtgaaatgagaagttagcctgaaaccagagtataacacaagatgtcagtaaacaatcacaagtactgcttatcgtcacgggtaccttggaaggagaagagtgaatatcagcgattcctgccgtggaggagcctgatttaattgcaaatcgcttcctttgagtttcttcaaatcctttacaaacatctgaaagaaagagagcggaagataacattttcaggacaaaaggatggattctttcgttaatgggaccaaagatcaagctaaaacaccatgcgtcttcaacataatagatcata

SEQ ID NO: 6749 - DNA, 3074 bp, Arabidopsis thaliana landsberg
tctttgcatcaatatgaatctatctctacacaccaatatcttaccgatttccaaccattttgtaccagacacgcggtgatcttcgtgctaatacctggtaagggaccaggctccctcgtgatttttcccccaaagagttttatagcttctgcagttttgtacacatcatccgtccctattgctatctgatagtaatcaaatacaagcaaacaagttaaaactatcgcaaccctccagttgaaaagtaatatagacgaacggaatgtcaattttcttttacctgagcataagcatttcctttatcatattcagtgacaccatagttatatgtcagctctaggacaggaaatttatcttctggaccatatcccatcatggctattgtgtactgcaaataaccacttacggtaagtgagtttatacaaaaacatataaccgatatatacaatggaaggttaaggccgcataagtaagaattagatttgtgaggcattgcaagttaccttgtactctgggttgtctcttgttcgcagaagttccattccaaaagcctataaagaaaggaagcacacatgatcagaggataagaatgcattctgataaaagagatagaaactatatcagatcaaacatttactgtcaggctgcaaactaccacatctcaaaacaatttcataggaatcaccttctcatagaactttatggccctatcgagatcaccaacacggagcataacttggcaaagaggttctggtgtaggacctctttccaagagttcaaatttgtaaccatcaggatcttcaatgaatgctattacagttttgccacctttgacaggaccaggctcccggcttacttttccccctttggctttcacaagctctacagttttcgccaccttttggaaagaaattttcacttcttagatataaaaccattaagtggaaagagtaaaatccatacacatcaaacactgtttcaaagaaagaacataattgcatatagattgtagaagctcacatcatcgaccgcaataccaaagtgaccaaaaccagccccaatgtcatacttgtcaactccataatctgtaaaaaaaaattacactaagaaagctaagccaaccatataaatataaaatgcatagtcttgagctccctagagctaaatgaactacaatactcagagtcttggcagtagcataaaagggggatacagatataacttactataagtaagctcaatcacaaagtgtgaatcttccggtccataaccaaggaaagcattagtatacttctcttctggtatatcacgcttacgtagaagcttcatcccaagacattcagtataaaacctacagcaatcagatgattcttttaaacttaatgtgactttaagagactcaacatcaaagccatatcacaggaaagccaaagtgaagtactttatcgtccggtccatatcgccaacacgataaacaacatgaagcattcttctcttatcattcttaacccaggtgagaagatcatcttgtgtagtagcttgagctgctttaccagattcagcaactcctaaacagtttacacttcttctcaaaagcttatgagaagttaaaccaaaaagctgtgattgaggaacatctgcaacaacacaaattgaacaagaatcataaaccagaaatttgggaactttaaaacaaccctagttctagaattcactaatcaattggagaatgattgtatctatattgtgtagtcaccgatatatgtgaaaggaggagaatgattacggagagtgcgagagagatttctggagaggagggagatggggaagcgaggagaatcagagaagcaggcgagggaaggtcgaatggaggaagcagccataggaatgatcctcaccatcttcttcctcgagattcagagctctctgcgtgtgttgatgaatgattcgtcaagcggtggctacttttcctccgtcggagattaagtgacgacaacggtagagactagagataaagcttttttattcttttttattttggagattcattaaaaaaacaaaacaaaaaaacaaaaacaaaaaattgaacgattcgtgatatttagacataattattattagttaaatgattaattagttaattactgccttattggaacttatatatttagattttgtattgtaatgttaaaatgaaatgaattttttcttacttacaaaaaataaaaaatggaatcgatgttggaaaataaatgtcataagtaacactatttattaataaatgactacaagactgttgaaaaaatataaaataataaataaccattctatatagtgatttcattatgacaattttctccaatttgttatatctatcaaaaaaacatttattcaaaaaatataataattacaagaatcaaagaatatatacatgtaagtataaagaaaaaaaattaaccttacaaacatgttatataggtttcgtttcaaaaaataaattgataatatatgcatatcaaaattagacaatctgaatccattctccaacgctagggacaccattgtagacggcaaagagaagataataaccaggaggagcaagttttccactaggaggagcaacggcttggatttgatgattatcgccaccaacattcttcacattgttaatacccaacataagcaacctcatgttcattgatacactatgtgtagtaaatgatggtgccaacattgtcaccattacattctcctttgctacgttttgttgcttaagctcgatctttacgtcaaacatttgtccgtacttaatctgttttggtgttgcggtgtttacgattcttggtctcatattggcaagagctggatcaaggtaaggtggtgagaatttctcaatgcggagctcggttgggtactcgacgttgaattggtatccgttgttggtgttacttccaccgacgagaactttaccatcaggaagagcgattgcgatggagtggtaccacgagggatagtggaaggagcgagttctttaaaacgttggcctaaacggttgttaggtttgtacaagagtg

SEQ ID NO: 6750 - DNA, 2015 bp, Arabidopsis thaliana landsberg
agtcacagatagttcactgtcaccaatttctattgaatcttttgatgtttcatgtgtataaaaatagttaagaagtgtgtgtttgtctttcttacaccacggataaaattaagagccgagtgaatcagagtaaatatctatgctaaaaacatcacaatcaaagacatttgatatctgtaaaacccagaatcaaataagcagagcttggagccgtaggagagcacaagagtttcaaagaatagagtaagcacgaactacctcaatcacaggggcttgacacatgggacattttcctcccgcttccactagcttctttgcacacttctcgcaggtgttcatatgtccacatctgttgtttacgaacgaaacaagaaaaaaaaaacagaggagtttagatatcaatttgggaacatgtttaaaacaaatgttggtgttttcatggttcatagtttcatacgtacctatacaataaagagtcaatattgctctcgcagcatacgcagcagatccctttccttacatattcccattttgactcgtaactcgcagtgtccttggatggacctgtgaatcgattaaggtgagtccacaagaaaaaaaaacagttgcattctttgttgtatactgttgtgacttgtgaatcatcatatgtaaggtcataatgtgacttgagactaatagaaaacctggttggtcagtagagcggtgcatcgcagcagagacctcttgtcttatggaccgttgtaactcgagttgcatttccatgcaagcctctagcatcctctgcaggttatccatcctttgctgtattctacccatgtcaaccctcaaatcgttgatcgaatcccaatcctgcagagatattgttgatcaagttaacaaataagcgcaacagcatataaaatatcaaccaatgagttccttcatctttagaaaagacaattgctttggcacccttcaccctagggattaagtttgggactagtcttaccattccaatgccctgatgcaaatcatgtgccggccagtttgaatgggatcgatcatggtcccaccgtggctgaatagggatgactggggagggtagagtcaaaggaggagattcaacagcatcaagttcttgaccaccactctgagcatcatcctgctgttcggtatcttcacctactattgtatggtcagaataagtctcggcttcttcccagtcgacaggattttggcttcgtctgtccatgtaagattgtatcaactggctaagattttccctaaacccgctctgcagaagatttgagacacgtctcctgtagtgcccatagcaagccatcagatacataaaatgaggttgaaaagcgtcgccattacggcaaaaatttactagatatcttacctgctcgagagttctctgagttccatgttgttctcattaccatcatccggaggaaagaatgtggtagcccttcccattgaaactgtgtcctgatcagaatgttcctctgaccagtcttgtattgtgctttgaagagatgcagcatcatcatcaggctgcatctctgtgagttccccgagtatgttggcttctctgtcctcgtccacagatgataactgggataactgatttggaaaattctcaggaacatctgtatctgcctcctcttcagcgtcatctctccatgcactggttgcaccattgataagttgccaatcggattcttcgttttccatctgctccacggtttgttcctctagagtgacagttaggttaatgctttcgcccagattctcctggaaatttgttgtccggtttatcggtcccatggtggcaatttcttcagaaatttgcagagactgttcatagggtatctcgatagtttctcgtaattgacaaccgtatctgatctcatctccatgaattgaagaggatgaacacccagtagcattcaggtccacttccgtatcatttcttctttgagaaaaatcatcaatttttgaccgttgccagccttctacacgtgcag

SEQ ID NO: 6751 - DNA, 3618 bp, Arabidopsis thaliana landsberg
tatacaggaagaggtgattttgaggcgtggggtaaagtaagatgtgtttgtctcgatatatgaagaatgtgtctgctacagaataaatatttgttgtaccttgttaaaacaaattttgtcaataagttgtatatatgtttaaattatgtagatatacaatacaaattatttgtcgaggttttttgttttgtttgataacatctattgtccaagtcaaatattattttggttgaagattagagaaaatgttgtagagaaacgactctaggtctttataaaaaaacaacaactcttggttcatcaggtttagcttgaaaaagatggcaaatataaaatgttataaaactccgatgaatgcaaattaatggcacacattagtcgcaatagaggctgtatctaactttcaacatggattcaaagttgtaaacttttctaactacctttcgggccacacaaaaaactctaattaaatatacttgattatatattgtcgcaatgtatttgcatgccttacttcattacaatttcaaaataacaaaactagcgttttaaaaaaaaaaactagaaacaggaatataatgtgatgtactatttattttttttccagttttgaacgtaactaattatgcaaacgctaatgctagccgtgacgtacttgtttgtaatttcagtttaaacatcgaaaagctaagagcctgagactatatctatcgatgattagtaaccaaaaagggtagcttatcgatgcgttggtgaaaaggacaatataatgcaaacgtgaaggactaaggacagtaccatagccaattaaggcttcctcaattaatattcctgccattgcaattatgtatgcacatgcacgacctaaaacccatcccattcatattctatttttctatttattgttttgctgattggggtattcatgttaaaatccaaaattgttttcaaaattaatagtcgccgtatgaattttgctttagaccaaaagacgatgaccaataaactatagatgatcaatttatttagctaaagaaaaggagtttaattgttgtgtttagtggttcatactttaatactttatacattgtgcatatatattacatgaatgtcatgttagctggtctgcaacggcgcatcgctatgtcttttggtttgtgcaaacgagctgtgactaaactttattattgggctttattgtagcccaatatgaattacgcggcaaaagatggattgtgaacttgtcaagatataactacgaaaatttaacctaaataatttgacaaataccaaagtcgacgatggtgaaaagaggtcggagcggcggcgtttcaaatcggagatttcaaaacctagttctccagtcatctgagaagggatcaacggcagaggaaatagtcaatgagctccgttcaaaggaccgtgaatgggctcgattgagtcgtcatgttctgctacttaacgtcaaccaaacccttcaatccagaaatgtaagcgacaaagacgaagaagaaagcaatgcaagatcaaaatcacggaagagagccgccacagcttcaccttcaggatcgtcgtggtctgatgccgtggggacggaaatgtattagatgatagtggtaagtcaactccacagtttgatttgataaatgaaaaccttagggcttcgtatgatacaaggaaacatattagggtttcagatgtggaattagagatagggaataagaataaaaaaggtaagaaatttaaggatcttggtgggttaaaggagatattgcatgacctaacgaattgagtaaagaatcctctgctttttcctgaaatgcatgaacgtcttcaagagaagccaatttctgggattttacttcatggtccacctggttgtggcaagtctacattggctcgtgcatgccattgctaatgaaactggtgttccttttcatatgatctctgcttctgaggttgtttctggtgtttcgggtgaatctgaagagaatataagaaaactcttctctaaagcgtatagaactgctccttcgattatctttatcgatgagattgaggcgattgcgtcaaagagggataatcatcagcaaaagggtatggagactcgtattgttacacagttgatgaattgtatggaccaagagtatatgcttcaaaagatgagagagtctggttctgaaactagcggccatgttatcgttatttcagctaccaatagacctgaagctcttgatccagctttgtgaaggtcactacgattcgacaaggatttttgtctcggaatgccagatgagaaggcaagagaagagattcttactttgatactacggaaccgtcctcttgacccaagttttgatattgcaaggattgttcgtaagacttcaggatttgttggagcggatctagcacttttggttaaggaagctgcaaatgtggcaatggagagattagtgaaatcaagaggatcagaacttggaactgatattgattctttgttgagtatgcagccatgtccatttccaccacaagtgatagagaaacttttctacactatctcggattttgaggaagcattgaaaaagtttaaaccttcgttaacaagagaaggattctctactactcctagtgtaacatgggaagatattggcggtcttgatcatataagaaaggagttttatagcgatataatcaaaccgttgaaatatccagaagagtgcgagggattcaagttctgttcagggagggattttttgctatatggaccacctggttgtggtaaaacattagttgccaaagccgtggctaacaaagcagaaaccaactttatccgtgtcgagggaccggagctttgagcaaatacgttggagatagcgagaaagcgattagggagctatttaaccttgcaaggatgtgttcaccgtgcataatcttcttcgacgaggttgatgcattgacaacaaaacgtgggtcaggagaaggtgcttgggttgttgaaagaccattgactcagttgctcaatgaaatgagcggtggaaaagaacgagatggagtgtttgtgattggtgcaacgaatagaccggagatgatggatcctgcgattacaagaccagggaggtttgggaaacatatctatatacctcttccaaactctgttcaacgaggtttgattctgaaatctcttgcgaggaagattcctttagacacaagtgttgatttggatgctatagctaggcgttgtgagaattttagtggagctgatcttgaagctttggttatagaagctggtttggcggctcgagacgatgagacaggctcgtaccctcgtaggacaaagatggttcattttgaggaagcgtcgagtcgtatgcaaagcggcaggtgaagagaaaagtcaagagattggccaagtttttccagttttctacattttttcaaaacttcatgcttattttttttggattattggtcaagtaagctagtttggttttaccatgttatatctgcttggtcaaataaaatgttatgtcataagttcatagcataacattttaactccgcccattctgattgcaaattttccgatggactatatagttcaagaatattcgatgtgat

SEQ ID NO: 6752 - DNA, 1714 bp, Arabidopsis thaliana landsberg
aaacaccatgcacttagaggagctgcaaaacacagatattcgatgcagattaaatttaactcatttatggaagattcatggagaaattttttcacaatgaataaaggaaaaggtttgatcaatgtcttcacttcatatatgcagcattacaacttgttatatgactcttaatttatgttcttgtcattagatccccataaactcaactgattattccaccatgttgagatggttagcatttggaccaaggaatatagtccaaagctataaggggtacatcagtaatgaacatcggtttcaaacagagaatgtaaagaggaagactcaaaacaattgagtcacttatgaagctttctccatgtgcagatcaagcgcacgagatatgaatcaggttgcagatatagttttgtactatggagttatacaagagattatcttgctagactaccacatgttccaagttcccctattcaagtgtaaatgggctaacaaacagaatggtgttaaggaagaagacggctttacgcttgtgaacctacatgttaaccaattagcatatcttcaagatccatatattctgccatcacaagcgaaacaagtgttctactccagaaaagaagactcctcgccttggtatgtggttatgagggcgccacctagagggtatcatgagttagaaacagaagctgagtatgttactgcaccatcaaacatccaagagattgactatgcagagaatcattcttcagatgacgagagtttttgtgttagggatgactgtgaaggattattagtgaatgattaataagttataggaattgtagtcttggagtaataagagataattggtttctaatttttactaatgagttagactgcttttgttaatgttatagttgatcacaagatgactaagaatactgctgcaaagaaagtcccaagacgtagcaagcggtagcaaggctaggaagtgacacctatggaaatgaaaaaaaaccataaagaagaagcaggttcaagaaatttcttagaatgtgcaacatgataatgaggaggctgaaggaagatgtgtgcaacagccaacagaagaagtgaatgaggaggaaggagaagaacaactttaagatgacagtatctctggtcatgttgcagaagagactgagcatcattccactaatcctgttgcggaagagactgagcatcattccactgacaatgttcagaaccaggagtcagaaaccaagaagagaaaaacaagaggaccaacaaagatgaataaagttgctaaaaaccccgaggagaaggttgacgttgagtttacacgccttggagaacatgtagggaaaggatcagtcacactttcgttcttttcttggaccactagtgaaagaacacgtcccatatactcttgaagatatggaggtaccttaatgaacaaacaaaattcgcaatttgggaggcgatccaggtattgttttaaacttacaaaaaatactgcttgttattacaaaaatatttatgttgaatttgaattgtactgtagggacggtttgattggacaaaagattggcaaaaagattgtattttcaaacaaatggggtgtatatggagggcttctaagtctaagctgcttaccaaagtgcattctgcaaagagtaagcaacagatccttagcttgaaaccaagcaatatccaatcagtgacagcttggaca

SEQ ID NO: 6753 - DNA, 1390 bp, Arabidopsis thaliana landsberg
gaaatgtgtcataggtgaagatcctgtcaaccgtaatgattttatatatacagatccacgcattcttgaagggggtggggtacataaatcaacagaagttagtctcactgataaagaaagagaaatagcgcaccgatatgttctaatgaacacagcagtcatgaatccttatgttgagtaagttctcttgtctatcaaactttctaaaactttgagatctatatataagacgttttcttttattgtgtgaacaacattagtcatgttctaaatattgaattttaccacagtatgcatttggaagagttgcagaacactgatatccgatgcagaaaaaatgaaactcagttatggaagattcatggtgaaaaattttcacagtggataaaggaaaaggtatggtcacggtcttggattattatcttcttttcttgtcattgaattttgctaattatcttcttttcttgtcattagatccccacaaactcagctgatcattccactaagctgaggtggttagcatttggaccaaggaatatagtgcagagctataaggggtacatcattaatgggcatcggtttcaaatagatgatgttaagaggaagactcaaaacagtggtgtcacatacgaagctttcagcatgtgcagatcgagcgcaagagatatgaatcaaatagcagatatagttttgtactatggagtgatacaagagattatattgctagactaccacatgttccaggttcccttattcaagtgcaaatgggcaaacaaagggaatggtgttaaggaagaagacggttttacgcttgtgaacctgcatgttaaccaatcagcttatcttcatgatccatatattctgccatcccaagcgaaacaagtgttctactccagagaagaagactcctcgccttggtatgtcgttatgagagcgccaccaagaggctatcacgaattagagacagaagcagagtttattgctgcaccatcaaacatccaagagattgatgatctagagaatcaatcttcagacgatgagagtttctatgttagggatgactgtgaaggagtcttagtgatggattaataagttctaggaattgtgtatatctaggacttgacttccagtttttgctaaatggttgactgcttttattaatgttacagttgatccaagatgacaaagactgctgctgcaccaataatcacaagacgtagcaagcgacaacaaggcttggaagtgactcctatggaaaagaaacaaaccaaacgtaagaagctactttcagacattgttgacaatgtgttgcaggccgatgatgaggaggatgaagaaacaaatgtaccactaccaacagaaggaacaagtgtaccgcaaccagcagaag

SEQ ID NO: 6754 - DNA, 532 bp, Arabidopsis thaliana landsberg
agcatatttttgaagattaaacaatacctggatcccctcccatattgcgaattttgtttgttcattaaggtgccttcaatcttctagagtatatggtacgtgttctctcactagtgggccaagaaaggaagaaagtgtgattgatcctttccctacatgttcaccaaggcgtgtaaactcaacatcaaccttctccttagggtttttagcaactttattcatctttgtttgtcctcttgtttttctcttcttggatactgactcctggttctgaacattgacagtggcatgatgctcagtctcttctgcaacaggatcagtggaaagatgctcagtctcttctacaacaggatcagtggaatgatgctcagtatcttctgcaacaggacgagagatactgtcatcttgaagctgttcttctccttcctcctaattcacttcttctgttggctgttgcacagatcttccttcagcctcctcattatgctgtcgcacattcttagaaatttcttgaacctgctacttgtttctg

SEQ ID NO: 6755 - DNA, 2297 bp, Arabidopsis thaliana landsberg
ataaaattatagaagtttgaccattgactgaggacaaccaagagaacataggaatattttgaccaagaatgcacgtgtgggtggacaagagcacacgtgtgcttcgctgtcatgggtggtgtggttctcttaggaatgtgtgcgccacgtcggttccacatgggaggatatatcgcacgagccaacttggtcctttcttcttctttttttttttttgaattacaagcattccttgaagcttcattttgtacaccaactatttctttatttaaaaacatagattcccaaaaccatttctgaataatcatgatgctagaatctcaataattatgcatatgcatgtagcagtaatattcataccatttgatgcgttaaaatcatgtttaataatcaagaatcaaacattttaactatactatatgaaacgtcaaatcaaattacatatcattcgttttattgctaggcctctttcttattcattatgtcgatgtcaatgagtattttctttgaagtgtttaaacattcgcattattacatgtactagagaatatataatattcgactataatggggaagttaggtccaaacatataaagttccccaatgatgacattaacctacagccaatttctgtagagaataattaagctacgcatcaaatatgattatgtaaattgataattattagtcctactataaaagcaaaccatatatatacgcctcaaatgattacaacattagaaaatacgatttgtattattaaagtttttatacgtggatcttaatttactttatacgtaattacgtatattgaatgagactacatgtgttcaaaaaaattcataatcgaagtgtagacaagacctaaaggctaaagtattatgcacaaggacctataatgtcaattagttataaacatccatgattttcttttttttctaccaagtagtgcttgatctttttaaaagagtgattagacgtcatttcttagcttcaaattacattgtttaaagggggtcttgaatttctcgtctcaacctaagggggatctacgagcttttgggtctcgaatttcttctattcaaaaaacgaagtagaaatatatatattcaataacaatttttttgttcgttttgtcgtgagtattcaaatccagtaacattttcaaacagagcttctaaatagatatttcatgttttcgtttagaacgcataataaactactagtttgaaaacaaaattacttactaaaaagatgaattattagttcattatatacgccatataattcgaatgtactatgtttaactatttttaatttcgagtacagttagatcattaatgagaaggagttatttcatttgaaatcatgcgtataatgattacaacgaagcgaaaatgatgaaggcgcgtggttggcaatgataagatgtcggcgcgtgaggaaacaaaataaaacgcacggccgggtcgagtgttttcgggtcccttgttgtcacgtgacatgacccacctgcccatgttctctcttgagcccaaaactatttgagacattttttaatcatctttcggctgttttaatttacctcttctttttttgtcaacaatagagcaaaatgatttttgattagcaacactccaaatatatctgattacagaacacgatccgaatacttcaaaattctacaaatttgatgataagggaagtatgatgaactatagtagttctgtatttgatggtttaagaacttgaaatgaaaatagagaaacagtcagtgaatattggattcatatgtaatgggtgttagtgtaatgatagatcccacatcccacatggatatgattggatcacaacaggtgactggcccacaactttgaatgagctcagattcatgtggattgtgttttgtaccaaccacttgatttagtcctttttttttcttcgttatttcaacaattaattgccaactatttcttcgatatctgttctcatccgtgtgtgatcttgactgattgagttgttttttttttctttacaaaggtcacaagttcttgcaccaatgattggaaaaatttgagggttaaataaaaatgaaaagagaaaatgaactgaaatatttactaccacttttaggtggagtaaaaaactaaagatgttcacgtttatttctttacagtagagtaaatattttgtagcataattattagttaggcaattcagctgaacgtaaagtaaaaacaaaattactcatcggctcatcaaacccaaagttactccaattttgcaagaaatgagct

SEQ ID NO: 6756 - DNA, 2029 bp, Arabidopsis thaliana landsberg
gcagtttgactgatttccagtgatcatatttctcgttaataaatttcaagttataagacgttctctccctagtgttgcttaaattttggtaaagaaacaatttcaaagataacttatcgacctgaaagacgttaaatcccttgataggcaaaatatacaacactgtaaaattaattcgtaaccgagacacttggtgaaacctcaagacacataaacgatgaaatcagaggtaaagaaaaattgagctatctttcccaattagaatttccgtcaagctcatcgcaggacatcgttggagtatttctatcttttgaacttatactactccagacggtagccggagaacaagctggcctccgaaaacgctgtaaagaaaaatgttgaaacttttgagatatatacaaagagctaaatagctaaactgttgaagtgaaggactaatgcataccttttgacgtagtagtaacagaaatctgccaagatgaaagtttgaacaatttctgagatcagaaccattgatggccacaatccataacccaatgctacaagcaaccgtccccgcgtgtccacaacctattttcagcacattagacaatgtattcagctattcaaaatcgacttttaaggtactaatccaatcgagtataggaatcaccactattggtataacctctatccactcttgaagatcaaaactaacctgtaaaacccagtgggcacagctgaggaaccttgctactccaagtgcaaaaacataatgagccgtgaacggttcaacaatctgaaaaccaaatagacgcggattagagagtaaaacaaatgtagttctctacttgacattgtgaaataaagtagtgacctttgtgttctgcatcactcgtagctgaggtagtactgaaacagcttcaaggtatacacataaagcccatgaaattctgtttattatgttatgagaggtcgatggatggatgaatacagctaatgcaacacagggcgcaagctgcaaaaattgaaatcagatcattgtcactgtaaatgataacaaacaactcgaggatcaaaaccagattgacttaccacataatagagaggaaagttgtctttgtcctccatgtaactagctcttaacttgaaacgaatcataaatataacccagagagttgttcccaaagtagccaagtcaagaatggtatgtatatcatattccattacaatgctacaatacagcctaacagctaaaaatatcgccgtaagctcctgagatttcagtgacaatcctgcaaaatcattcacaaagttatataaacacatcgaagataaacactttcgatttaaaaaaagaaccatagaatgcatcttaaaccctaaattgccaattgaatccttgattataaagatgatgattctacgaattacggctaaaggctgcttccgggagcagataatagtggtaaaccaatgaaatcctgatcaaagctcgaaaatttggacgcgattatgaggaaaaacaaaaaagttgtgacgttgaaaagtaattttgctaagaacagaggaatacatacgatcagaagctgataaggcaggactgagttgaaaaaccctaaaaatggatgtgataaagacaagacacatagaatagtaccggcacaggtcttctccttcatgagtttgtagatgagcacacagatcccgatggaatgaacagcctcagcggcaacgaagagattgtcgtgatcgtgaacaatgaatctgagaagaaccaaagccgccatgccagtgaccacggcgagaaaagccttcaccttcggaggttgtctcctaacccatgaccacaccacgtggatcggagtcttcgtcgtcgccttcatgttttgctttttttcgcttttcttcttcttctgtctctgattttctcggcaaaagtgaaaaaggtaacttctgatcgagagagattaaaaagtctggttttggttgacttgaatgtaaattaccaaatcacccctttcacacatcttttactttttaatac

SEQ ID NO: 6757 - DNA, 1204 bp, Arabidopsis thaliana landsberg
  unsure (1)..(1204): unsure at all n locations
atacagctagcacaacacagggtgccagctgcaatgaacccaaagtgctactgtgtagtattcatggatccttaaactattgcaccagtagttagatgcccccatgttctacaaggcatgttatatgcagatataatagatttgatagtgatggcttatacaaaggaactctggttatgctgtatcagtaagcttgaagtgaataacattaataagctccatcttcatgtgaccttaaagggtaggtttatctaaaaacaaaagattttaagctgcttatatatccaacatgcctagcatgaacagaatctaagtaaaaagatcaaaaccgagaatgactcacttaccacataatagagagcgaagttgtctttttcctccatgtaagtagctttgaggctaaaacggatcatatatataacccagagagttgttcccaaagtagccaagtccagaatggtatgtatatcatattccattacaaaactgcaataaagcctcacagctagaaatatcgccgtaagctcctgagatttcaatgacaatcctgcaaataccccccaaaaaaggtatgtaaatagacttttaatctgtaagaagaatgctgattcaactaaatcaactcctttgggagatttgggtactcaaaagttgaataaagtttacatttttatatctcaacacagatcgaaattctctagttaaagctaagaaccctacagataacgaagtcaaagcaggaaatgaggttataccagcacaagtcttctccttcatgagtttatagataagaacagagattccaatagaatgaacagcttcggcggcaacgaagagattgtcgtgatcgtgaacgatgagtttgaggagaacaagagccgccatgccagatacgacggcaaggaaagctttcacctttggaggctgcctcctcacccatgtcgaaaccgcgtggatcggagtcttcatttttcgattccttcttcttcttctcttttgctttctcggctaagtgacgacaaaagtttttttttacaggtaaactataagataactccatttgtgactcacattaaatgggccgggtcacaaaaccngtttaggccctataagagagnattatctgtgtttttttggtggataatatttctggaataccatttttactaggattcttttatatatataaaataccaactatttt

SEQ ID NO: 6758 - DNA, 3363 bp, Arabidopsis thaliana landsberg
  unsure (1)..(3363): unsure at all n locations
cttagagatagagatttgagtttgatttgcaaaaacaaaccaagtggtggcaaaggatgatccatatatgccaaaattgagtcaaaatcaatttgagttttatttgaagtgattttgcacttgttctagttgctttatgttgtgttggcataaatcaccaaaaagggggagattgaaagggaaatgtgcccttgggcgatttctaagtattttggtgattgagtgtcaacacaagtgcttatatgagaatcaatgcctatggttgaacaaagtgcaaatcaagagtaaaggtatgcttctaagacttagtacattgttttggagactaatgtattgtgtctaagtgttagaaacaggaaaagaccgatttggaaaagacttggctgagcagccaagactctacgcagtctgggtgcaccggacagtgtccggtgcgccaggctgcctcgagcgaagtggtcgctctcgggtttcgtcggcggtgtacgactaaaattcaccggactgtccggtggtgcaccggactgtctggtgagccaacggtcggccgggccaacggtcggccgcggaatccgtgcacgacacgtggccgagcaacggtcggaaggaggcaccggactgtccggtgtgcaccggacatgtccggtgcgccaacggatccaagtctgccaacggtcggcttcgccatttaaggaaagaaatcgggcaccggactgtccggtggccagtcgacagaaggcaagatcagccttcctggattgctctcaacggctcctagctgccttggggctataaaagggacccctaggcgcatggaggtgtatacaagtattcctacaacattcctaagcaccaagacatcgatttcgcgcattcttttcattgtgatagcatatagagctctagtggagttgtgaactcattgagttgtgttgcgagctcttgttgcgacttgtgtgcgtgttgacactctgtttcttgtgtcttgtgtgtgttgctaatccctcccttgctccgtgttctttgtgaatttcaagtgtaagggcgagaggctccaagttgtggagatcctcgcaaacgggattgagaaaaagcaagcaaaacaccgtggtattcaagtgggtctttggaccgcttgagaggggttgattgcaaccctcgtccgttgggacgccacaacgtggaataggcaagcgttggtcttggccgaatcacgggtaaccaccgtgccatctctgtgattgatccttgttggttattgtgttttgttgaggattcctctttagccacttggcaattattgtgctaacgattaaccaagtttgtggcctaagttttcaagtttcacaggatcacctattcaccccccccctctaggtgctctcactatagcgccaacgatcgactgcaaaagtgaacagtgagcagtgtcgactgcgcgcgcagagtcagagcatgcgccagatggcgcaccggacagtgaacaggtcatgtccgtgcaccaccggactattcggtggcccacatgtcaaaagctccaacggtcgaaccccaacggttgggtgacgtcggctcgcaccggactgtccggtgcgccatacgacagcagccttcctgagagcacctagagggggggtgaataggtgatcctgtgaaaacttaaacttatagccacaaaaacttgttaagtgttagcacaataatcgccaagtggctagagatgagtctcaacaaaacacaaaaccacaagagatcaaacacagagatgacacagtggtttatcccgtggttcggccaagaccaacgcttgcctattccacgttgtggcgtcccaacggacgagggttgcaatcaacccctctcaagcggtccaaagacccacttgaataccacggtgttttgcttgctttttctcaatcccgtttgcgaagaatctccacaacttggagtctctcgcacttacaattgaagtccacaaatcacacagagcaagggggggatgagcacacacacaggacttcaaaagatcagagcaacacgcacacaagcagcaacaagagctcgcaacacaactcatagagtacacaactccacaagagctctatatgctatcacaatgaatcgaatgcgctagatcaatgtattggtgcttaggaatgcttagagaatgcttggtgtcctcctccatgcgcctaggggtcccttttatagccccaaggcagctaggagccgttgagagcattccaggaaggcaaatcttgccttctgtcgcgtggcgcaccggacagtccggtgacaccggacactgtccgtgcccgatttccttccttaaatggcgaacgtaccgttgcagatgcgggaccgttgggcaccggacatgtccggtggcacaccggacagtccggtgcgccagacccaggggtgccttcggttgcccctttgctcctttgttnnnnnnnnnnnnnnnnnnnnnnnntggctgagtgtgaaccttttacacctgtataatctatacacttgggcaaactagttagtccaataaattttgtgttgggcaattcaaccaccaaaattaattagggactaggtgtaagcctaattccctttcatgggccctgccaccctccgcgggtggctcggccctgtggaagtggcgccgaagcatgacgcactcctcaagggtgtgcttgacgggcccctggtgataggggcatggctccttgagcatcttgtcgaagaggttggcacctccagggggtttccgagggttcttgtactcggcggcggcgacaaggtccgcgtcggcgcagtcgcatttcgcttgcgacttcttcttgcctttcttcttggtgccgcgctgagttgacgcctcggggacatcttccggctggtggccctggggctggttgtccttccggaagatggcctcaaccgcctcctagttagaggcgaacttggtggcgatgtccatcagctcgctcgccctggtgggggtcttgcgacccagcttgctcaccaggtcgcggcaggtggtgccggcgaggaacgcgtcgatgacatccgagtcggtgacgttgggcagctcggtgcgctgcttcgagaatcgctggatgtagtcccggagagactctcccggctgctggcggcagcttcggagatcccaggagttcccaggtcgcacgtatgtgccctggaagttgctggtgaaggcttggaccaggtcgtcccagttggagatctgccccggaggcaggtgctccagccaggctcgagcagtatgaagagaacaggggaagttcggatgataggttgcttgtttaccaccttgcttatccacaatcatcgagtagaagtagcagcgca

SEQ ID NO: 6759 - DNA, 3283 bp, Arabidopsis thaliana landsberg
  unsure (1)..(3283): unsure at all n locations
tattcatgaaccggttataagttataacttaatggatgttttctctaaattacaggaaaattattggagcgaggtattacgtgaaagggtacgaaagatattacggagcgttcaacgctacagcaaacaaagacttcttgtctccaagagatcccgacggacatgggtcccacacagcttctactgccgttggccgtcgagttctcggtgcatccgcacttggcggtttcgccaagggctcggcatcgggcggtgcaccgttagctcgtctagctatttacaaagcttgttgggccaagcccaatgcggaaaaagttgaaggaaatatctgtctagaagaggacatgcttgccgcgatcnnnnnnnnnnnnnnnnnnnnnnnncacgtcatcagcatttccatcggaacgaccgagccttttccatttacacaagatggaatcgcgatgggggcgttgcatgcggttaagaggaatattgtggttgctgctagcgctgggaattcagggccaaagccgggaactttgtcgaatctggcaccgtggattataactgtcggagctagtactcttgatcgggctttcgttggcggtcttgttcttggcaatggctatacaatcaaggtaactagtccaacacttatgagaaaaaaatcagttacgtgttacatttttgtgtacaatatatagtttttcactttttcttttgtgttatgtagacggattcgataacggcatttaaaatggacaaatttgcccctcttgtttacgcttctaacgtggttgttcccggcattgcattgaacgagacatcgtaagaattgcttacttaactaaacttgataattaacttatttaattttatatttgacttaccaattttttttggtttttttttttgaaggcaatgtttaccaaattcactaaaaccggagcttgtgagtggtaaagtggtcttgtgtttaagaggagccggttcaagaatcggtaaaggcatggaggtaaaacgagctggaggagccggtatgattctcggaaatatcgcagctaacggcaatgaagttccttcagactctcattttgttccgactgccggggttaccccaaccgtggtcgataaaattctggagtacatcaaaaccgataaaaacccgaaggcttttatcaaaccggggaaaacggtttacaaataccaagcagctccttccatgaccgggttttctagccgcggcccaaacgttgtagaccccaacattctaaaggtaattttttcttttttctgttaacttcaaaaccaaaccaaaatgactcataaccgaaattaaccggttttattcgtttgcggttttaacagccggatataaccgccccaggactgtacatactggctgcatggagcggagcagattcaccgagcaaaatgtcagtagatcaaagagttgcaggttataacatctactcaggaacttcaatgtcttgtcctcatgtcgctggtgcaattgctcttctcaaagccattcatcccaaatggagtagcgctgctataagatcagctcttatgaccactggtaaacaaaacaaactatggtttttttttgttggttcggtttagctaaaccaaaatcttttaaataaagtctttttgatatttgtttaattttattttttttggttagcttggatgactaacgacaagaagaaaccgatccaagacactactggtttaccagcaaacccatttgcacttgggtcaggacatttcagaccaacaaaagctgcagatcccggtttagtctatgatgcatcataccgagcttaccttctctatggctgctcggttaacatcaccaatattgacccgacattcaaatgtcctagtaaaattccgcccggttataatcacaattacccgtcaatcgcggtcccgaatctcaagaagacggtgaccgttaaaagaacagttacaaatgttggaactggtaactcaacaagcacatacttattcagcgttaaaccgccatcgggtatttcggttaaggctataccgaatatattgtcctttaaccggattggtcagaagcagcggtttaaaatcgttattaaaccactgaagaaccaggtgatgaatgcgactgaaaagggtcaataccaatttggatggtttagttggacagataaagtccatgttgtgaggagtccaattgctgtttccttagcttgattgttgtttgcttatttgggatggttttattagtcggtttggatgttatagaggtcaaagtgaaagaaatagaaaatatttttctgatcactctatagactctccttatgtcatcgttgttacttgtgaagatggtagaaggaaaaaaaaaaagatggtagaagaacttgtggactcatggtcatgggcttggtttgagtcaaacaagaagccataccactatgattacttgtaatttaacaatcaaaattaatatataaaaatgccaagaaatagtgatgctaatcacgatgggtatcaacaaaagtttcatacagaagaagtgatgcaaatttcctcataatttagattcatatcaaatatttttcaacaatttggatacaattagcagaaatttttgcgtgcgttttcaatgtatgcattttgagaacatattacacgattatcactcttaactatttactatttactattcacaaaagaaacacaaagacgaacgatagcgttgttatgtttttgtttcaatctgttatactaggtgtaactagactcgtcgacaaagaagaattttaagatgggctttaggccttgccaaacaacaaagggactaatcgtaaatcctctccttgttcgcttaaaaaaatcaggaaaaatatcattaaaatttattgaaaatgttgatttacatcttcaattctgaacgaaacaaaatgaatatcaaatttatgttgtctttctaaataaataccaaaattttgttgatttggccatattaaacatgatgttaaatagttaatagaccttgttaacatagttaaactttcaattagcagatccgttaattgaaaacaatatcattctactaataataaaatgctatcgttttatcgtaactgctaataaaattccaagtttcaaattatatgaagatttagggtaattgagtttgctcgatctaagacttgaattaggaatttctttcagtcgttaacacaaaacgatgtcgttttatgttataggacatattgttgtttcaataacatgcatgttaacagaaataaac

SEQ ID NO: 6760 - DNA, 2263 bp, Arabidopsis thaliana landsberg
taattaacatgctgtacgtttagaagaatttaatcgcacacactaatttggagtaaatgtaaatactaagatttaggattttaacggttttagtcatatatattcatcatagtggtgtaactcaaacgaaattgaccaataaaaacgtccactaattattattgataattaatagcataagttataagtataaaggaagtttcaaccgacgcaataagtagaaagtgaaaccattattaaataaaaagattggacatcaatattgtaatgtatatgtttcatgtaccttaattttttgctttcaattatattaagaaaataaagatctaaataataaaaaatgtatcaaaataataaaaactgttttgcccaaaaaataataatgacaaatgtataatttgtaaattgttttgttaaaatcaatgcattaaaaatattaattgttataataaatagattggactaaattttagaaagtgtcaaatgtggaaaagaattattttgtaatcacacagtttcatatattttatattttttgctttatattatttcaaaaaaataaatatctaattaatgaaaaatgtatgttgtgtaatgataacactgtattttactcattttaggtatatgtttatcatcatttagctttacatttgctcattgtatcattacattttgcaccattttaacttaatttgcatatttaggcatctaggatcatcttgcattcgcattgcatgttttggtatgttttcaggtgcagaaagagctaaaaaggactctactcgatccattcactcgatccaggcagctacagaagaggcatcaattcactcgacctctctactcgatccaggcagctacaaaggaggctgcagtttactcgaccctcttactcgatcaaggcagcctctgatgaagaagcagattgatctactcgcccatcctactcgatcctctactcgacccatttactcgaccaagggtgaccaaattacaagacttgttgagctatcaaagcgtcttcggatcctcctcattccccactcaaccatacatctgagcatatggatagtagaggaagaagcatttactcgaccaattgatcactcggagcatagacacaaaggcacagactttgcagcaccctctttactcgatccccaagatcaagtattcgcccaaaccgtctcaagtctctcgtcttctagtgaatctagcgttttaacattttactataaatagatcactttggggtttgtccaaaggatctagcttttatctttaggttttctttgtgttcttgaatcttcaaaacttaattactcttaatctatttcgtttttgcatttagttgtttaagtaaagttgtttagcttgtttagatctacattttggtatgatttcagtaatttctgggtttgtgttcttgagaatgttgcttgagtagtgattaggattcttgaggatggattagattagggtaatctctaggttagttaggtggttaagattagtttagaacccttgtggatttgcttcgcccctatgcagttttcgctggctgatgtggagattcgatcatagacgtccagcgtccaaaagacgttcaaatggatgtctgatcatcaaattccagagatttgtagactcgaccaagagattggcttgtctgcttattggctttggtagattgtttcttaaacccttctttactatgtttcatcaacgacagttaagattaggaagtggtagagttatggggatctctgtcccaagtgtggattgacccggtttttgaatctatcgtctagggtatctacctttcacatgttagccacatgctgaaccctagagttgcccttatcaatgaatccacttttatttacctgttatttgtatcccctgttgataacattttagttcttaatattgtcacatgttagttctactcgacccaatgatcgagtagggctcttaagttctcgtttttacctgtttgaatcctgacctaggattgttactagaaacccaccatcattataatctggcttgacttagttgcttctgtacacatcttgattgctagcaataacagtggactggattgacaccccctatagctgcaatgacatgttagtgtttaagaggaattgaactgaacctcacattcagcacataagtaagcgtaaaaacctacttatcacaaactattctgccgtgaaatcttcgtcctctttgatagctagtgcagtttccatct

SEQ ID NO: 6761 - DNA, 742 bp, Arabidopsis thaliana landsberg
tataaatatatcgaattatcctgcagccactgtaactgttcacttatgtaagcctgccatcaaaaccatacaaagaaattgttttttttaaaaagactttatattggctatttttatgcatgaaaccgaaactttgataattgattgtatatgcaagctttggtgttatatgtaagggacaaaaacttatttgcttctttctagataatattgtacacccgtgacttctcacttgtttcttttaccatcaattttcatgtttgttatatcaatgtgtgcccgagtttacgtgtctatatctttttgttgaaggcatctcaaatgtttgaagacataaataaagaattcaatgatataaacgtataaaacactaattatcacattaataaataattgctcatatattcgttatttttgtttcatgctaaatacattataaggacacaaaaagttcgtaatatctactgaatttaatattgcgatttgattaaagttggatacttatctaatttcggtgtgtcatgatgtttttctcaataaattataagaaattaaagtagtttggatttgacacaaaataattattgttgtagttaaccattgtatgaatgattgattattccatgaaccggttataagttataacttaatggatgttttctctaaattacaggaaaattattggagcgaggtattacgtgaaagggtacgaaagatattacggagcgttcaacgctacagc

SEQ ID NO: 6762 - DNA, 375 bp, Arabidopsis thaliana landsberg
  unsure (1)..(375): unsure at all n locations
atctgacttttttagcaatggtgaaactaaactctaaactcatctctatgattcttttcgctatcgtggtattcgtctctgctgaagttatcttcgaggagcgattcgatggtagctacattttccctctcggtaaagactccaactaaaagataggggtcaatgctcacataaggcgcgatgactatgttgtgcgggtacgccgctttggagaactacggatactatcatcccagtcgcgcgaggagccatgttatattcaggttnnnnnnnnnnnnnnnnnnnnnnnnnnnnnnnnnnnnnnnnnnnnnntctccatgaaggggggattcagacagcggtcaatcatccgtgatgcatatcacaacatcaaag

SEQ ID NO: 6763 - DNA, 1929 bp, Arabidopsis thaliana landsberg
  unsure (1)..(1929): unsure at all n locations
gatcaagattaaagatctcaccgatgacagtatttttttagcgagcgcggtgcacactcgcggctagccctagatctccaattttgacctcaccttggttcccattaatgaaaatgttatcacatttaagatctctatggatcacaggaggatcatgactatgtagataaacaagcccttctaagatctgccttgaccatttcttcaatgctcttagatcaacacacttatgcttcttccggtacctatgagcgtttgtcaaacatgaataatattgatcaaacgaaaaagatttgatttgactgttgagagaggaagctgactgtctaagatttccggaagtgaagacttcggtgatgagattgatggtcatgtgctgctgatcgatccaagaagtgtagaatttgatgatgcttttgtgtttaagggttttgagtaagtgaacttcagagtaaagacgannnnnnnnnnnnnnnnnnnnnaatttatcatccaacttaacttggttccaagccacttcgattccttcaagttggtcaaatgctctgtatctgaagaactctctgatcaaagaaaccttttagtgactgtgttttgtccgaatctaatctgaattttctctgtagtaataacagagatcttagaaaaaggatacacttctttgaaagctcctttgcctagaacttctttatactgaaaaaatgagaaacaaaaaccttagaattgagaaaaaggtaaaagtaatatcaagtaaagaagaacagaccctgccatagcgaccagtgggatcaatctcaacgaattcttcctcggaattattatcttcttgtcgcattcttggttacttgcagttcaaaacagaggagttcttgagagaagagagaaatttagtcaaagaaaaaacaagttttaaagcagtttctgattataattattattattacttagctgtctttttgtgtataaattgattatttagattttgtgccattaaaaccaagcttaagcttttccagctgctgatcataatggtgtcgactgtagaatgttgtacactctctctctttctcatcttcgaatttaggacactcagatccactggacaagaccacgtggcaaaggtgtgggtcgttgcttttttcgcgccatggatctggttttttatttgattttcttctcatttattgtcatgttactctaatcaattattttgcttatttagtcaacttcatggtgttatgaatattaaaatattcgggctttttccccttcttaagtcactcttttagttttagctgactacgaaccctgtaattgactatcctaaaccgaataatgagtttggtaaattacaaaatgttataaccattgaacccgcttgtcatggtaacgaattcgattttacgaaagggttttgttctctctctcaggattattaattttttgttgaaacctaaatatccaatgttgttacacttaaaaaagaaacttgtactgacacaatgtcatgatcgtttgttataatctatcacttctgcgctcatgtcttaaaatatatatgttttacttttggagacagaatttttgagacgaattaggacatttaaattttcatggagaattgtttgttgaacaatgttgtcgttgtatttttgatgagtatgaattggcggttcagccgtttaaaaaccgattatatacaatgatcatcaaatttttgtaaggcccattggccccatagtatataaatccttagagctgacggcagcctgagaccattatcctagacacttgtattgtatggtggtaagacacatcgtggaagcaccgaaagattagaacggggacgcgaccaaaataagacataaatcgtaaacgcaccgaatgactttcacaaggaaaaatctcgaacaactacacacccaaaga

SEQ ID NO: 6764 - DNA, 2402 bp, Arabidopsis thaliana landsberg
aggttttgggatttgttaagaaaagaatgagctattgcattttctggagacgggcaaaagccctcggttttaaaatgttaaaaacgaaaccatagttgttaaagaaattcgaatccgctagatgtatcaaagtgttaagaaagcttctcctatagttaagagaaaagaaaagaatgattagaaaagggcttaaaaggttcatggatgcaaagggtagagttaagttcttatattgagattggagatgggattaccattagagcttcatttgatatactctgggtagatgggatcttatctctgtatgcatagcttgggacttacctctagcattctactaaagcttaatcattttttgagagatcccctgttactgaagcctattctgtctcttgaccttttaccttagccaaatgagttcattgatgatgcattgcttgattcatgttccagaactaatgaatgtgaaagagattggtagatttgaaaacatgtgtaggtcgagcatatgagtcggattgattgataataaggcatggctaacgtttttgagtagaatttgatcatatcgcagcttagaatatcaacttagacattgatttcatctggtttatctggtgctttggttttgagtccccgctttcaaacctcacctccagcttgttcttgattgtttggttgagggcaagcaaagcctaagtttgggggagttgataagtgtgtattttgcatgttttgagcatccatttgtcatcactttaacaccatatcatcactgttttataccatttctcatcatttgtcatcactttgcatgtttaggataggtttgcatgcatgttgcatatttgtgttgatttcaagtgatttggagttgttgacgagctaactggaagaagcggacctgatcatgtcaaaccactcgaccccgaggtcgagtagaagcttcaagacctcaagagaccactcgaccccctggtcgagtagaggacttctccatttcatcatatcactccaccccgagatcgagtgtcttcatctccatcacctgagtaccactcgatcacctcactcgaccccaaggtcgagtttcttcatctccatcaccagatcaccactcgatcacaccactctacctggaattcaagtatcaccatcaccaccactcgactacatactcgatggccagctttagagtcttctccattccgcactcaacgagacacacgagcacaaggaagaaaagaagactccaactaattccagagtttcgtggctctgtacaaaggtattggttgcagggagcgttttggctttaacttgttgattcgtaatgcctgttaggttagctctcgtcaatggtgattgagtctgggactaggttaacttgagtgcctctgttgcggtggcacttagatttggtaaccgaacttgttatctagggttaatttattgaacatgtcaatcacctgtaaactgaggaaacgaaactactcaattaccccatcctcgggaattctttatctgattgaattctttgtttactatactgttgtttactgcatcttgtcatctactgcttagtttctgcaattcttttttttgttactcgaccacccagttgtctggcaacagactgtgcagtcgggtattcctgtgtttcgttttctgtttgctactcgacctgtcagtcgaccacacccagtgctctgcaacgagctgtgttggtcgagtgttttattgtttcagcttgattttctgttttctgcatgttcacttaggactgctagaacgcaccaaaacctgttattgcttggcttgacttagtgacttctgatcacatcttgattcttagcatcacacccatttggattgacaacctaaaatactacaacgatatgattgatgttttaggataattgactaaaaacgtattatcaatttgacgtcgttgccaattgggttttttgtttgttacatttgagatttcaaacttgcttagatcaagttctttttcaatattcaattcggttgctaactgtgtgtttttcttgttgtcttcttgatccaggtacaccgttgctgtatgcaaactagatcaacaggcaactagaacctcttattcaatgacaacatcgaccgcataactcgcgaaatcagagaaaggagaaacacagccaaccaaataccacagcaaccactcgaaatggctgacaaacaaaatcaacaaaatggccctcccaacattggtactggagatgcaccaagggaccatggtcagaggaaaggaattgcaccacctgctatccagaacaataacttcgagattaagagtggtaacaactcgatgattcaggggaacaaattccctggtcagccaacggaggatccactcgaccacc

SEQ ID NO: 6765 - DNA, 608 bp, Arabidopsis thaliana landsberg
aaaaagcgcatgatgctgatcttcattgtgttgattggaatcctcatgacgacaatctgatcctcgacagggtatggagaaatacatacaaataaatgataaatacatacttagtatctaattaagaaattgatgaatatttcaggtcagcagacaacactgtccggttgtttgatcgtaggaagcttaccgctaatggagttggttcgcctatttacaaatttgagggacacaaagctgctgttctttgtgttcaggtataatcaacttctcttttttttttccttctttgtatgatgtatatctcttaacccactgacactatcttgttattcaattcagtggtctcctgataagtcatccgtctttgggagctctgcagaagatggtctcttgaacatctgggattatgacagggtgtgtacatagttcactcagatgtctaaaattaatctttcttcactatcatcactgaaacatattcattgtactcatgtttggtttgtttaattaaccatcaggtcagtaagaagtctgaccgtgcagctaaaagccccgctgggctcttcttccagcatgctggtcacaggttctaaagactatcttat

SEQ ID NO: 6766 - DNA, 2644 bp, Arabidopsis thaliana landsberg
  unsure (1)..(2644): unsure at all n locations
aaacaggttatttaatgcaaagggatcattgcaatgataatagattattcttatgattttgcagagaccttttaagaaaccagcttactggtgagataccaaggttactctactggaatgaagttttacagtatctgtaagtagttcatctacttatcttaagtctaggcatccagagatttatgttctgattgtgatgtattcattttgcagcggtttacgtgggaatatgttaactgggacattgtctcctgatatgtgtcagctgacgggtctgtggtacttgtaagtgaatccggttcagctctttattttcttttactctcaacctcagatttcgagtaatttataagtgaatgtttgttgttgttagtgatgtgagaggcaacaaccttactggaactatcccagagagcattggcaattgcacaagctttgagatcttgtatgtgtcttnnnnnnnnnnnnnnnnnnnncagcacagaactcgagtgaacttattcgtcatttgcattttcagggatgtatcttataatcagattaccggagttataccctacaatattggtttcctccaagtagctactctgtaagtattgttaagaccatcttacacttttgtgtggtttgttaaagcatgtcaatatggttaagtggtgatgggttctcttgcaggtcacttcaaggaaacaagttgactggcagaattccggaagtgattggtctgatgcaggctcttgctgtattgtatgtcattttcatattcaaatgcttgcttttttcctagtctcgtttcttgctcttctgactgaatgaaataaacttacccaatgcgcagggatttgagtgacaatgaattaactgggcctattccaccaatacttgggaatctgtcattcactggaaaactgtgagtccctttttctttcttccctctgtgtcatgcatatgttcagatcttcacatatatggataatgtcttttcttgaaaataggtatctccatggcaacaagctcactggacaaatcccacccgagctaggcaatatgtcacgactcagctatttgtaagattgagaacttgaaactccaatatctgttcttctcaatacttgatcttatgagggtttactctttcgcaggcaactaaatgataatgaactagtgggaaagatcccacctgagcttgggaagctggaacaattgttcgaactgtgagtttttatccttcagtatacttaaatttttatcttaggtgaaaagctggttgatgtaacttcgccatctaggaatcttgcgaacaacaatcttgtagggctgattccatctaacattagttcctgtgctgccttgaatcaattgtaagatatgatatgaaccctttcccattttatgcttctctctatttttcttcttcttatcttaatgaaaacttattgtgcttttattgtgttcagcaatgttcatgggaacttcttgagtggagctgtaccacttgaattccggaatcttggaagcttgacttatctgtaagcttcaatgactgcatgtacagtatgattatgtattcgaactattagtctgtgtaaatcttgattcaatgctgtaaattgcagaaatctttcctcaaacagtttcaagggcaaaatacctgctgagcttggccatatcatcaatcttgatacattgtatgttattttctactgatttacatccatgttccgcctagttacctactgatatgtgtaccaactaccaactcatacaaactttgtttcagggatctgtctggcaacaatttctcaggctcaattccattaacacttggtgatcttgagcatcttctcatcttgtatgtcttcatcaagccctaaagttgcattgctttgcattaactctctcagatttgttgacttgagttttgttttaattgtcagaaacttgagcagaaatcatctgaatggcacattgcctgcagaattcgggaacctccgaagcattcagatcatgtaaggcttgtcttatgcttagatttcttctgttatgataaaatcttcctacttacaaacttttctccatccttctcagcgatgtgtcatttaattttcttgccggtgttattccaactgaacttggccagttgcagaacataaactctctgtaagtaaaccatcacttctcctctgcaatttaccgtataatgcatataaataattcttctttgcttctttaatgtacaggatactgaacaacaacaagattcatgggaaaatccctgatcagctaactaactgcttcagtcttgccaatctgtacgtgttcctttgttacaacaagatgtgtactctcagataatcttatgatcatttctgaattcatatatttttcctgctcgttctttatacattgtaggaacatctccttcaataatctttctggaataatcccacctatgaagaactttacacgtttttccccggccaggtatcacctttgccatattgttacctgtcttagcttttcatataatcagtataccaaatataccttttcgtttatagcttctttggaaatccatttctctgcgggaactgggttggatcaatctgtggcccatctttacgtaagtcacaaggtatatgaa

SEQ ID NO: 6767 - DNA, 488 bp, Arabidopsis thaliana landsberg
  unsure (1)..(488): unsure at all n locations
gtggacctgtaccacttgaattccggaatcttggaagcttgacttatctgtaagcttcaatgactgcatgtacagtatgattatgtattcgaactattagtctgtgtaaatcttgattcaatgctgtaaattgcagaaatctttcctcaaacagtttcaannnnnnnnnnnnnnnnnagcttggccatatcatcaatcttgatacattgtatgttattttctactgatttacatccatgttccgcctagttacctactgatatgtgtaccaactaccaactcatacaaactttgtttcagggatctgtctggcaacaatttctcaggctcaattccattaacacttggtgatcttgagcatcttctcatcttgtatgtcttcatcaagccctaaagttgcattgctttgcattaactctctcagatttgttgacttgagttttgttttaattgtcagaaacttgagcagacatcatctgaatggcaca

SEQ ID NO: 6768 - DNA, 2406 bp, Arabidopsis thaliana landsberg
  unsure (1)..(2406): unsure at all n locations
tagatcaaacatttctcataaatagtaagagatttaggaaaaaccgatttgcaatgtttaccaagaatacaagcttcacaacttgtatgatcaaaagacatatttggtaacataagtttaagagctcgagtatgtggatgacctatcctagcatgccacaaaacattgaaagaaatgcctaaatgcgatttagaagagaaacaactagaagagtttggtaacacatcttcaagaacatagagttctccttttnnnnnnnnnnnnnnnnnnnnnnnnnnnnnctcaatatcctgaaaatatacatcattaggcccaaaaatagcatagcaatttaggtctttagttgttctttttacggataagaggttagaagtaaacttaggcataaagaaagcttttgaatctttattaaacagtcgtaaattccctatgccttcaattggaaccttgtcaccattagcaataataacatgtcctagagctggttctatgttgttaagaagattagaattactaatcatatgatgagaagcacccgaatctataacaattgaactactaggtttttgtgagaagaaggtgataccggattctttaagagagacgatagacttgatgagagcttccaagtccgacttcctcacataatctccggatgatattgtggatgtctctcccttggatgacccggattgactttgctcctcatgagcttcttgagagatatgggctcttgagtctttgaacttggcgggcttgagatgtgggtgtaataaccaacacttatctttggtgtgacccttcttcttacaatggtcacatgtcagcatctttctatcttcattcttgtacactcctttgttagccgtgatgagttcactttttccaccaaacaatccggttgaaccttgttccttttggattttagagcatacctcatcaagacttggtaacttctccgatctaagtaagtgcttgattaggtcattgtaacccggatttaaggtgagaagaagtccgaacactttatcttgctcacgcctttcgtggagaaccctcgggtcaagagttcccggtctcaagctttcaagttcagaccacaacgatctaaacttagcaaagtgtttggtgaattctagatcttcttgacttagctcattgatcgcctttttcacttcaaacacccgggtcaagttagattcgtttccatacacattcttgagtgtatcccacaactcttttgccgtttcacaatacgagtatccttctagaatagaggtttcaagagagttttgaagaagagcaaggaccgcttgatcttcttggaaccatttctcttcctcgggagatagaacttccgttccttcttcatctccttcttctttggcttcctttggagctcgagatgaaattacatggctccaaagcccacgaccacacaacaccgtttttgttgttcttgaccaagttaagtagttccctcctttaagtatcaccgtagtaatcaccttttgagaagtctccatggtttgaacacacacggactgatggacaaagctattacccgttggttaaaagagataaaaattgagatttttcgaagacgtgaagattagaaagaaaggagatgagttcattagcatagagacatgatcttatgctctgataccatgaaagaatatgcggaattgtagtttggaaagagtaagagtaagggtaagagaatcataaggaacaagagagcattgttatgagtgagaatgaccaaaacatattactagaattggtttgttacctttgtgtgtttacattgtattttaaggacacacaaagggaacatagccgtttacacataacatgcgaatgaaagagacatgagagaagagattccttggtcttaatggtgagagtgacaggtccttggttgaccatgaagctaagaccactcgtgagttctcttcaacggctacaagagatatttgtgtgccttcactcattctagaagctccctataggcttctcaatgtgttcggcccaacaccttgtagcttacacacaacactcggcctcttttctttatttgtacggatggatgctttttattaggtcttgctcaatagtcacgaagggaacggtgaacaggttctttgagaaggtgcaggtgtccgatcaccggaaaacctacaggatttggcggtaaattcttcttctgctttgatcggaaaacatacgccactgcaatgaatccggccatgagagcgagtagaaacaaatcaatcatctcacccattcgtgaacacataattctggagactagtcgcatgattctggagagtagtcaaaaaaataccagaggtctcactattataatatacgagggagcgaaaaaaagaaaagaaagtgtac

SEQ ID NO: 6769 - DNA, 5032 bp, Arabidopsis thaliana landsberg
tcaatctgttggtttaatttttctacgtcttggaaactatctccggggtgattgagcatgcatggtacaactaactaaagcagccttttgtctacgtctatgtgttgtgtttttataggcaataatagcaaattcacttacaacaaagagagacaaaaaaaactttcaactaatatataagggatttttacgttttaacatgatatggtttggataactcatttgtattttcttttatctatactattatttgggaagcattttgtgaactacaatactgtgagggtagtttaatactagggtaaattacaggccacacccgttgaccatgttttatttccatggattgtcaaagtcaaatgtggttttcaccatttgccttttcgcctgcaaaatgacgcttctgcccttgcgcttctctcttagtaactgttgaaatgtacggtttagtttagcaggtttagttacgtacactgttccggttcagttgaagattttttgtttcacgttgacgcgattcggttccgttacaagtgagattattttcattattccgaagtgacatcaacatttaatgcccccaaaaagtttagatgtgactattgtcacaattaatgcaaaatcatcattacatcaaataatattaaaaaaattattaataataattaaaaaaaaatttgttgagataaagaagatgaacccaggaacaaagaattattgcgaacgtacattgctgctgaagaagtgttgatcttgtttttgtaccaagtttggagcattgctcgtgtaagtaatgaagttcttttaagaagtttttttttatgtcatattaggatcttgattgtgttcgaactccatttttttatcagaatatttgcaaaatctatatttgtttgtttaaaatagtcaaatgataattggtatttaggtttataaatgtgtagtatcgacattccatttgttttttatatgtatagtatttttcagttgcatttaatgtgtgtctcctgaatttatgatgcaggtgggttatggatattcccgtatttaccatggtcggtgagtggaaatgcaaagaaggagaatggaaatttgaacctgaggaaggcatctttggtcgttgtgtacgcgttcaggaaaccatgacgtacacggactttgtccgtacactccgagaggctttcagtttgaagtccaccgagatcaatcccataattagctactggatgccgggtgaaatgtcagtgctgatagatactaaacgccctcctgtatacattgacagtcagatgggtctcgagacgttttttttggttcgtggtgggtatctttctctcaacttgttcgtctctttcaataatacagtgaaggcgttcgggaatactgtctctaggtctcatggtgaagtttctgaaagtgaccgtgtgtttgatagtgctacaaatgttgatgaaaataatgaggatgcaaaggagcaagccgatgttgaagacgatacaacagaagaggatgaattggaggagggcaacgaagatgatgatgggtgtgatgattatcttggtgtggatggatctattgggggaagtaccctgtatcctaccacagacggtagtgaaggtattggcgaagaatacgattacaacaagtggaacgatgtaatagtagaagaatatgtacaaggaaatcttgaggaagacgtcagtctcactcaacagactgctcaacatccagggaaattcagtcgtttattggaaacgtgtacgtacacgggtgttagtgtacctagcagagatacaggggaattcagtcgtctcttggaaacgtgtacgtacactggtcttagtgtacctggcgaagaaacaatctctccattgggttacggtacacgctgcgaagggcaaagggattacaatcttatttgtatagacgaagtcaccggggatgaagtgatcgaaggtattggagcttcctcaactgggacacaaaatgataatggggtagttaccgcagctgaggcttaccaagtgtataatgaatttcctaagttacatggtggcgagttggcgaatctcggtaacgatgctgctcctgtgttcgatgacttactcaattttcgagctgatgagacacaggttgaaatcagcaccacaggcgaaactttgtttgttggaagtgtttttaagaatagaaaagtcctgcaacaaacaatgtctcttcaagcgataaagcaatgcttttgcttcaagcaacctaagtcatgtcctaaaacattgaagatggtgtgcgttgatgagacttgtccatggcaattgactgctcgcgtcgtgaaggattcagaaagtttcaaaatcacttcgtatgctacgacacatacgtgtaacatcgactctcggaagaactacaataaacatgctaattataagctcctcggagaagttgtgaggagcagatacagttctacgcagggtgggccgcgagctgtcgacttaccacagctgctcctaaatgatctgaatgtgcgtatttcatattctaccgcttggagagcaaaagaggttgcagtggaaaatgtaaagggggatgagatagcaaattacaggtttttgccgacctatctgtatcttctccaattagctaatccgggtacaataacacacctacactatacaccagaagatgatggtaagcagcgcttcaagtatgtctttgtctctcttggcgcttctatcaaaggtctgatatatatgaggaaggtagttgtggtagatggaacgcagctagtcggaccttacaaaggatgtctccttattgcatgtgcccaagatgggaacttccaaatatttccaatagcttttggtgttgttgatggtgagatcgatgcttcttgggcatggttttttgaaaagttagctgagattgttccagacagtgacgatttaatgattgtctcggacagacattcatctatatacaaaggcctaagtgttgtttacccgagagcgcatcatggagcatgtgctgttcaccttgagcgaaacctctccacctattatggtaagtttggtgtgtctgctttatttttcagcgctgccaaagcttatagggtcagggatttcgagaaatattttgaactgttaagggaaaagagtgctaaatgcgcaaaatacctagaggacataggatttgagcattggacaagagctcactgtagaggagaacgctacaatatcatgtctagcaacaactctgagtccatgaatcatgtgttaacaaaagcaaaaacttatccgattgtttacatgatcgagttcattcgggatgtcctaatgcgatggttcgcatcgaggaggaagaaagttgctaggtgcaaatcttctgtgacacctgaggttgatgagagatttctacaagagttgcctgcgttaggtaaatacgctgtaaagatgtctggaccgtggagctatcaagtgacaagtaaatccggtgagcattttcatgtcattctggaccagtgtacgtgtacgtgtcttaggtacaccaagctaagaatcccatgtgaacacgctctagcagctgcaatcgagcagttatatcattcacaaaaaaaaaaattagtctttcgattcgcttgttcttgctatccgtgagatggaggggtttcatatggtctcagaattgtgtcctctgatcactgggtggcgaatttatgtctttgtcgtgagagtcttcaagaaggttatatcgcccaacgtcttcgaactcggccttatcctggcagattacgaggttatttccgttaaatcattatgtgtttttctcgttcattcgcttaacttatatattaaactctctactatcatgttctgtatgtaaagaataaccgtattgaggccaccgttgatcgtcgccttgctccgttttacgaagaccgattcgttgaaaatgagtggaagacgatcacctctttcttggtccgtaagtcaactgacttagtcagagcaacaaagcatgaatacggcatactgtttatggatcggaccgtcgtcgttcatgccccaccgagatcaccaccagttccagatttcgatttcactcccttcgactacattttggataaatctgcttacaagaacgttttagtcggtgaggaggaataactctgacgcttcatttattacatttttgaaaatgtttgtttattatctttgtttctccatcatctagatgtcattggagcgttggttgatgttggcggattgactacagactattacggtctcaaactgagtttcaagttaaaagatagatagtaagtgttcttttcatttgttttatttacaatgtccctctaaacgctctgtccttatttctaacgtagcaatgaagtcttggagtgcgaagcccgcaataaacaggcggagtacttggatggttactttaagagtttgggtaagggaaatttcgttgtcgcactcagcttttggcgtttaaccgaattgtctaacccgaagcttgcgagccatggtgctatttcaaaggtggttgccaatccagacataccagaagttgtggatatcgcgatggtggttttttagctagagggaatgatccattattctccgttttaatataatataagactacatttcaattaatttttctttcccagttgttgttgttctttccataagaaccaaactacattccagtcgttgttgtttcctgtttccgtttaaatgttaatctaatttcttgttttctgtacgtgccttgttttattgttcaaattctctcgcaatgtacgtatagtttttggtgtacgctatcgtgtacgtatattagttttggtgccttcaacataaaaaatattagatttttacttatgttgtgtacgcaatttgccaatgtacgataaaccaagtttaatgtactatatagtgtacgtacacgaagacatctagtaaaacttaaagtggtaattcattcaaaagctagaaacataaaaaggacaagcagtttatataaagggaaa

SEQ ID NO: 6770 - DNA, 2666 bp, Arabidopsis thaliana landsberg
tatacttaagtatttttaaaatcgttatgaaaatattttctatagatttaggatgaaataaaacatatcctcattaatcaatgcgaatattaacataaaataatgtattaacagtattgttacacattaaaatctatgtttagtgatcagaagaggggtcttcctcatgcacatatggttctatttttaggaaaagactcaaagattccaactggtgatcatattgataaattcatcggtgctgagataaagatctagagccgcatttatatgacatagtctctggttgtatgatacatggaccgtgtggaccagaatttcccaataatgtttgcatgaataatgggaaatgttcaaaaaaatttctaacaccaagaagctcttcgacgacgctcaacgatgatggttagcccctctataggagacgtgacgataagagattaatcgtgaaaaagggtttcgagtgcgacaacaagtacgttgtttcttacaatagagcgttgttgttacgttatcgtgcacttattaacgtcgaatggtgtaaccaatcaagttctattaagtatcttttgaactacatcaaaaagaggatgaaaagggtaatattattcatgacgagatagaaaaatattttagctgcaggtatgttttttccgtacttggtatatggtgtgatgatttgtactgagatttattaggtttatattgcttttttgtacatgtagatatatccaaagtaaatgtatcatttctaaaactcactgaagtttttcattttgtttccactctccaaaaagagagtatatctccaccatacctacatcatacttaaagaaagcaacaaccaaatacaacgaacaaactacaagatccttcagaattcgtaaatcatctacttatccacagttccagttacaagtctcatctacttatcaattactatgtattttgtatacttggctatagtctatggtctcatctacaatcactaacgatgaaagtatatgtttcgtttgatcctacaggcaacacacaattacatttcaaacaccaacaaaagtatacaacctacatatagtataaaaacacaaaaaaatatacaaaatattcatatcattcggaagaaaataacctcacaaatagataaacataagatttctaatgcaatcaagccgaacaatgaaaaaggtaaaagatgaacaatgacacatcggaattctttgtggtgaatcaatgaacgcatctacaattcgcctaattccacaatagaaagccataattcaacaataatcgcagagtctgagaatagaagcttcgtcgtcaacactctccgccggcagctctctgcaattgtactgcaattctcctaattccacaatttgcctaattcctcaatagaagctttgtcgccagctctctccgccggtaactgtctccatcattggtagctctctacatcgccagcagctctctacgtcgccggcaattctctctgccgtcgtcatctctcttcgtcgttagatctcttcccaaaagttttgagttttgtttatttgtttactattttttttgtgtgcaaagacctgtttcattcaatcaaccggaataggagcgtacaaagcttagagttttagccaatgataaaggaagattactatcatagctaaaaggcaatataaaggatagatagttcagcaacgtatccaaaaggaattggagacatgggcaatatagcaccaagtcacatgcgagtccaagggaagccgaagccacattcgcgaccaattcgggaccatggggaactgttcttatcaatagacattgggacgttgaagaaggttccataaactcgattcttgccgatacaagagaaagagttagggacataaggttctcatcgaaagaagctattcgctgaatttggagtggattcttgcaaagccaactcaagggtaaaggagtcctttcccgatcaagccgtagagaaaacacattaaatttgaaccgcttagtgcaggatttgaaaatccaactttgataatatctcaataagagagaaaacggtccagaagaaaaatatgacatgcgccctcgagaaactcaccagacaaggcgcaagtaacgctccaagattatctactgccattaacgaagctcggtgagaggattcttctggggaaagcttgtaatcgatgtaaagttggttgagactagattcctcggagggagtctgaaaaatacttcccatatgacttcaacaatggtagctatcaaaccagcctaaagatgtcgtttctcttctagcatggagtccatgacaagccaaaagagagttaaaaggtgtaacgcctgtgaaccggaaaatcggttaaggtttgttttaaaatcatccggtttaattggttgggttaaatggaaaccctaaagtgtgcctataaaagaaggaaactcgaaattagggctttagttagccacttttcgttttataaaggagaaaaagagagaaaaggagaatgagcagaatcgttagggtttgggagaaatcagtttcgtcatatcaaatcgtggtaaaaggtaacgaactttggtagagttattcccaagtcctttttcgttattctccagtttacagaattggatttggattaaaattgggtgatttattc

SEQ ID NO: 6771 - DNA, 437 bp, Arabidopsis thaliana landsberg
atcgcactcgaaaccctttttctcgataaatctcttatcctcacgtcttctatttaggaggtaaccatcatcgcttactgtcgtcaaagagtttcatggttttggaaagaatttcgaacatttcccatttctcatctaaacattatagggaaattctggtccacacggtccatatatcatacaatcagagactatgtcgtacaaatgcggctctaaatctttatctcaaatctcggcactgatacacctatcaatatcatcaccagtcggaatcattgtagtcttttcgtaaaaacaaaaccatatgtgcatgaggaagacccctattctaaaaatggattgtgtacaaagctgccccgaatgatggaaaatattaagaagttaattagtaactgtcaaacatattaaacattggtaagcatcccattaataagttt

SEQ ID NO: 6772 - DNA, 1728 bp, Arabidopsis thaliana landsberg
tacagatgaggatgatgatatacttgcacttccaaaagcatgagctgaccttgtatcttgtggtatccacacacgcctcattgctttttacattggtgaatgtgttgttattcaccttcactaactcaggaccctggtattgttctgttacatgaccgctttcattacccagaggattcgttctatctgatactgagttggtagacaaggtcggctgaagctccaagatacgtgaggaattaatcggagacatattccttatggaatcatcttctccagtatttctgcaactgtttttactttcagaggataaatttctgtttattcgatgttgattggtcgagactctttttctgatatacaccttatgattttcctttttaactgaacaagcttcagtaggggttgtgtcgaccggaaaaccattacctgcaggcaattagactcatgcttacatacacagcagacaaatagtcatgcaaagcttctgagggtggaggcaaatggtgatatttatagatttagcgtattaccttcagtagaacaaaatgtgctctttggttccttgttttcgaagtggtgttctttttgcaacaagtttccttctgctgcacagcgttccttagattcttgggataaaatcatgttaactgagctggtacagtgtggtattgacatgaacctcttcacatattcttcttgattattctcttccaaagcagaaaccgatagatcatttactattggaacatggtcctcgtctatgggcattttaggaaggactgctggatagacttcctgggaagaagagatgatatgtccactcccaggaccaaccaagtgagactcatcaaaactgtcaggagcaatggatacattacttgcaaaatcctgatcggaatctggagcaacaacttgcatattctcatcatctccactagattctcttatcgccagtgacacagctgcaaatttagaagagaaattatggaataagggaatacttcaagataaaatactgcaatctcaaatctaaaacagactatattcagatctttcctagaggttaactataccagttcctgacgcatcattaagttggctcgttttgcagttgtctgacatatcatttcttgggggcttcttgcttgaggtcttcttgagcagtggaattgcttgaggaagtagtaatgacatcattgttttggcagtttcctgatcaactaaatcagaatcactttttttagaagtcagattcaaagtagagtcagctaaatcctctgcatttggttcagctaaaatcccttcaccaactaccatgttagcatgtgtcaattcttcctttttcatgcaacttgtatcatcatttatttttggagcagaacttgcggtgttatctgcaagaattggacaaaacggaatctatgaaaagatacagccataaagattaaaatcttcttactgctagatgctgacatcttggtattaaacaagttagaattaaaggctaataccttgcaggaaatccaaggtatcaggtgcacaaaaactggaagcagtcatgtttgggctctcatgcagaaaattatcatcgttgggtttgttttccttttcttgcaacccatgaaactgaaaaaattaagacacttctcggtcaaaacaactttcctggagaaaataaccttcaccagtctactacgctaaaataacgaaagataaagctttcga

SEQ ID NO: 6773 - DNA, 4039 bp, Arabidopsis thaliana landsberg
gaaaaaggttttaaaataaagggggaaaaggttaaaaatttcaaaatatggcaactatttttattttgttttcttatctttcaatggaaatattgtcaccgtttacgaataaacataaatgtgatttttacaaaaagagaagttggtaaaaattggggaccggaacatgtcggaactccggcaggaaagtgggagagataacgatcccataatgtccgtagtgtccctgtagagtcacggtcacaaacgaatcacacagcctcaattattgagggtatttttggcatttaattatgttgatcttctacaccagttgcagcagcagtacttctcgtaactctgatagtactctttagcttttcattaaatgttcctcttttgatcctctgcaattccactgcacaccttccttttttttctttttttttttttataaaacaaacccaaagtttcaacatttgttttcacatgtataatattgtcaactgtgtcaaaatgatataacaattttttgtagactcgttgattaaacctaaagtttcttgcatgttttgaaatcgcaggcttcttcaaatcagcatcagctttcatgaacatacttgtgactacactcaaaatagtcgcagagtattatccttgtcgtcttttcaaaaccttcgtcatcgatcctccttctcttttctcttacctttggaaggtacactcttaatttgtttaacactttcaactatgtacaacttttaattatgcgcaagtcaaaagtcttatttcacctatctaaatgtgactttgaaagcgagatgatatactttttaagttgaagtcaaagatactgatcctctacgctcacgtgtagggtattcgcacattcgtggatctatcaacggctacgatgattttatcaatgcaagattttcaagactcgtttgactacgacgatttctcgtcatcatacccatcacgagtctcctccctacgattcgacacgtcatcactaaaatcaacggacaagatcggctcatgcgcatcctctaggttcgctttcaccgtatcttgcgacggactcgacacagtcaaaccatggtgtctcacgttgactgacacgtcatcaaccaaactaggacacaacacaggcgcgtacatcttaccgcttaacgcgcgttctttctctttcgcgtcaccggcggctagaagcgagccattcggtggtccaaggaggagcttcttcgcttccacttcgatgccagctaggaccaccgaccgtcactctatcggaacactacgggacccgcggatacctcgcccgtctttcttccaatcgccggcggttttcttccggcgagagtcacacgtcagcaaaagtgaggaaccacgagattcgttcgttcagtgtcccaagttttatcgtagaccgtacgatgagatgacttataggtcaaagatgaggccaccgctcggtggtcttgtatccattgtttcaactcagattagacgccgtcacgtgtctttatctcaacggttctaactcaaaaactatccacctattaaagtagtatataacttttgccgttttttttttttttttttaacttattgcaatgtttctatcatttttagttcgtcaagtgtatttttctaataattttgattaattgtttatttatcaagcatttttatatggttttgatttcaattatttatctaaattgttcaaagtgaaagtcgtaccgtttgaagtttgaatgctttgtatcaaggttgttactatgtgaactaagatttcagatttagtatccgctttttaatagatgatgatttgtaataaccttaattattactatgggcacatttcggaataagcatgccacaaaaatagtaaaaataaagtcttcgctttgggtaaatcttaatttgaaaagtaagaataaaagaagacaacgtggtcgtgacggagaaagactcattgggaaaattcaaatgagaacatgcgatgttgctgttgtttctttatttgttagaaggattacaagtacctacatgtgaccccattatttcctaatcataaaaataaaaaagcaaaccgttgacaaaacagttgatggcgcaatagaaagaagagaaattttaaatttcttatagtagtaaaaaatatgaaaaagacagtgtaaacagttaaacttttctcatttatttgagctaaaagacaaatagacatttcaagttttttaaatgcattcgctcgcctacttcgttaaatagttagacgtatgtactacgtgttcaatgaccccataagaaacctttgaactatgtaatttaaatagggataggtaaacataaccattgtcaaaacagttttagttatgcattagtttaggatattcaatttgagtttacacaaggggaaaaagacgacataggtaagggttagagattaccattactttattgagatagtttcagtttatgttaggaatatgtgtcaatttctataaaattgattgaaaaggcagggtggactttttttctgttttgtagtcgttgtgtgtatatgcagattgttgcattataatataacatttattgttgtaagcaaattttatactagtattaatcttagtaggaaatattttatgtattgcatggaaatgagtaatatgtcttggagcaattgtcgccattgcctcaaggttaatacaaaaatcacatttctgaagtgagatgacgtaacttgggttaggcattttctatttggaagtttgtctataatttccaagtgtatttaaatttataaaaagttatatgaaatttcttgcataattttcggggttttttttatcttttatttatttcgtttaactgttgagatttgtgtcttcttgcatggaaaaaatttattttaaagacagacgaacagtttaattaagtctctagacttttattctttgtcagtttctgcggtaatgagttatcatttgtccctttcgtttgttactttttgcggtaagcttcgaaattgatttcgtcttttaagaccatacagtatatatatatttttttattttttttgaacaccagaccatacactatatttttcaagtaaattttgtagccattatacaggatttagctttgggacaaaccccaattttttttttttttttttaaactcacatatcatatatcgtaggccaaacattgagttcttttcaatagccttgtctacgagataaaaatgttaggttttcttgaatcaactagaaacttggatttcaagtaaatttaagaacattaaatgataattatatcgagaccctaaattccttctcgatttaacatgcttatagattatggatttacttcgtttctattgataattcaaactaatttccatttcctacaaattctatttcctgtactacaaaatctagtaattaaacacatacaaaagtaatctagtaattgacatcgaagatattttagtatcagaacatattccaaaattgattatggaaaaataatcaatttatttcaaccatataacatacatcaagaggtgaaacaaatcacatttataactttagatagaacttcctttcaacttcaattgtttttctatgtttgtttgttctttctggacaattttgttatgttctaagataagaagaaatacagtgatattgtttctatgaaagaaagaaaaaaaaaccaaagttagaaaagataaataaatttctggactacttagatttctttgagctcagcgacgacttgttggtcaaggcatctagttcttcttcttgttgtttctttaggtatctctgtgcagttgaagtcacaatctggccgaagaaattcaaaagcatcagccacacgactccgttccacacggatgcaaaagaaagatcccatttcttgacctgaaccaagaaaaaaatcatccaaatacctcaaaatgcagaacaatgcaaaacggtaatggactaagtaaagagaaacaaaagatacgttacattgatatcagaagatttggaggttt

SEQ ID NO: 6774 - DNA, 2474 bp, Arabidopsis thaliana landsberg
gtcagatcaacatacaagactaattatgtaattaagtaaacctaaaaatattgttactaaagacaaaatatccaatggtaggaatcaatttttccttcattatgatctaaactgaacaaaaaaaagtagataaaaagcttatcaaacttatcaaagttgcacgctaacattttcttaattagaatctcaatctagtcgatcggtgttgccggttagttcgggttaggaagtactcctggctattcagtacgaatccgattcaacatgcttttgagccatatataagacatgaccaaatgtatttgaatggctaattaaggaggtcaatatagatgttcttgtgctcccatggtattttcacaccagtctagctatacctaatgaaaataaattatttatcttatgtttcgaaaagtagaaatacatcgatcgaaatattgcaaactatgagaaaacattacacgacatggtgataaattcaccaattttatttgttacagatacaaaagtgttcatgattgatctcatatcaataaaacacacatttattattatagcatatgtaaaagacttaaggcaaagatttatattgaccctttagttgacgccattgacgtctttgagtgaagaagcttcaactataacggaatggcgttcacagaagctctttaatctttcaaatgcatcctccaatcttggagtctccatgtcgatagaatgcctcaaccagttattctgaccaaatgcaattcctaccaatccaacaacatgcgtttaatcgtgttaatgttaggttgtaactcaatgacgaaccactagattacatgtcttagtctatatttctttatattacaagttaaaaaaaaaaacaatcgaatatatttttccttaaatcatagttccctaaaacttaaatctcaatcttctgaaaactctagagagggataatgattatattacctggtaaaacacgaagattttcttccttagcaagcttcctgcagaagtcgtgatcgtcttcaatgtctacaaaatgcaatgggtccagcttggtctgcgctatgcggattatccacaatgagaagtttgtttcaaactaatacattaaaagaaaagttatagtagactagacatgtaatgattataggatagaatacccataagaaggtgcatgattcaggtttcatgtagcaggtgagagttggtatgttcttgagcttagaatatccaaaatccactttgtcttttagaaaaatccccctcttctcgaaaaaatcttgaggagttttctccaagattgtgggaatagccgcctatatcataagattatgatagtgaattggccatagactataacaattgacaataataaatggattatcgatttttgtatttttttcatttacgagagtaaaccaataatgatccaaacctggatgacagttggtggtttggaagtaatctccagaaattctttcgcagcttttaagacctgtccatataaaactagataagcctaattgaaatgaattttttcatttacagttaatcaaatataatagtatataggaaaacgatgcatatcacgtatatcgatattaaacaaaacaaaaaaagtgaaccggacctttgtggatctaaagacaccatttagatcgtgtaacgcgagccagcccgttcgccatcctgggacaatccatcctttcgatatggacccgagtgtaatcactggtactatcgaggagaatttccccattggaacaaatggattactcccgaatacggtccatctatatacttcatccgaaacgaccattatcccgagttcccgtgccaatgtagcgagctgggattcatctttcaagtaaatattagggccttggttgctaaaataatgttatctattagattgtaaaatttaaattttgtaaaatttttatctaatatagtgcaaattgtaaacgaaataaatgtgtattgctttgctggttacgtttacaacgtttgaaatatatatttcttataaaattaagtcaaagatgtagtcttttaatttaaagaaaaaaccatgtcaatataaacgtaaacacaaactaaaagatctcaagtctagatcatctagccaatcatgtgaatatatacttctccaagagtactaatacgtacgtaaatacctgcttaagatgagcctcagtgtagtagttcccattgggattgtgggggttgattataaatatcgcaaaagtgttctcgtctaccatctctctaacgctgttgaaatcgatctcaaagtctctttcagggatgaactcataccttcggacctcaaggtgtttgtagatagagtggaccatgtcccatgggaagcctggcctcggaagcaagatgttggctttcggtttagccagaatactaaccgcgagctcgattgcttgtttgcatccaacagtcatatatacgtcatctccagagag

SEQ ID NO: 6775 - DNA, 765 bp, Arabidopsis thaliana landsberg
attccaatggtaaatgcagacaatctattttatttccgaaaagtagatagatatacacaaagatatagcaaactatgagaaaacattacacacgattgatattaagtgcaccaattttatttgttacaaatacactaaagtgttcatgatttacctcaaaccaagaaacactcatttatttatcattatagcatacgtaaatgacttaggcaaataaccatattgaccctttacttaacaccattgacgtctttgaggggagcttttttgttggaatggcgatcgcagaagctcttcaatctttccaatgcatcctccaataccggagtctccatatcgatagaatgcctcaaccagttcttctgactgaatgcaatccctatcaaatccaacacacaacatgtccttaattatgtttataattaagtagtgtccgaataattttttctataaatcctaaaccctataacttgatactatgtgttgaaactgtagaaagggctaagaaaccataagtaaaagagattgattaactatttacctggtaaaacgacgaggttttcttctttagcaagcttattgcaaaagtcttgatcgtcttcgatgtccacaaagctcgataaatcaagctcggtctgcgacaacaataaatgtttatgagaagaatgtctcaaaataaattaaagaagattaacactgtgctactaatataatagaatactcacccataagaaggtgcaggcttcgggtttcatgaacaagtgc

SEQ ID NO: 6776 - DNA, 978 bp, Arabidopsis thaliana landsberg
  unsure (1)..(978): unsure at all n locations
cagccgtagtttttcttcacccgaaatcaaccttgttgtacttttatagattaattgaagaagataattttttcatctttgtagacatgtattgtaaaataagttttttgttgctaatttcaacctctgtacgaagtttctgtttcttctttcatcaccacaacagaacagaacataactaaccgctaaaagaaggctacgaggattcgatatttatatgcaatatgtatgtattaactacagacacaaccttcatgacccaactgaaatcagcttgcactcactttctcagacagtgtaagcttgttgaatggtttctatgtcgagtcctttgagtctcaccactgattcaacatggcccttgagcgtgtgaagttcacgcaacctataaagcagagagcagtagacagagagaagacgatgaaaaaatgttctttgttatgttcaaaaagctggagaagatttggctttgagttactttacctagcaatttcagctctcctcttggcttcttcagccatttggttaagttcactgacatgggttcgatctgtgaacatcttagtatctggtgcttgtagaccatggagcgttctttgtgcgtgagcccattgcagctctctttgttctttcccaaaatctttttgccttgtgaacgcaacctatgaaaatgcaagaaacccgataagaaactttaatgtataaagtggcacaaaagctatttgtgttcctaataacataccctttgttcgataacaagatcccaggctctgccactaagagcgtagcggatgaagaatttgatgaaatcaagggggatgtagaatatgatgttatagagccaaatgaccccggcccatccccaacctattccttctatcgcagcaaagctccaatttgcatagactgcaattagagtagccacctgttttggaagcaaaacanaaattcatataattagacccaaagctcataact

SEQ ID NO: 6777 - DNA, 1774 bp, Arabidopsis thaliana landsberg
ttcagcagaggtgaaggaggaagaagagaaagttctttattcaagctgttggtaacaagtcctgaggtgttttcagaaaacatacacaggggttcagttagcacatatagttgttattttttttgggtgggatgggcttctggggtatgttgtggctatgtattacccttggccttaagtgtggcatatgcctgttacatcgcctttgcatcagaattaataaaagaaagatgcaattgtacagacactgcttctatcttttagtgtttgttattcgtcgtaacttatgtttttatcaacaattcttcttggttagtctttcaaatgctctcaaatcattttattaaatttctcgaacgtttgtttaaagatgggatccttgaagaaatatgttgtttgatcagattgagttctaaaattacatcttgaattttgtagatagtcccaaccaaatgcatcacacatggggactaaactaactttagagtgtttctctaatttctacttaaacaaaaaaccctaagtgaaacttgaacaaacgaatgaatcttagggacttattttgactcatcacttataagtcttaacgcataaattttagtttcgtataggaagctaaacttagaaggcgtgaaattggctcaaaacaatatgcatcaatcaaaacagaggaaaataaataaacacaagaaaaaatagaaagactgatcttccattttaacctccctgccttagcttgcttctaaggcagaggaaaattcaattttcttctctcaaagtgacaaaaagacagagaaaaagttttaagcaaaaatggcttttcaagacttcgacaagattcaagaacgcgtaaatgcagagagaaaacgtaaatgcaggaagagaatcatcttaggagtcgtctccgtgcttgttgttgctgctgccattattggaggtgcttttgcttatgttacatatgaaaacaaaactcaagaacaagggaaaactacaaacaacaaaagtaaggatagccccaccaaaagcgagagcccgagcccgaaaccgccatcatccgcagcacaaactgtgaaagctggccaggtcgataagattatccaaacactttgcaattctactctctacaaaccaacttgcgagaatactcttaaaaatgagacaaagaaagatactcctcaaactgatcctaggagcctgttaaaatctgccattgtagctgtcaatgacgatctagaccaagtattcaaaagggttttgagcctgaaaacagagaacaaagatgacaaagacgctatagcccagtgtaagttgcttgtggatgaagctaaagaagaacttggcacctccatgaaaagaatcaacgactcagaggttaataactttgcaaaaatagttcccgatttggacagttggctaagcgcagtcatgtcttatcaagaaacatgtgtcgatggatttgaagaagggaaactcaaaacggagatacgtaagaatttcaattcttctcaagttttgacaagcaattcactcgcgatgataaaatctttagacggatatctttcctcggttccaaaggtaaaacgcgacttcttcttgaagcaagatcttctgctaaagagacagatcatattacgtcgtggctaagcaataaggaaagacgaatgttaaaagctgttgatgtgaaagcattgaaacctaatgctacagtggctaaagatggcagtggaaattttactaccatcaacgctgcacttaaagcaatgcctgccaagta

SEQ ID NO: 6778 - DNA, 1941 bp, Arabidopsis thaliana landsberg
  unsure (1)..(1941): unsure at all n locations
ggattatatctgtacataaataagtaaaatttcgataattttaggctaatcttactaggattagttttattacagttgattactaagtatttactaaagtaagaaaatccagttcttacgtaaaatcaagagaccaaaatttttgcttcccggatcttctggttagaaaaaaacaaaaaaaaattagaaggtaaagtaaatttaaataagaaaaaaaaagaaaaagtaaagaggggcaaaggaagatggtgaggattggtccaacggtcaaacagaaaaccatcaaatcagatttcactacagttacgaaatttatttcactccttctgtcttttaacttaattaggcctatgttcttatccaccatcttcctctctttttttaccattttatcccatcccccatttatatgtgtaacgtatccattgtgttgctcaggctttcacatggttctgtatcaagccaaaaagacaattgccgaggatcttggatctattatattatcaccctactactcaattcatatccctcgtttgtttggaaatcagatttaagtaggattttaattagtcaggtgctaatgatatttcattgtttattaacacttttattaaaattctctcgtttcaattatttccattttccattaatagatttggcccacctttgtattcttttcttcttaataattgttttcctattttagtaaccaaatcactaaatttccattcattaataatactttaacccctttttataatcggcatcaagacaaaacaccgaaacagttataattttttttaaccatcttagtttaaatatctgagccgcccggttcatccattcaaatctctctctcacttatcaaacccaaacaaatatctaacaccacaaactcaaagcaataaagaatccttctctctctctctttctttctttacttctttctttcttctttcagagaggaggagcatgaaagaagcttcaaaagaacaaagcttaagctttttcccccggaaaatttgttcccctttttcgaaaaactaataattcgtaacttcatagccaacaagatcaataaaaggaggcaacttatttctttcattctctcttttaaagagtacttgctaaaccctagcttttgttctatagagaatccaagaaccaatcactttaaaaagatgagcactcttgaagaatctttgagatctctatcgttggatttcctaaacctactaatcaacggtcaagctttctccgacgtgactttcagcgttgaaggtcgtttagtccacgctcaccgttgtatcctcgccgcacggagtcttttcttccgaaaattcttttgtgggacagactcaccacaacctgtcacaggtatagacccgacccgacatgggtccgtacccgctagcccaacaagaggctccacggccccagctggaattataccagtgaactcagtcggttatgaggtttttctgttgctacttcagtttctttatagcggacaagtctccatcgtgccgcagaaacacgagcctagacctaattgtggcgagagaggatgttggcacactcattgctcagccgccgttgatcttgctcttgatactctcgccgcctctcgttacttcggcgtcgagcagctcgcattgctcacccaggttctctctttctccctctgctttcactcttcttactccatgcacatcacaagaaaacaaaattgaaagtttccacttttttgttcttgttctgcttcttttagagtgttttctttcatgtgcttggcttaattttggtaaattacgaaacgcttttgattcgatttttatttgtctttctttgggtttgggttaacatttattacacatcgcgaaacccttttggtctgattattttctttcatgggggtcatntcgcttaaagatcttttaa

SEQ ID NO: 6779 - DNA, 1521 bp, Arabidopsis thaliana landsberg
  unsure (1)..(1521): unsure at all n locations
tcttatgattattaaaatacttaaatctctctctatttctttctacttttatattcacaaaactaatcatttcatcttttatattcgattgcccccaaatggatacggcccatacttctatgcttaacatacccttttctcactttgtcatttctctctaaactctannnnnnnnnnnnnnnnnnnnnnnaaaaaaaaatcaaatactacaaaactccaaatgctagtggccaataaataaaagcacaaacgtcgacattaatcattttattataaatttaattcgagaccccccggtccgcccattcagatctctgtctctttctctcactatatctatctatctacccacaaaccaatcttctaaacactatagtctctctctcttcttcatcttctccataagcttctaaagatatataaaagcttgtgactcttcttcacttaaagaaatatttgcttacgaaagaaaaccctattctatatatcctacagcatactaaaatcaaagggtacgacatttttttcgttcttttaaaaccctaatttgttgtatcaaagaaatcaacaaaggagccatgagcaatactttcgaagaatcactcaaatctatgtcattggattacctaaacctcttaatcaacggtcaagctttctccgatgtcactttcagcgtcgaaggccgtctagtccacgctcaccgttgcatcctcgctgctcgtagcctcttcttccgcaaattcttctgtgaatctgatccttcgcaacccggagctgaacccgctaaccaaaccggatcaggagccagagcagccgcagtaggaggagtcataccggttaactcagtcggttacgaagttttcttacttctacttcaattcttgtacagtggtcaagtctcaattgtaccacataagcacgagccaagatcgaattgtggagatagaggatgctggcacacgcattgcactgcagccgtcgatctctctttagatattttagccgccgctcgctactttggcgtcgagcagctcgcgttgcttactcaggtactaattatctttatttaggttaatgattcttgttctttgatcttgatcttggtaaactaatctacggatttgttttagtttggttcggttgagatgaattctgaaactctatatattgatcatgataaacatttttttgttgaagactattaacaataaacatatgtggatatatagataagagttgttattttcttgatttcatgtgtaactaagcttaaagattgcttgcattgcacgtactgcaactttctttccagatttagacggcaatggactgatgtgttttgcacaccgagaaatttccttaaaatggaatgatgcttttatttttttaatatacatactctttatttagtagaaaatatcttctaaaatagtaacttggagaaaaaaacagtgattttattagtagtccaaaaattgagaattgtcttaatcattcattctgcgattttgcatgatatta

SEQ ID NO: 6780 - DNA, 444 bp, Arabidopsis thaliana landsberg
  unsure (1)..(444): unsure at all n locations
tttttggttggatgaaaagattataaactgtgtagtttaatatttaaacatttaaatgtggttattttcatactaacgatatcataaaaaaatatgataattatgcacgtactatctcaattaattattagtttttaagatgacgtggcattaattttacacttttggataaagaaattaattttatgtacattaattttaaaatttcatttactattatatattcatttattttaaaattcaacataaaaaattaggagaaaatgaaagagacgttttctcttaggattcaatttttgattctagattttctcgattaatcgctatgtgaatcgccgttaaacaatctccttttgccctctttttccaacatcgaattcgatagccgttcacgatnttttttcgttgtgatggatatgatatcaacgaacatcgatatgaact

SEQ ID NO: 6781 - DNA, 952 bp, Arabidopsis thaliana landsberg
  unsure (1)..(952): unsure at all n locations
acttggtggagatggttatattgttttaactgcacattacgtggatacaagatggatattgaatagcaaaatcttatcgttttgtgacatgcttcctccgcatactggtgatgctttagctagtaagatccatgaatgtttgaaagagtggggaatagaaaagaaggtgtttacccttactttggataatactacagcaaataatagtatgcaagaagtattgatagatcgtcttaatttggataataatttgatgtgcaaaggggaattctttcatgtgcgttgctgtgcacatgttttaaaccgtattgtccaaaacggtttagatgtgattagcggtttagatgtgattagcgatgcattgtctaagataagagagactgttaagtatgtgagtcacatataactaatagatatattcattgtatcaatttgacggtagagatggctaaattaaatcgtggttatgaatttacaaaacgataaataacaaaattcttttccacattttttgtatcatagcacaatggcttgtcttatttgttttctttgctcactcaccttctttttcttttctagtcgttcaatgtctctttgacctacttcataatttttcttcaatatttcagctgaaaactactttgatttcttaatttacatatacacattccttcaagaatctctattgatagcgattaaggttgttggatgattatcatgcatagctaaaaaaatttaaattaccttttaagttataagtttccccttttggcgtagaatctcctccgaccagagatttgacgtctttgttatcttaaaggagaattccctttgaaaaaatcatatagtacaccagaagagttactaattctagattaggtttctcatgttccatcaatctactatttaatngacattatggtagttatttaattaccataaaaactaatat

SEQ ID NO: 6782 - DNA, 694 bp, Arabidopsis thaliana landsberg
caaagtctcaacatcagatgatgagagattaaggtacaaagatgaaatggacagagttttgcttacagtataaaccgaattctcaatgcgatctcctctgagaacctcccccaaattttcgccggtattcaagatcttcggaggcttacagtaattcaggtagtagaaatcataaggaagctgagtctttgtagacgataatttgttcactttcacataaagaggatcaccctgtgatcacagaacaagcaaggttagcataaacatgagctcaaaagcttccattagacaacctgtaagctgatcatcaattcaatttcacatattcctacattctcttattggcactcctacactgaaaacgcttaaagatccttcgacaataccaaacgcaataatttcccacagatctggattgaattacacgtcaaagcaatcgcacttgatatcagaaaccctagattgatcatgtaatcaaaagtgagatcggaataaccagaaatagagtaccttctgaaaatcgcgaggagcgacaccgggaacatagaaagcgcgaagagtggcgaagaataagaaagatagttagagagttacggagattcgaatcctgatcgccattatcgagttctttcgtgctttcttcttcctcggacctggactattcactcagatagaggaagttgctgagagcaat

SEQ ID NO: 6783 - DNA, 422 bp, Arabidopsis thaliana landsberg
ccaacgagctttacaatgccgtccagctttacctcagctcctctgtctccatcgcaggtaaccgtctcagcctcacacgcgccgtcaactcctcctccgtcacattcggtctctccaacaacgactccatcgtcgacacgtttaactccgtcaccgtcgtctgggaacacatcgttacacagagacaaactcaaaccttcgcttggagaccaatgccggaagagaaacgtggcttcacgctccggatcaagaagaaagacaagaacttgatccttgattcttacttggattacatcatggagaaagctaacgagattcgtcggttgaatcaagatcggcttctttacacgaattcacgaggtgggtctcttgattctagaggtcttccttgggaatctgttccctttaagcatccgagtact

SEQ ID NO: 6784 - DNA, 950 bp, Arabidopsis thaliana landsberg
cgagtcctgcagtttgcctactctggtatgatagtgaaactgttagtaagaagtcggctgcaactattggtacttcctcaagttcactttcatggattggagatatcgcaactaatgttttgacgtcattgagtttcagtttcagcacttgcattatggtaaattccaccaaactttgctttttgccgttcttttgtgggaacgttgcagtatatatgtggacctttcactttaagaatcatcttctattatttttgctaatttgatgattacaaacttactagatgtttgctactcactcatatactaaagtctctgcaacattttcttctaaactgtagactgagtccagagaacttaaagaacgattgttatttttcgtacaggtttttgagggggaacccgccttcctggctgccgtaatggactcctctgatgaactgtatgcagcagctggtagcctaggaatcagtttacagatgttttgctcatcgtcagctaatctcacggatgaaattatattgaagtgtatcaaatcttctgttaagttgtccaaactccatgtcaaaatgcccgagtcagaatctctagcagaatcatttctcaccaagtttccttccgtgaatccactcacagctcaagtaattctgtcatcttctgggtcacttctcgaattcatgaagctcccacataaaagcaaggttgaaaggacgcaaaagtatcatgtacctgaagagagtgttgatctattcagttcagtatgcagatacggagcaagggaggactccagatctgtaatgacagacagctcttcttcggtatcttctggacctgactcagacacacaccatgtcagtgtccattctggctcaaaaaagaaacagtacattgctgagaaagatgagatagatatggacgacttggtgcatttttctccctcgatagaattt

SEQ ID NO: 6785 - DNA, 2614 bp, Arabidopsis thaliana landsberg
tacgttcttgctccgcttctgagtttaagggaagtccatccgcttctgacggatgtaataatattcatgcaacatatataagtcatatatatactgaagtaatcttaaaacgtaaatcgcaaaaataatacacaatacactaattaacgccataatttttatttttttaacaccataattttattatgcactaacgcggttattaatcaaatcacgtagtattagtaatgaaatagggataagatccacatgaggaaagcaaaagaatcgaaaccaaaccaataaacgcaatcaagtatcaaacactttaactttatatacatagccactaaatgtatatatccatccaacaagaaagaaagatactggtcaagtctcaatctgccttcttttgtcatccttaaataatctcaatagtttctgaatttcaaaaaagtacacaaaacacacctattatcacacgtacaatatatatataccaagtgcattaatacacttgtgtgtgtatatgtaatattgttccaagtagtgctttgacacctaataagacgatcaaatctttttggagctctaattgaggcagatatgggaggagcggactgggggccggtggcggttgcggtggtgctgttcgtagtgttatcgccggggcttctgtttcagttgccggcgaggaggagagtgttggagtgcggcaacatgaccacaagcggcatctcaatattggttcatgccattctattctttgctattatcacgattttggtcatcgccattcaaattcacattcacatctaacatctttattttaatcaccggcttatgtttgtagtataaacctggcttggtataatattgttatctatttatctctcatgtgcttgtttttcttttcatttttaagataaaagtgtacaagttagcttgtgaaactttactgaagaaaatcaaaaatagagtaagagtagtataaaatacttgagaataaataaatgtttggtttgcctcgttatcacttcttgatgttcccacgatcgatcccttcaagagaaaataattaaaacgaaagattgcattcgtatcagcatttatggcggatgattgcgattattaatgcctcctgtaaaacgtgttttattctgtttcttttgaaaattctttcgtcgaaatgaatcattgccgtaaataatcagacattaatatctgattctatctctttaattacatcagataaaacataaaaatgacaaagatttattataaaataatatagaaaatgaaccgtcggaataatgatctgatctcgctatcgataatgaagccaaaatatatatacagtagaaactaatgacataaacgaggttaaaaaatactatcaaatgcatacatcacccaatcaattatatgtggctgcatatggtaatttctttgtatcctcgattaaacgcaacctgtattgtaaaaaaaaaagggtacacatacagaaaaagactcccccaggcccagtagacattttgaatatagatattttctgaatcaaatgttgattgttttttatttttttttgggtaggcaaatgttgattgttgtatatagaggaataagctattgttagaaaatagtttctatttaaaagctaccagtaaacattggtggtgtgtgtgatctatcaactgagtgagattttttttataaaaaaatttaaagaataagagagatcatcatatattcagtcaatcttttttttgtcggctagtattatactaatcaatttgttttttttttctttgtcggctagtatactaaatttgttagttatcagatttaagttaaactttgaatggtaagttactaaatgagacctggaaaaatgattttgaatgtggtcccaaaatgtaagtatgacagggcatgcatcgccgccgaataaaatactagtaacataatgggaaatatttcgtttaatgttttgtctaattattactctaagttcgactaatacatttttttattaaaaaacaacaactgattaacaacagtactagttaatttcttgtgaaagaaagattaaagggatctaaagatcatcatcaattcatcaagagaccaagaaagaaatacaaggttgatcgtacaaagaaatcgaaaaaatggcgaggacgacgcgagaaagagtgaaatcgttcataaacaatagatggctagtgtttgttgcggccatgtggattcagtcttgcgctggcatcggttacttgttcggcagcatctctcctgtcatcaagagctccctcaactacaaccagaaacagctctccaggctcggtgtcgccaaagatctcggcgatagtgtcggcttcctcgctggtactctctccgagatcttgcctctctgggccgctcttctcgtcggctctgtccagaaccttgtcggctatggctgggtttggcttatcgtcaccggtcgtgctcccattcttcctttatgggctgtgagttgattcctttctttttctccagctttctgtttctattttggactaaagtttgcttttttctcttccttcttttaatgatgtctgtttggagaatcgaatctcccaaagtttgcgttttt

SEQ ID NO: 6786 - DNA, 812 bp, Arabidopsis thaliana landsberg
tgacaaattacaacagtcccacggtgactgactactactcataattatcaacgagctttttgttctacacaatttgtatacggcttcttcactaaaatccacttttttctttttcttcttcctcactaaaatccacttacaagttgtaaccaaattttgatcatattaaaattatcgtaattaacaaactaaacaggaatcgcatatctgcaatagtaactatttcacagattggttttatcttttctatgtcttgtccttttttgtccaatttaagaccataaaaggagaaaatcgtgtgaaagacaagacagatagacagacacgaatattcaaaaaaaaaaatttcttttctctttctaacaccacagatttcgcaatcgtgttttgatctgattcttccaggattctcccggtggcggagagaagaaacaaaggaaacccagaaagcatttttctcaatggcgtcgactacacgagaaaagtttgtatctttcataaacaacagatggctcgtcttcgtggctgccatgtggatacagtcttgtgctggcatcggttatttgttcggaagcatttctccggttatcaaaagctccttaaactataatcagaaggagctttccagacttggagtcgccaaggatctcggtgatagtgtcggattcatcgccggtactctctctgagatcttgcctctttgggccgctcttcttgttggcgccgttcagaacctcatcggttacggatgggtttggcttatcgtcaccggtcgagccccgattcttcctctatgggctgtgagtatttga

SEQ ID NO: 6787 - DNA, 608 bp, Arabidopsis thaliana landsberg
atcttaattagtaccgcagaaacatgagtctgatcaacaagaataactttccactcttggatggctctatttatcaagaagagtattgctcaaataatcacaagaaattttccttcatctctcctgcagatgcttccccaaaaatcccgtacaccactagacaaacaatcgaaggagcaattacagctgcctgtcgaatgccatagctttactccatctgagatcgaatgcatgaaagcgttaaagatttacgaaacaggagaggaaatgaagtcaatgatttcagagtcgtatgtctctgtaggaagctacaaggtcagagcgagcgtctcgtccactctgcagaaaatcctggacaagcatggagacatagcgtccggttccaaacttcagtcactgcgcacaaaatcttactcgcttgagactctagccgcggtggttcttgaactccaatcgacgcccctgaagaaattgaagcaggcacgcgtgttggaaatgctatcggttgttatagacgcagagtctgttaaaatcagagctggttggctcagggagatcctgaacgagattcttgaagcggcccaccactatgatggacacgagacaac

SEQ ID NO: 6788 - DNA, 2943 bp, Arabidopsis thaliana landsberg
tcccccaaccttaaatacacagtcccttgtgaatcaaaatttgtgaagattcaagtaaacacaggacaaaaacaaaagctggatttacaaagggttttagtgtgtacctcagtataatgtcctggagatgtagtcatccatatctgcttgagtgtactcagcaggcatgaccggttcttgatgtggctcccccatctcctcgtcattaagctcgatcgcaaccccagtaggttgtggagcatgacactcatgtgttctccagcccgacattatccggcctttgcttgatgaatgtacagttttagcattcttcctcctcttgttttccattggctcatgagacgggaaacttgcagaacggtgtggtccttatgtttataggtgaattgccttggcagagcaatgtcatggtggctggatgacatgtcttcaggcgggttgtcattgaagtcatgtcgggcgttttcacttctccttgcgattaagtggtttgggcaattccactaggagaccacttgatcacaccattgccatgttgcgatcgagtagtatgacattgtcgttgagaaagatgttgtcccaaaaccactagatcgcacactcgagcttttactctcgtcttgcgatagagtgattcatcaaaaatttgaaattttttatttgaacacttggttgcatccctattgttgctccagctgttattcatttcctgagaatcaaaaacaaaaccaaaacaaatcaaaagtaacaaaaataaaaactatatacaaggataggcatgggacttcctcccaagtgagcttgttttaagtgtctagcttgactcctcacactcattaggctcaaggagggtgatagagtagaattgacgtatcctctccttccttagtagatacaacatcaaattcagcatgctctcatgacaagtctgtaattgagtactcaatgaccctttcttggtaagctcctttttcatcatctggatagtcgtcttttctagactgttttgatgtgaattcacatcttcttttctaccataggactaacttcatcatttgggacgccttgatgtcgagtggtgcttggttggctttcccatggagctccttgacttgatcctttagctctttcacagtgtgtgttagctctcttataactctatcgtgccatttagacctctccttgagttctaaccaatcatttgattccctcatgcttgagtttagctgtttggttgagcactctagtcgagtatcaattgagccttcctcgttcaatgtaacatcctctatttctgacgcaatgacacctttaaagatctcttatcctggtacttcgttgtgtgagtctaatgacatctcatagctcaaggtctcactggagagaaatccagcttcactacttttggttaaagtagtttgaaggtgatctctgtaaacaagctcctctagcagttcattacctagctgatccatttcctcaactaagaaggtttgtccttctattgttggcttcttcatagcgtccctgatgtcaaacttcattttgacatcctctcccaaattaagattaatttttccttgcttaacatctatgattgctccagctgtagccaaaaagggccttcctaatatcaagggatcttttggttcttcatccgtgtttagcactacgaagtctgtaggcacctccacatttccaatcttgataggcaaatcttctaataacacatgaggtagtttaacagacctatcaaccaagattaaggagatattgcagtatttatacatgttaaaacccaatctctcagctactgagagtggcatgagatttacttatgctcctaggtcacaaaggcatttattgaaagtcaatgaacctagggagcatggaagagtcaatgaaccagggtctcctagcttttctgagacatcgttctcatgtatgatggcactgcactcatggctcagaactgttgttttctaaacctcttgaattctctcccatgatcaagtctttgaggaacttttgggaatctgggatacgcgtgagagcatcagcaagaggtatccttaattcgacttctttgatgttcttgacaaacataactctgtacttatcttctaactctttcttgtgtcgaccagaaaatggaagtgggggcttgtaaggaggaggaatgaagaccttttctttgtttttgacagcaactagttttggagcagttggtgatgttgctcggaaggtcagtcgagtaaagtggtcgagtggctgctcgagtgactggtcgagtgactggtcgagtggctgctcgagtgactggtcgaatgcctgctcgagttgtttgccagcttgatctttattgagactgaaatcctccccattttagtatgcactgtcctcagtgactgacttgggtctctctccagtagataactctcttccacttcttatggtgatggcgtgaacattagcatactcctttggattctgtattgacttcccaggaagtcctgtaactttgggcgctgaggtagatgctaattgtccttccaagtatcggactttggtattcaatgtctccactttggcattcaggtcattgtagctgcagtccaacttatggtgtaattcagataacttcttagcaattttcatggagctcgatgcctgtccctgtagcagctgctgtagcatctgtttcatttcagcatcagggcagcaggaccttggttttgctgaggtgcaaattcaggtggtggttgcggctagtagttcccctgaaattgctgcttggaaacaaaaccttgattgtagggaacaaaaggtttgttctgaccttgttgttggtgtggaggatacacttggtcttgtggattagcaacgttggtgctgcggtacgagaggttgggattgttggttttgaagttgttgtatcctttg

SEQ ID NO: 6789 - DNA, 1279 bp, Arabidopsis thaliana landsberg
cataactaatctattttattataaattctaaatatctaaacacttttatggtttttatttgtcaaccacattttaattaaaaaataatttcatgattggttgccaaattaggaagaatagagtttaccaaaataacttttaaaaataaaactctagaataaccgtctaaatagtccacatgaacattacataaacgagaaataaaagagtgcgagaagaaggataaagagagacggatcggagcaatccaaaatcatctagcagattcgaaaaatcaggccattcttcatgtgacaggtcgaaccatcgagactaactctgaacattctgtttcaaacacgtgacaatcaatccttcttgaaaggatattattcatttcccaaataaacgcttccactccgaatagttggatatgatagattgaatcccgcatcttatagattgaattcggctgtccaaaacttccgtagtagtgctaagttcaatcggttccaattgaggttcttcccacattaatcgtttaattgtttcatcttccatctcacatcgtttgcaaataatatagcaacgtttcccatcaccgcgtcctctgttttaaaaatctccatggtagtcccggtttccataatttgttttcgtattagtgtaccttagtttgtttttggttgtcttgagtttcttctttatcgcatacacgttcttcataaactttaagacgtccgacgatgtcttcaaaacttgtggttttaagatctaaaatttgctcgagagatgccacgatgtggatatatcttttacgcgggaggcttttcagaaacgtcttgataagttttgatatttccccccaatgcagctgacttcgacgttatctcagagagtttttctgagaaggcatcaatagtctcggagtttttcatcttgaggcgatcgaattcttaatgattaagctttgtagtctcgcttcttttactttgtttgctcctacatgctttgcttttattgcttcacaaaccttctttgtcataactcatatatagctctccaatttttacgaccagcgcctcgggtattgattggaaaagcaagtgcatagctatttcattcttctcgctatcagtttcaactgtctcaatgatctcccatgccttgtgtaccttgagtgcaatcttcatctttatagcccaacatgtgtacgttatcgaggtaagcatgagcactggattgatgaggatcctactccttctttcggacttcccgttgtgacggtaagtttcgacat

SEQ ID NO: 6790 - DNA, 1451 bp, Arabidopsis thaliana landsberg
  unsure (1)..(1451): unsure at all n locations
tgttcgattaattacatcctcaggcgtgacaaatccaaattcacaataattcatataagtaatacagcttttcgattacatcttaaaccaccttagtgaggttttataactaaaaggtttaattctattaaactaaacaaacattgttttttaaaaatggtatgcccaaaaatggtttacgaaaaatagactcaaaaatacaaatgtcattggcgaaaaataaatgacaattaatgaatatacaaataatagataaaaagcaaaatgaaataaattttcaatgtttcatttagttaaagatagtgtatcttgaagatcataacgtattttagattatgtacctgatttataagtggcttataaatcacctaccattttaccagtaaccgatctaatctacacacaaatatcatcttttactcttataagattttaaccatatttttagattctcataagaatcaatgcaatttcatataaaacatcaaaataattctataaattaaaattttctcaagataatatttaattttatttataaatctcttaattagccatctttctacatttatcaaaagatattagctatctgttctcataggcaatatgataaataaaaaacttcttccaagttaggggcacaaaaagagtttccctgggacttgggctgagaataatgaagtggctgggaaatgattagttaaggatggcttgatgaattctcaatattctgttgagggaacaaaatatactaggaaggatgcaagtccagtttggtctaaaccattgtacgaaccaaaaacaatcaataaagtaactcagggctcacaaatggtcgataatatttctaaagtttcagttatagaggatgagcagaaggatttgatgatgggagatgtactagaggtacaagacaagagtctcactgtagggttgaatttcagatattttaaatcacgtttggagtaacaaaaaacaaatgtgagaaagaactcaattagctccaactgaatctagtgttattagggatactttggaaactccaattcaatctttaagatgtaggattgatggattcatggaaatcggcagatccatctatgagtttagtatggtggtgtttcctaggaattgacaatacaattttgcttggtgcaaagtgtcttcggaggtgtccctctccttttcactcggaattggaagttttaatattggcaataaaaaatatccttttaagaagcataaagtgtcaggcgtttgaaacagataattattcagagtaagttttgatggtacagtcccctgaagaatgactcgctttctctaattttttagaagatcgtgaattgctatgtgtctccttttcttgctctcttccctttcatgtttatgtnatnctaagaaaaaataattagcncaatattctagncttttattttctgaagttattt

SEQ ID NO: 6791 - DNA, 566 bp, Arabidopsis thaliana landsberg
  unsure (1)..(566): unsure at all n locations
gtttagtataataaagcctctttattaaagtcaaaagacaggtcagcattagtaatcactatattactaaaatcgcgctataccttttgtagacgttgcgatttcaaattcaaaagttgtggcaatatcgtgattaatactaaagcctaagcccaatatcgtcttttacccgtagcctcctcgaatcccgacgtcacgttgtataaattatatcgcatcactccaaaaccctgattctcctgctccttcgtcttcttcatcttcctctgagaaatcaaaaactcgatcgatcaatacgtcgtgcgtctacatcgattccttcagaacctagagatcctctgttttggttgactcgataaagctaaccatgtcttacaaaccaagcgcgaagactgaggttcgccggaacaggtataaagtatctgtggacgccgatgaaggtcgccggagacgggaggannnnnnnnnnnnnnnnnggaagaacaagagagaggagaacttgcagaagaagcnnnnnnnnnnnnnnnnnnnnnnnntggcgtcacagccagtgcaggatttctcct

SEQ ID NO: 6792 - DNA, 976 bp, Arabidopsis thaliana landsberg
  unsure (1)..(976): unsure at all n locations
tattctactaagtcttacataatatatattcataaatataaatatatatattcataaatttatataattattaatttataatattgatgggatcatatatttacacaagattttaaaaaaattattatctttttaatttatcgatttgtatcaatttttacactagtcccaactcgggactagaaaaatttattaatttatagaggttattaatttatcgagtattaatttttacactagtcccaatacaatctcttagatgtaggattgatagttcatggaaattatcttccgacccaaccatgggattaggatgatggtattttcaagaaaatgatcaaacagtactccttggtgtaaagtgcctccggaggtgtcattctccccttcactcggagctggaagctttaatttggggtatgaagaatatcctttcaagaaggatcgactgtcaaacgtttgaatctgattgcatagaggtagtctcgatggtgcagtctcctaaagaatgcctcgcattctccaatcttctagatgagtttggattgctccgtgatctttttcctctttttcgatctcttctatttctcacttgagtaatactaggacggattgtttagctcgtttttctacattattatttttttaagtctcctatatatgtaaactcttctcctccagattgggtaaccaatgatgaagtcatcttttaattaatgtgtggttgataaaatatttttttaactaggactcaaaacccccacgaagtcacataggaaaatatttcaaaaaatctataaaatggaaaatatcaaacaaaagtcatagtgaattaagatattttttcaaaattttatgttttaacaataaattaaaatacattacagncacataattttcttaatattttcatattctaaatcaaaatttggaaagattttagaaatacagaaaattctattcaaactttaattat

SEQ ID NO: 6793 - DNA, 869 bp, Arabidopsis thaliana landsberg
tcattactttttttgtggatagccatctccaatagatgagagagagggaaatactttttatgcatgaattttatggtttatttggaaagataggaataaaaaggttttcaaaggtttacaatcagaacctttagatattctaaatgtcgctttgagtgaacaattattgtgggatgcggcccaactggaaccgattgaatcgaatgttaccagggtgtctatggatcaactgactcattctattagatgtagggttgatggatcatggaaatcttcggatctaaccatgggattaggatggtggtgttttcaaggaattgatcaaacagtactcttatgtgcaaagtgcctctggaggagcccttctccccttcactcggagctggaagctttaatttggggtatgaagaatatcctttcacgaaggatcgactgccacacatttgaatcagattgcacagagctagtctcgatggtgcagtctcttgaagaatgacacgctttctccaatcttctagatgagtttggatcgctccgtaatatttttcctctttttcgatatcttctatttctcgtttgagtaatattagggcggattgtctaccgcgtttttctaaattattattttctgaagttacgtatgtaaactcttttcttccagattgggtaaccaatcatggaatcatcttttaattaatgtgtggttgataaaaaaagccggattgcaatagcgttgataaggctgcctcgttgaaagatctacatctacatatctgaattgatagatggttacctcacattttgtgcctttaaagggttgcatttttcttgatgaatttgagtgccaacttggtggtgactttgtctgc

SEQ ID NO: 6794 - DNA, 3660 bp, Arabidopsis thaliana landsberg
attcgaaccaaacaccggtaatcttgtgattacatctcctctgctgggaagctaagctaagtaaatttagtgacagttcaaagtagattattgtcaaagaacaaagctttggatgaagtgctaagcctaccttgtgaattttcggtttcacaaacaaatcagttgaatttttgggcacaaacccataatttatgtcacagagagaaacaaaattcaccattttcaggtttctgcataaaacaaaagaaagaatttcagttaacagaggaagaacactacttccgagttaaagtccgagattctggaaccctataactaaaatctttgttctggcatgaatcagagacaatggaaaatgagtaagatgaagtaaaaaaagtatgaagtttggaactttacctttttttaacacgaatctttcgaagagagttagcgacggaagtggagtcagatcaaaaccatgacgtgatcataacaaaattcacttgaggaaaaatatttcaacttggctcgtctacaacgagattttcatgaacccacgaatctggaatcttaatttggagaagataacgcacacagaagtacagaaccaactcattgaaccttatacaaaaactgagagaaaagtgcccgaattatgccaataaacaggcaaaattgagtgaccagaatcagaatcagaggatttgtgaaggaatctatgcaatgcaaatgttgggatttcgttattcagacaagaatttgaatgttgggttttgcggaagagacgtgaatgatgaagtggataacagaagctccctcgttggaagataaaatcacgtgaggttcacgtgtctttgaccaaatttaaatacaagtagaaaggtgggcctttaaggcccattagttcgagcctttgagggtttggttggtacaaactactacaagtaaactagatttgcatgatttacaaattatacaatgttgacataaatttataattaaaccaaattaatattaatgacaaaagttaatattcagatggggaaattaactgcgtcttttttatttttgcaaacgtaatatgatgtatattaatatcaactttattagtatttttctaacggaaatattgatcaaaatcctttacattaaaaaaaaattgttttagtacataaataaccttacttgggaaacaagttttgcagcaaaaatattaagaagaaaaaaatcagccaaaacaagtttaataatttcttctaacaatgtaatccacagcttgacatatcgcacacgacacggaactcaattattatctcgtgttcaaagaacggctgcttaataactacgaaatagcagaatcatgctatataggtttaatgggaaaagcaaagaaagactcgaccaagttttcattcatcaccaccatcacatacaaatatgttcatccaccatttacttttcaagagtatgaagacaactcagaagaagaagacctgaacgctagaagttttcaaagactggcaaacaggacaaacaccagtaaacacatcacaatctttacacaaactcaagtgcctacatggcacgagcaagaccgaaacattctttacgttacacaacttacatctcatcccagtacttggcatccccgggatgttcaagtaattgtaagaagctgcttcgtcatcaatctcactatccccaaacccttctttcatttgatgatgatcagcaactcctcctcctactgcattgttgtcgtttccatgtgacatcacttgttgcaaatttacctttaaggcattaaccacagattcattgtattttgctttgtaatgccagttctgagctttcactgccacttgttttatcttatccaccagttcccgggtcttcttgttcatgctttcaatctcttggtctttttcttgaagctttttactcacatccttctctaaggccgtgacaaaagacgtgacatgtctctggttaatatctctcacacctttcgccatttgatctgcctgttccaagagaaaacaatctcaacgacatgggatatgtaagcaaaaacataagctttggagatagaattagtacccggaatttgataaactgatcaagctcgtctctctgtctattgaggtccaatctgatattgtcacctagtgactgatagactggagttgttatgcttccatttgctgaagttacagaagagttgcgctcatcatcatcataagatagtctcagaccagttgacactaagttctgttttgggacttcatcttgaacaacactattgttgttgtagttataattcaaagagatctgtagcttctcctgtctctgcataatattgttgttttcagtttcccttccgcgtgtgctattatgccgaatcataggagcaaggttatcattagcaaagtagtttacaggatcaatagtacaaccagctctcactgcaaccacatacaaaggaacaagctttagctctattaagttctaaaaacattcaaaccaaatgatgaacagaattcagaaacttactcgtcccaagcaagtgaagctgattcaacgatgtgtttgattgatagtgaaactggctgttgttcattagaacctgcggcacagggttctcattgttgcctcccaacatcttctctagagcttaaccgttttttgtgtatatatatacccgtaaagaactgaaacagaaaaattacagtaagaaacctgtagacaaacgaaactaattagttgtaagctatgaaagctgaaatttcttcagcttttgacatgaagagccaagatgtaataagatttaactgtcctaaaagcaatacagattacaatccaactagagacaaagttgagatctttgaggaaactatggttcatgatcaaggcctatgtgatgaattttccttgatcttgcctaggaaccaaatttagagaacatggtcaaagattcatctgaatattaaaccaagtaacaaaaacaggcacaagaaattactatgtcaaacgtgataaaataagacaaacctctggaacatggaagaaagatagcaacttcaaagaacaagacataacctaaagatcttgtaagagagaagcaaagagaacatttgtacctgttagagattgcccatcaaaaaatttaaaccatagcttccttcagatcctacatacaaacaagaatcattatcacagcgatccaagtttgattatttcaatctatcaaagttttttaaaaaaaaacaaaaacctgtaaaatcaagaattcgaagagaagctaaatcaaacaatgaatgattcagaatcttaagaagaagaagaaaatgggtttgttgaaagaaacgcttagaaacaacaacatccaataaatttaatacaaagattttaaatttaaggagaaagaagaataaaagaaacggatgggaaaaaagaaagaatgaaatgaatgatggaaaggtgagaaatcagcagaggacaggacacagttgtgaagaagtgggagaagttgggtggcataatcgagatattaaaaacaaaaaaaaatctcttgaaaaatagactcgaaaatgatactaacatttttttttgggagatgataacaagaatagtaatagtaaccggtggcggtggtattggttctgctgagtaccccgt

SEQ ID NO: 6795 - DNA, 1627 bp, Arabidopsis thaliana landsberg
actttaacctcacaacgtcaattattttcacgtggcatgaagttgaagaaccgaccaattatttcaacacactcttctcttacatctctatcttcttaagttctttcctttgttcttcgatttgatcaccaactctcacatatttcgaaatcgtcacactttgttgcgtgtcgtcttctctctctcataattcttgagtttcacgtctcaagatttgatcacttctgccaattttccagattgatctctctaattatggcttccatgagtttcgccttgaatcgcttctctggactctcctctaaaaccaccttatcagctgacttcgatccatcctctcgccggagttttctaccgccgactagagttggacttaagatctcttccgccgccgaatcggagcctgatctcagtgtcactgtaaatggcctgaaaatgcccaatcctttcgtgatcgggtcgggtccaccgggtaccaactacaccgtcatgaagagagcctttgatgaaggttggggggccgtcatcgccaaaaccgtaagctcttgagatttgactttttcaattttagagtagatgatgattgagtctgttttgcgttgactatgttggaacataggatttggttgtgtttgtgtatgatgatgatgatattgagtttcgtctgaatctgtgattggatgatttaggtatctttagatgcatccaaagttatcaacgtgacacctagatatgctcggctacgaaccggatccaatggctcagccaaaacagatgtaattgggtggcagaacatagaactcatcagtgacagacctcttgaaaccatgctcaaagagtttgagcggttgaaaaaagagtatcctgatcggattctgattgcttcagtcatggaggaatataacaaaactgcttgggaagagcttatcgaccgtgttgagcaaactggtgttgtgagttttccctaaaacacagattcttattcttccttgtggttagattctctttcactttgtctgatattagtatacattgttgaagagacagttctggatgattgttgtgtaggatgctttagaaatcaacttctcgtgtcctcatggtatgccagagcgcagaatgggtgccgctgttggacaagattgtgcgcttctcgacgaggtttgcggatggattaatgctaaagctacagttcctgtatgggctaagatgactcctaatattactgacataactgaggtgtgacatctaattctctcagcctttttgcttcctggtttttcaacctttttgtataaagcctatccttgtagaaaatgaaaaaaaaactttgatgcaagtttattgaaaagctccctacttaaagctgagttattgttactctgttttgctctgctttgaccatgtccgttttgctttttcttttgaatagcctgctagggtgtcactaaaatccggatgtgaaggaattgcagcgatcaatacaatcatgagtgtaatgggaattgatatgaagacgttgcgtcctgagccatgcgttgaagggctagctagatagcacttttataatgtcaaacgtttggcaaatcttgtaatggcattcaagaatagctaacgttgatagtgt

SEQ ID NO: 6796 - DNA, 1732 bp, Arabidopsis thaliana landsberg
ccctgctgacctagtcctatataacaaaataccttctcctctccattaacccgtaatctcaatcacaaactatttccccccttcgttcatcaaatcctcaagagaaaaaaaaaatccccaaaagcttcctcaaaaccctaacacagatctctcgatcttctccgatctgtcttttctcctaatctggtaacgtttcgattctcgattcatctggtttcgcgtataatttttccgattgatttcactttttcgattacgaatctagatctagggctttgatctatgtttctgagatgcgattacgagtttacgtcaaaaaatttgcagtgattcgtgttttctcgatatcgcttatgagaattgttttctaggttttaggaatctattggttcataggctccgataatcagatctttgaattcaagtagtggatgtggttcaccgtccttgatttgtgtatttgagcttgaattttataattatggcttgatctacttcgattttcatggcgtgtgttatcattgtgctggtggtagctaattgttattttctaaactccaatttgttcaggtttagtttgatttaattggattgaagatgtcagacgctttgaatatgactcttgatgaaattgtgaagaagagtaagagtgaaaggtctgcagctgcaaggtctggaggtaaaggagtttcccgtaagagtggacgtggacgtggtggacctaatggtgttgtaggagctggaagaggaggtggacctgttcgtagaggtcctcttgctgttaatactcggccatcatcatccttctccataaacaaggcaagctcgaaatcttgattggaactctgtgccaccaaataccgaagcatgctaaaacttaagatggatgatcttttaatgctcttatgtccttggagaagaatcatacatgcataaaccgttacctctgatgatgattcagattacaagaatcttctaacatcttcttagaaaagcttctttcctgcaattagtggtttttatggttaaatactgggaacttcgagaggcatgcgtagatgtgcagaagttttcggttgatattgtcactcgctataggtttattgaagagctcctttaagctaagtagtccacatagggttatctacagggggataaagcctgaaaatgtgtgtggttctagggggaatttcagaaattttacttaaagagtaaataggatttatgatgggttatcaaagtgggggtatttgcactatgcatgaagttcacgatggtacatctggaatttcttcggagtgtgatggcagtctcagttttcgtttttggcttcagagactgactgataacaccagtatgattcatatgaagttagtcaaatttacttgtttccctacgtttcatttggtatctccttggatggttcttgactacttcttcctggagctctttgctttagtactttcagccaaatgggtgttttctcctctttcaagaaatttgttgattaatgtggcttcaagattctacagacccttttagctgacttgatatgttctactggatcagcttgcccgcaggaagaggagcttgccatggcagaatcagaatgatttgtatgaagaaacccttagagctgttggggtgtcaggagtggaagtcggaaaaacagtttatattaccaaccttgatcagggagtgacaaatgaagatataagggtataacctgacc

SEQ ID NO: 6797 - DNA, 596 bp, Arabidopsis thaliana landsberg
tcgtaaatcggtcaaaataactgggacacgctttggccgagtaatatcatcagctttgaaactagtgtttttcatgtcttcaatgtttatgtagtctctctcttttgaaattgtgcattattctcttttctcgtaatccaagtccacggcatcaataatgtttgtttctagagtggaagaagaacttatcttgcaaacatgattgagctttaacaagtccatgaggcttattgcaatcaaagccagctgacggcacaattaggccttgtcgcttatcgaaactgaaatagttaaagggctttggtccttttgctactgcaactgtgcttatgtgtaccatctaagggtcttagactcttgcgagagttgcaaagtagatacctttattaagctctcaaaatactaatttttgcttttaaaaaacagagtcgtatgctttgacacagtcctagtgttaaagaagatttgtatcgaaagtctgtttgtgttgaatcaagaagcagcacttcaagctcctctcctgcatctgtgtacatcccaaaatatgatcagaaaacagaaacatataagaccaggtctttctatgttaatgcaca

SEQ ID NO: 6798 - DNA, 2824 bp, Arabidopsis thaliana landsberg
ccaatacgcaccaaccaagtattcattcatccccccatttgcaaaggttgggctctaatgatgtgggcttatctattctcttaactttctttcaggcccaataggtccccaagttctatttatgtggtccatttacaaaacgacagacacgaactactaaagattccaagccgttaacttttctttgttacttactcctatggacaaagcaagcaaatgatggctttcaattatagctattaatgatcttcacaagtgaaaatttcgctatcttgtaacaattaactactagactcttgaggtaatagatatgatgttccctcaaagtaattacaacttaacttagataaatatatagtgattgaatacaaacaaaaaaatagacaaaccaacctttctttttctggtgaataatcaatctcttcttgtgctttttttatatatgatataattaatattaaggtcacctgtggggagtggtccattgcataacattcacgggactcatttactaacactcttgtttaatgaatggtacaacaaccaaccttccccccatcttcttctctatctatcttacatccacgtctccctaattgctcttcaccttttttccttttttttggttaatcttctcttcctgcaatgacatgccaaatgacttttttacattgcgatacaaatctcttccatatccatatcacactataaccaaatttactcctctcatcagactacctacctaccactggttagctgttttgaatgggtttagatcccaacgcgacacgttgttggtccgctgctgccctgtgttatccccatcattgataacctcggcatttggcacttcaaggacttgagaggctctttcaatgtacctgtactagactcatcctgatcaaaagatggcgacgacaagcctgaaccctttgtttctgcagctaccccacactcgagaaaatggtgtttcggtgatacaattgggctatccaccagcctatcatcctccaagctgaacaacggcaaacaaaaagacaaaaaatactcagatcttcttcaagctcacaaaatgaacgattatcaaactggggatacctctctggaagtttgattgtatcctcatcattctcttttgtgcacactctctgattgtttgaaactgccagcagagagcgatcaggttattacacatttcagacaagcataaatcacttactcggaccaaaaccgaacctagtcgtggagaaacaagtagtgtttggtcgaaattgagttgaaactgtttctcgacgtcgagaagctgcagattcatcagccttgtgctctgcagctcaagagctcgttcttcaaacctccttttccacagcagatcttcatgaaaagccctcccccctatacacagagaaatcagtattcaataccaacccaacgcttaggggaaataaaagagagagagagagagagctttataccaagctggaaatccataatgtccctggatggcttagtcctgcagcagaggaatcaaagcgtcgtaaagagatgaggaatcaggagcagctcaagcaggaaaagccaaagtacctgtacttgtctgggactttgcctttctccttgtaaggcttaacaagaaccctggaatgacacacaaagtgagggttccctttggccagaatgctcttcacagtctctgggtacatgaaggtcacgaacccaaacatcctcttctgctggtaaggtatcctcacgtcctgaactggcccaaacgtactgcaccaccattgctttaagtagacaacatccaacaagaagaatgaatgggttccaaacaagagtaatacctgaagtagtcggaaacatcttcttccctgaagatactgtcagccgggaaagtcagatagatctgtctagacgccgggcaggccgtggccgagaggtcgatcctctctggcctccatattcccaatttgtgcaagtcatcgcccatcatcaaagcagcagctctgctacacattttaccaaccaaagtttcagaatacccgtccatacagatgaaggaaaaaaataaagaaaaagaaaagctccaacctttgggcttcactctgttgcaagttgacacctttgggggagaatggataaccggtgaactgattggcaagtctcggcggaacagagttggacctaagcacctctttgcggtgaccccatccgaaccctaaatcggactcaaaatcttcggcggttctcggagtcaagaaagaaagccgctcttcgaggtcctttttggccttggctatgacagaaggaaggagattctgaggcccgaaagctaaccttatcatctccttctcaccgtgatcctgaaggaggagaagacctatgatcttggaagcattagctgggtctaagttctggattctagagagcacgatcctagttgcttcgtacacatccatggaaacacactctttgctcgatgagaccttgtctctctctctctcgcttaatctttctttggcaggaaaaagaaacactgctattgttgtcttgtcttgtgtacaaaaagatgtttggtttcttgtcttggactttagcaaagctaaaaaggctttctttctcaactaccttaccaccatcatcactctagtaccagtgtaccactccactccatacctaagcttctttctacttcttcttcttcctcctctgcttgcaaaaatcaaagttgccacttccctcgtgagtcgtgtggtgtggggaaattaaatataaaaaaagagttaaagaagagtggagtgactgttgtgtcttctgggctcca

SEQ ID NO: 6799 - DNA, 450 bp, Arabidopsis thaliana landsberg
agaaaagagacaagtgctttagtgtttgtttacctagaacgtccctagggctagaatcaaggcttgttggggacagttctcgctctgttgtttggttagttctgcacaacaaaccgcagtaaacacaagggattcaaggaacaatcaggccaaagtataagagttactaatactagcaatataagtacctgtatttgtcagggactttgcctttctccttgtaaggcttgacaagaactctggaatcacacacaaagtgaggattccctttggcgagaatgctcttaacagtctcagggtacacaaatgtcacaaaaccaaacattctcttttgctgatatggtatcctcacatcttgaactggtccaaaagtactataaccaccataacaacatcttatgtcacatacaagaacatacattcagaccaaataaaagttcaatgtgtttt

SEQ ID NO: 6800 - DNA, 2387 bp, Arabidopsis thaliana landsberg
gattttgatatccacttcttcttttggttaaagattttggttgtccacatggaatctgaatagctaatatgtaatgttgcgaccagtttacaaactacatatgaaatgaataatgcaaaaaaatctaattcagtgatttgcattattcatttcatagtgatttgaattaatcattctgttttgcttgtttttgctagtaatttagtttactagaattcagtaaatattcaccacactgctacagtaaatatgaaaatcatacgacactctaaagtctctactcatgccaatacgacagatccaacacatgcaagtattacatacacacatgcttgtacccatctatatccacattaaacaaaaagcaagatccgaaaactgaatatacacctcattttaagtatccccacttcatggtgttcctatacaacagtcattggcacatacatgtgtttatctatgtaattatgtgaagtcttggcaaccaaattagatgagcttttaaccaacctttagtttccacgtggtatacattcagtgtatcatcacccctgactcatttacttactcagttactccacaattcaggttttggctgattcgggtaagacttttacacattggtaaaaaacctctactataaaaaaagagatacctctgctttgttttacttttcacatattagtacccgtaagctaagctccaaatactaattcacgagtgatcactttacatcactgtcaatatcagcattatttaacaaaatttctactaaaatcaaacattatggtcttattatcatatatggataacttgtacaaagcctagatttattcgtttgtatagtaatctattaatttatttagaataagttacttatcaacaaaaataaaggacaccattgattcaatttcgttttctatcttttaagaataaaattccatttcgaaaacccgtgagcctctctacattcttggactacttccttgtataaatctcaccaaaaaaccttctctttcttcaaccgaaaccagaaaacaaagaaaccaaagtctctttagtttcttcaaccaccacaacactcttcgtttagacaacaaaaaatgataatgagaagaagtctaagtctgagaagcatcacgatgatgatattaatggctgttttggtctggtcagtgactctagagacctgcattgccagaagaggaagacattggagacatagccaccgaagctcttctgacttgtctgattccttgtcaaacaagaaaccgaagagccatgggaacagtcaccaccacagttctcacaacaacaaccatcaccacaagtctaaacctaaaccgaaaccaaagctgaaaacgccgccaaaagctcacgacaataactctccggtggtttcagggccaccaaaagtccaaccaccgcctcttccgcctcaaaagggatctcaagttttcaatgtgatggattttggagcaaagggtgatggcaaatgtgatgacactaaggtacaataaaaaaagctcattaatttcgttatccgtacagttttcaatcctagtgattaattagaacactttcgtatttcgttttcatgagaattttacaaaagacaaataacagttgagacatcattgacaacatcacgagacagaacaagaaaaaacagagctcagaaaaagatatctgtttctgtaaagtcacgtaactttttaatgtattatatatcaaatgttaaaatgcgccaaaaaacaaaagacaaacgaatataaagtgacaacagaaataacagattacaaatgggaccacaattcacaagccttgataacaattactacagagtttctctgtagactaatggtgattagtggttttaacttttaagattagttaatgaaataattaacagagtttcataacggttgcaggcgtttgaagcggcttgggtagcagcttgcaaaatcgaagcatcagtgatgcttgtaccgcctgaatacacttaccttgttggaccgatctcattctctggtccttattgtcaagctaacattgtgttccaggtgagaattgatctcttttatatagaagtgtatcactttggtgaaaatattctaagctttgttgtgaattatgcagcttgatggtacgattatagctccaacggattcaaagacatggggaaaagggttaatgtggtggattgattttacaaagctgaaaggaattaaagtacaagggaaaggtgttattgatggaagaggctctggttggtggcagcaaaattctcctttcattgatagagataccccactcatcgtccctttgaacaattgtgcaagaagaaaccctcctaaacggaaagttaatcgtaatcttcttccctg

SEQ ID NO: 6801 - DNA, 737 bp, Arabidopsis thaliana landsberg
tattcttttacattctttcttgcggttttccccgtttctccttccatcagttctttaatctgtgaaataaaaatacttattaccacttagaagacaaaaacaaaaccctaactcgtcacataattctaaactcaacatatgtttttgtatttcgatacctttccacttagttcctctcttgtcacaaaaccttttacactcccatcttccgtttcaactcttactcccacctttatctcctccacaaccatcttcgcattgagcggttgctcggccatcatcggccaagccaacaatgggaccccgacacatatgctctcttgtgctgagttccacccacaatggctcaaaaatcctttgacactttcatgtgacaatatctcccattggtccacccaatctctcactatcatcccactctctcttattctatcgttgaatccttctccaattatctcctccacgtcttttcttgtgacccacagaaagttcacctagagaattaaacacgtcatgatataaaattgctttttactcgacatgcatttataaccataccttacaattaatgcctaatttgtttagtgtcgaattctagacttaaagtcaaggaattaggtagacgaaagcaggatatgtctattaatatattagagtagatgaataaaaaatttattaatctcttttgtaactatttcattgcatcgatatacttctaaaatttagctcttccacgc

SEQ ID NO: 6802 - DNA, 494 bp, Arabidopsis thaliana landsberg
catctaaattcttcaagacgaaccagtcccttgcaccaaagctacttttgccatttttgagtattctgttttgcgatttttcccgtttctctttccattagttctttaacctgtaaaattagaatattaataagtcttgaaaagccaatacgtacgtggttggttaccattaatttagtgtaacaattttttcagatttactaataaaaataaaataaaacattcttgttgttctcgatatctttcgacttggttcatctctaatcataaatccttgcacattaccattttgcgtttcaactcttactccgacctgtatctcctccacaaccatcttcgcattgagcggttgatcggccattatccaccaagccagcaatggaactcttacgcatatgctctcttgagctgaattccatccacaatggctcaaaaattctttgaaactttaatgtgacaaactgacaatatcttcccattggtctacccaattt

SEQ ID NO: 6803 - DNA, 2240 bp, Arabidopsis thaliana landsberg
gacatataaatctaacggtcaataatgttgtacttactttgctgaaaacaaaaaatataaacgaaacttttgtcaggaagatacatcaaattaatctttgttaaacagactgaaatatggatataggttcaggggactttcctattagcaaaaagatggggctagattttaacttttaaaagtcaaggtcaattttctcaactactcaccaattgtttttttttatgtggtatctaagtaaaatagaaaaacacaaatttagaataagataatgacaccaaggagcaacaaataaaaaattaaaaaagcattgctcatagatttgtttgtatagaagatcttaaatagcatacgtacgattactaactttttattaagttcttctagaactccatatacatatttggtttataaacttattaatttgttaggaattttttatttttgttgatcttaaaattcatttagtaatttcgtattcgaagtgttataacttaaaaaaaacattaaggttccatatggcaaaaataaaataatgtaaaagtccgattcacaaacacctttaattgaccattttgtttggctttttaatgcatttacacttatcacctaaaactttgaaactaatgtacttctctagtactgttctaagataaacttagtaaaatatctatcacaataaattcttcatttaccaaacccacactctttcaatatatcagaacaaaaatatactaatctaaagtttttcagtttgttcttttgaaaaagaaaagaattatcataagttgactcaccaactctttaccatggttaagtaacttgttttgaagtctctatatatacaaatcactaacgacacatcataacatactactctcttaagccctttcataaccttgtaaaccattaagaggctttgctcaattacaagaagaagaaaaaatgcctgtcgacgggaaactcgtctgcgtcaccggagccggcggctacattgcttcttggatcgttaagttactcttagagagaggctacaccgttagaggaaccgtaaggaacccaactgatcccaagaacaaccatctcagagagcttcaaggagccaaggaaagactcactcttcacagtgcagatcttctcgactacgaagctctctgtgccacaatcgacggttgcgatggcgttttccacactgcctctccgatgaccgacgatcccgtaagtagacaattctattaatcggttgagtggtattagtatagtactcatgttttcttagttttcattttctgaattaatgtaactaattaggagacaatgttggagccggcggtgaacggagccaagttcgtgattgacgcagcggctaaagccaaggtcaagcgcgtggttttcacgtcatcaattggtgcagtttacatgaaccctaaccgtgacactcaagccattgttgacgaaaactgctggagtgatcttgatttctgcaaaaacactaaggtattgttttttatctatgttataagttttcgagatgcgctgctaagtctttaacaaagagtgttctgcaataaaatcgagcatgcggctagaattaggtctttagccttaaaatcttggttacttttggaattctaaatttcctttttgttttatcttccttctagaattggtattgctacgggaagatgttggcggaacaatcggcgtgggagacggccaaagcaaaaggtgtggacttagtggtgctaaatccggttttggttctcggaccaccgctccagtcagcgatcaacgctagtctagtccatattctcaagtacctcaccggctcagccaagacctacgctaacttgactcaggtctacgtggacgtccgtgacgtggcactaggccatgttctggtctacgaagcaccctccgcctcaggccgttacatcctcgccgagaccgcacttcaccgcggagaggttgttgagattctggccaaattcttcccggagtatccacttcccaccaagtaagtcaagtttggctcttttgcactctttggtctgtaaatatcagagtcatcacgatttagttttagtcggtctaatatatacaaccttggatgtacgatcgatcccagttttgtttgtgacacaccacgcaatgtatgacttgaagaacttgaacatatctattcagaaaaattataaatatttagttaggataaaacccacatgagtggtatttgaccc

SEQ ID NO: 6804 - DNA, 2605 bp, Arabidopsis thaliana landsberg
actgccacttgttgtttcaaagttcctgtaaacaaagaagataagcaaagcaatgtgctttttcaataaatctgtggaagaatgatgattaagtaagatcaatggttgcgaaaagatggcagttatagtaccgtgtccttctcaaacatgtcggttgaataaccgaaatccgcaagacggggaggagaagaagtcaacctagctggccaaggagctaacccacttcccttggttttatggtcatctgtatttaaaaaaaacagagcatgactgtgacatatggcatacaaaacaaaagatctggtcctaattcctcaaaactcaaaataaccaacggaacagaaaacagaagcaaatacttacgcttggagtaaggagtgatgcaagcttccattgaaacacccgcaaccgcatcaggatcagcatctgagcgacagagaggaggctgtgtcccgggctctctctccaagtaacagtcattactcaacggtttctgccaaaccacagtttggtttcttttaacggcaattctccaacacattctttcaacaagagcactcatctccttccagattttcaaattctcttcatcttgtgcgtaagcttcaggagacgaatacgcgaaataacctcccggtcttagtacccgatcgagctcaagaagaagaagtccgtctctttgaagccaatcaatcctacatcgagaacaatgagcaaactcgaatgatctgctcgggtaaggaagccttttggtacctaaaacaccaagataagcagggattcctctttctaacgcaaactggatttggttctgatgaacatcattaggggctagtgacattgtcattatatcagacgcgagaaggtaagctccaaaactcgcaactccgcatccgacatcaagaaccgttcttaatctcccttcgtcattcaatacatcgttcgaaaagttaagcatctgcaaagtcaaaaaatcattagagacaagttatcactagaaataaaaagtgagcaaaagacgcttacatttgcgatcgatgcaatgtatttatcagcaccgtaatggaaatgagtgcctccaccgggaaaagaaattttctcgcctttctcaaccatccagttctgatcagacttctcttttgcaaggtgagtgtgaggtatgtttgctttccacacttcatctctactcttaggccacttaataggaacctaaacgcaaatcaatacaaagaacaaaacaatatttttacaatgtaaccaggaaccaatcacaaatcagagcaaaacaagaaagcaaatatagcaccttgtatccagatggtggaggaatcaaacaattaaaccgtctttcgggaggaggacaatgccgttcataatgttccattaaagagagatcaagcttcaacctcatttggtagatgaaattcctatctaagcaagggatgatttccgagtgccggtcatcacaaaccttaacatttaaaccataagttagctaacattattaacatatctcaaccagttaccagacctgagaatctgatcaaacttacaggaaaacttttggcgacaacaagactgtcttctgcattagccacagaatcatcctgtttggtatcaccattatcatcatctccactcaaataagacgatccgagttttctcaaagatcttccatattccaatgctgatgcaccttggctagaggaaccatagtacataaacaagaaacagacgaatagagccacgacacagaccgaagcaataagccgcttctttaggcctccatcagatctccctctcatcatccaaccttactatcctcccaaaagagctcttcagagtcttgataacaaaatgcactttccaagaaagagtttctgcagaaatcaagaacagaacacttataaagaatatgactttaagcatagagtttggtaaaaagccactggcacttaaaataaacagaacatgataaattcagacttggtagagtcagatccgtgtttattgggtcagaaaccactcactcttgattcagaacccaagttaagtgtaaaccaagtaagtaacacaagtgttataaaaatggccaccgacaaagttttattttttttgtcaaagattggatctttatgcaatcaaatagaaagtagtagtagatctgagagtagagtttccattttatcgggagagcttttaatgaaaagtctcactcaatttcccaggaaaagtaaaaaaaccgctcattgattaacgaatatctcagagaatgagaaggaagcaaaatacgaatctcaacgaatgaaaatcgcagaagcaaggaaaaaagattgaaaactcaccgaccaaaggagaagagtgacaacccctgtgcactgagagagatccgagaatgggagagagtgaatgaagtttgtgtattcttctttttggctttaaagtaacgatttttctttttgggcataaaagtgaataaataaaaatcgaaactttagagattcagatctccatctccacaagtaaggaaggaatgagaccttttttcactggcgaaatgtttattcctataattggaagataagtacattgttttcgttgaaag

SEQ ID NO: 6805 - DNA, 547 bp, Arabidopsis thaliana landsberg
ggtagtttgtatgggttgagaactctgagtggagactctgtagctttggtatgattgagtgaccgttgcacaacaggatttcctttcatcttaaccttttattcagtttcaatttctttgaaaatctagcagtggtgggtgggttttgggtcggggtactgtgttttcccaaggtttcatcgtgctcgtatgggtctcaatgttccgagcaatattgatgtttcatagcaaaactcacatctttgaagagaaaaggtggacgaggatctcagttcaggggatctccatccatcttcacttttgtagtgtaaatcatttcctgaggaaagctagctaatacttcttacctggtatctgttcctttcagccaatggaaatatatgttgatgatgaagccaagttgactcttcatggacttgtccaggtacgtttaactggtttgaggtcttcgtattcaatgtaaatatatgttgttgtttgatacttaagtgaccttttttctgttctactgtaacagcactacatcaaactgagcgagatggagaag

SEQ ID NO: 6806 - DNA, 4645 bp, Arabidopsis thaliana landsberg
gtagttcttctcatgtttccgcaattgccttgatgcgtatgcgataacactccccttttgcatcagtacgcatcctagtcccactattgatgcgtctgtataaaccgtatatggctcaccttcctccggtaagaccaatactggtgcattagtcaacatggcctttaactccaggaagcttttctcgcattcatccgaccagttgaatgcggtgtcttttccggtcagtcgagacaagggttgggccatgctcgcaaaactccttacgaaccttcggtaataccccgctagtccgagaaaactcctaatctcggtggcattccttggtcgtggccactcctttatcgaccgtattttctccggatcaaccgatactccttggtccgagataacatgaccaagaaaaccaacgcttctttgccaaaatgagcatttacttaacttcgcaaatagctcatgttcccttagccgttccagcaccgcccttagatgttcttggtgagcttcccaagatttcgagtaaacaaggatatcgtcaatgaagatgataacaaactcgtctaagaaatcccggaacaccccattcatcattttcatgaaggctgctggtgcattggtcaatccgaatggcatgaccacaaactcaaagtggccgtaccttgtccggaaagccgttttcctcacgtccgttggctctatgggaatttggtgatatcctgaggccaagtcgatttttgaaaaccactgtgcacctccaagttgatccatcaactcatctatccggggtaaaggatatttgtttttcaccgtaactttattcaatccccgataatcgatgcatagcctaaagctaccatctttctttttcacaaacagaaccggcgcaccccatggtgagctactcggcctgatgaatcctttatccaacaactcctccaactgtttctttagctccgccatttccgccggtgccatccggtacggagctttagatatgggggttgtcccgggctcgagttctatcgtgaacgggtctgaccggtccggtggtacaccactaacggccgcaaacacgtccgagaactcgttgacgatcggaatgtctttcaactccgcactcgcccccacttccttggttgtgatcgtggctaaatatgcctcacatcctttcccgagcatcctttcccgagcatcctttcagcctggattgccgagattaccaagcttcccgaggttgttcttattccttggaattttaacatacccacgtccctctcgaattgtatccgtcctcggtgacaatctatgtgagccttgtacttccccaaccagtccatccctaagataacatcatgtttctttagtggaacaatgattaggtccgcgggcatattgacaccgttcactacaaccgagatgccccgaacaagtccggtcggatacattgcctgtccgccggccgctcgtaccgttccataatcggtgtttggttctttcctgaacccacctatttcaaccaattctggactaacaaaacaatgtgtagccccagaatcaaatagagtgtgcgttactacgtcacctactctcaaggtccctacacattcccttagaatgctgagtacctcccctttcccgtatgcatgatgcaatgcaaatgcagttattgaaataatgaatagggagttgtaagaacgtaccagtgatcgccctgaagtttccggcatcgttagcttcctccgacaactcataaactcgcggtgccacggcttgccgctttgggggaggcggcagtccatttcccccgcgattgtccctttgtccggcctgcttctccgcagtcaacttagggcactctcgctttagatgtccagtctttccgcaatagaaacaagtccttgtctcttcaccgagaaccttggactgccctggttccattctcgggcaactttggatcgcatggtccttgcttccacaccggccacatgcacctatggccttccagcaagttccgctgtggctcttaccacaggtcacgcattccccggtcttagcatcggacttagtgttatccaccttgtcaaatttccttttcttatccgcgggtttggtggattgattgttccggatcggtgctttctcccggttcaagtacctctcctcctcgatcccttcctcaatcattgctgccctttcaaccaattcggaaaccgagttgaatgtccggaccaaacaatggttgcggatctctatccttagtccacggataaatcggcgcacttgagcttgttcctcctcaagttcacgtcccacataacgccttaagcggttaaattcctcatcatattcacgcaccgtgcggttcccttgaactaggtcgaggtacgcacattcaagcctatcccaagcctccggtggaaagtacttcttgttaaactcgtcttcgaaatccgcaaaggaccggacctcgtcccctctgcgtttctcgacggttaaccaccaattatgggcgtctccttccaggaaatggaccgcaatgtccctttggtaatcctcagggcagcgggtagacttgaagttcctcttgagtctactcctccactcatcggccacaatcgggtccgtactgcccatgaagtgtctcgtgcccagccttgagacatgttcgagaagactcagatagtctcctcttttccgcccataattcggttgtggattcacttccacaacttccgagtcatcgtccttttggttatccccttttaggaccaccggatctgctacaacggccttggtcaatgtggctagttgcgccatcattcccttcatcaaatcccactgttcttgggccgttggagtattgttccggttatccgtgatgtcccttgcaccactactctccggtgcttcctcatttatggacttcttcccggcctcaggtccggccgagtctgtcccatcgaacatcgtcccgactctggttttctcgttgatcatcgtttcctcctcaaccaaagtctcctcgacaatgcccttgtccttcttactctttcccgttttgctgctcttacccatctgcgaaacctctaaagttaatccacataactcctagtaaaatcgcaaaagagtaaagaacaactaccgcgagattctcaagccgacgagtggtgataccccttaacccaacacctagtcctagaaccaagcatgctctgataccaacttgaaaggccccgatccggactgcctaaagtccgggcgagttctctcgacccaagccactaagtgactcggccctaaccgtttatgaggttctttcctagtctaatccgtttcatatgattccgagattcaatatatgagacgaatagagtaaacaaacaatcggacactttattaattaagcaaaggattcgatacaacctatgagtttgcatataagctattacaagtcatataatcgatccctagactatctgaactatcaccacccatcatcccggccttgagtctctcgcgcctaagccaagtccttcccacgatcaccattcgttcctgaaagtcatagagccataagtaatcttatttacttaatcatatgtatgcaagtccatacaatgctctatatgccatacactactccgatccgtggagagaattcagagaggggaagatcgcgcatcagtccggccgattcttggcaggtcagttaagacccgccggtcctccaccgagccgcgtccccgcctcaaccgatccctacccggaccgagtcttgtgtaggatgcacatgacccggatactacccagccctctagtcgatcctttcaaggatccgactactaactcacatcctagaacccttagactcaaagtctaggatcccttaccttccttctcgaggttaggtcgatccgaccctccttctttattgccggccacagcccggcgaccgaatcctaagactatttattctcccaagagggagagagttttaatggtgagtttcttgtgttttcgttgtgttgtggtgtgtggaatggtcctgggcgcccttccttatatagggggcgaatggatgcttcccgaatcaacacatccgttccttgcacctttccgaagagttgcacctttccgaagagttgcgcccttccgaagagttgcacctttccgaagagttgtatctcttcgcccataaccgcccagctagtccgtcacacgtccagttacctcgagctcgtccgtcactcgtccagctacctcgagctcgtccgtcactcgtccagctacctcgagctcaaccgtcactcgtccagctgcccgagctggactgtcactcgacctgagtaaccgtcactccttccagctgagcttgagctttgggcgagctgacccaagtgatttctttacgatcctagcttagcctgcatgatttcccctttgtccgagcttatggccagctccttctcacttgtccgagactccaccttcttctctcggaccaagtcctagccaacgatcctattgaggatcgcgggcgttacaagtctcccccccttgaattggattcgtcctcgaatccgcaacaagttgatctttacccatctccttgaaccactccggaaaattggccttcagggagagt

SEQ ID NO: 6807 - DNA, 1449 bp, Arabidopsis thaliana landsberg
gctggctcttcttcttttaaatttagtatatgattaaattttacatctaatagatttcttttaaaaaaatatacgaatttagagtacttgtcaaacatataatcactaactcaagcacatgaagttttggtctctcaaaactttgaaaatcttaatcagttcctaaacattggcttctattgctcaattcccacatttctagattttgttttccaacttagcttaataataatcccagtattaatcgaatctagcttgctaccaaacacaacctcctttttttaagctgaaaccaaaataactcaagaaactgaaattttctattacattgcaaagtatgagttgaacatatgtattgtcaatataaagcatataaatccacagtaggaaaataacagccattgttggtcacattttatactatgttctcactgagaactctcgagtcaaaaactaatagaactgttccatgtggtgagaagttcgctaaatgacagcaaataaaaatcaaacttttcaaccgaaactgatccaaaacctgaagagccaaacaatgactccattataatcgtacacacatatatcaacaatgattaagctatgtaataattttagtgaactcctaaaatgctttataaatattttcttaatgatacctcatgagtcctcgctcaagattctctcagcaagtagtaaatcatcaggtgttgtaacctgcaatggatgagagacattattagcaatacatattgtatgtataactgcaaaaacataaccaaatattagtgttttgttaccttgatgtttgtataagatccttgagagacatatactggatgcttgaggtattctacattcgaaacgtcatttgttacctctagaccttcactgttttagatatagaacacaaatagtaatcagtctttttctattctaatccacacttcagaaaatcatttgaaggttcacaaaccttttcacaagctcgaaaccttttttcaatagctctggtttgatcacctacagaaaaagcatgcattgaagtggtttgaaaccaaaaatcaatcaacaaagcatgagtatactttaaaacctgtggtgtctgcatctcccatagggtttttctgtcgagagttttcatcacaagcgaatcagaattgacctgcatatcgcaaaatggaacaagtcgaaacggtcaccaacggtcttgcagttcacatcgatttctttgcaaaataaactacaaaatatggtgtacagtcattattttaaggaaaatattcgttggataagtacatgaaaagataggaggtataatatataaactattgcgcaaaaaaattataacatatattatattcaagttctatataagtatattactatgtttagaaaataccatttcacttcaatattttattcatattgcccttaattttggttaaacat

SEQ ID NO: 6808 - DNA, 2134 bp, Arabidopsis thaliana landsberg
gttctgtcaaaatagtttttgggtaatctcgatctaagaaagttatattgtcatatatttgtgtgagggccacataaagtttggttatgctttagtattatagcttttgttttttaaaaacactcaaactagaaattctgtttttgggtaaaaatggtaaagctaatggtttataaaaaaaatatataactttggaattttggttgaattaatcaattaggagtggaagatgtgatgactgattgtaaaacggggaaagtggtggtgaaaggtgagaaagctgatccattgaaagtattagctagagttcagaggaagacccaccgtcaagttcagcttctgtctccgattcctcctccgcctccgccgccggagaagaaagcagaggaggataaacccattgtggaagagaagaaagtggaggtaactttgtttttagtggtctaaaagctttcaccttctttattggtaaaaaataaaatcatatttttaatttgttgtgtttactgaatttgacattacaaccaaaaaagaaaagaaaaaggagttttttttcgttgctttttaggatattggtatgaatattcattttattctctattattctatttagggtacgagtcattaattaaattacttattatttaattaaaaagagaatattctctttgcagtgatttcacatggggtgtattggtaggatttggttatatcttatttgatggttttatgaacgtagaacttcttatatttgtgtatgtggaaatttgtgttaaagttatgattttattaattttgcggcgaaaattttggaacagcctccggtggttgtgacggtggttcttaaggttcacatgcactgtgaagcttgtgcgacagagatcaagaaacggatcatgagaatgaaaggttagttttcaccaaactttagattatctttcgttagtagttgcatcaaatttggtccatacaatttcaaatcaggatcatattgcttcgactttaaaatacacgcacacgtgttatttatttattttatacacaaattacattatttattgacagcatatgtaatgtttatatgattttgttccaattatatgtagtggggtcagtgtgtattcggtccttcactttgatagtatactaactgaaattttcttactcattgttgtttgacataaataatttgtaggagtggaatctgctgaatccgacttaaagagttctcaagtgacggtgaaaggagtttttgaaccacaaaagcttgtagaatacgtttataagcgaaccggaaaacatgctgcgatcatgaaaatcgacccaccgcctccaccaccacctgaggaggcggctgcggcagcggacggagagaagaaggaagaagaaaagggagaaagagaatccaaaggcgaagaagggaaggatgataaggcgaagacggacgaagaaaagaaagaaggggatggtggtaaaggggaaggcgaagcagcggataatggcggtggggaggaagaaggcaaagttgtggaggtgagaaagatagagaatccttattactactactattaccaaccaccgcgtgtggcgattccgcctatggaaatgccgccacacgcttatccgcctcaattgttcagcgacgagaatccaaatgcatgtactgtaatgtaacaaagaaaaacgcaaatgctataaagggtataatggggaatattttgaacaattttgatgaagtgggtacatggcatttgctgtctctcatagcatgtggtttctttctaatgtgtttgtgcagctcttttcttttaactgtaatttacattttaaaaaactcgcaacacgagttatttttaatggctatatataaacaataaaataataaatttactcttacttatcttgtagaatacatagtacataaataaatcttcataaatagctagaaaatcaaatatttgggagaaggaagagtatggtttgtttttttcatgcactaatttttttaagtttcttatacatatatatttatatgtggtcaatatcaacaaaattaaaagtcattgttgagtgttaattactaaagagttagttaagttactcgtgtacttgagttctaagtcaccatttacat

SEQ ID NO: 6809 - DNA, 557 bp, Arabidopsis thaliana landsberg
cttctgttttagttgtgaatgttttcacaaaatgccaaatccccaaaacaacaaccggatgaggaaaaaaacaaaaagaacaacccccaacttctcttctttgcaaaccgggtatcacagtgggacctacggggcgggctcccctcggcggagcgctgcagggcaggccgctcggacgggccgcggagcatgggtgctcatgggccacacaccgatgcgagcccaaggtggggaggggaaaggggaggcggtctggtgggcctaggccgggagggggaagaaaacaggtttttccttttctaattcttttccctgttatttctcttttgaactcaaaaacaaatctgccccaaaatcaaatttgatctccacaaacatttgcaccgaacaaaataaatagaatttagggttcaacatgaagcaacacttcatatccctttagggtttaatcttctagagcattgatacatcttcaaaataaatagtccaacctctacaaaatggaagagaaagaaatctataaagaaagaaaagaggaacacctgaatttgtagata

SEQ ID NO: 6810 - DNA, 1378 bp, Arabidopsis thaliana landsberg
  unsure (1)..(1378): unsure at all n locations
tcccccttctggcctcggcggccgcaggaagcacacgctacaagatgatcggatcctgcaggctcgggtcttcacgccgaaggcagctgtagcaccctcggcatcgacgacgtcttcagcaaagcccgacccagcctcaggcggcgccgcggtccaggggctcccccgggaatccggcccgagcaggcggctcaaccggttacccctggggcctccgtccaaccgctttccaagggcgccacgattctcgaggcctcgactaaccgactttggcgttggcccgctgacggacgacacggctaggctccggccaaccaggttccccattctcgagccaactccgcctctattcatactgatatcgctacccccaacctcggctcatcgaagggcggccgaggggtctctttaactaagctagaggagccccagacaacaaggccgatcgggccgagggattcctacgcctccgggatacggatacctcactcgtcaccttgacatggggcgactcatgcttggtaaagcggttcagataatcaacaggcgagacttagcgctcgaaaatgaggaaaaaacacggctccgtgccgaaattacatacatgttcaggccccgacagccacaatgaacaaacacactggcattcaaagtgccatcacaaacggaactccggttccgtccccgtgggtacgagcgacctcgggcctgcggggttgcgaacgccgtgagcgtcgccagtgacctctgcagcagcagccatggccccgggtgaacgcggccaccggaaggctcttgttcgtggtcccgctcaagggacacgaacaagccatcaaagccaaagagcggcccgctcccaagcgcaccggtagatctcgctgccgtccccgccgcgaatgcgaggaggaagagggcggaatgttgcatcctagctgggcagcaacagttcgccttccccggcatggctggaggacgtctccgccgcggggctgaagggcgaattgcaccaacaagaagctgaagaaagaggtggcccgccgacccatgcaggaggtagagccccggctcgcctcgctccccgccccagcgaggatgacgaacaccctcgacgctgagggcgggatcgagatcacagcccggcttgcctctccccatccaggagctggaggtcaccgtcttgggtgacaccagcggaggggtgcaccgggctgtgtgatgaaaaccttgaagccgaacgatggctgaaaggtaccaactcccacggagttgcgttcctccaacgacgaggcggaaagacggcggatctccccattcgggggcttgggaggtgaaagacacgatgcataagggacncgaagacatgatcgcctccaagggg

SEQ ID NO: 6811 - DNA, 4472 bp, Arabidopsis thaliana landsberg
  unsure (1)..(4472): unsure at all n locations
aatttaaagaaatgcccttctccttggcaatgggctgcgagacaacaatgggctgatgttgtcgagtgtgtgggcttgcctcgttaaaaacctctcttggaaaacccaatgggacaaaaccaagaggagggaaaaagagtgcaagtcacacacctccattgnnnnnnnnnnnnnnnnnnnnnncacaaccaacgtggtttgacaagcatcttgtttaagactgccctcaatgtgttgtagaagtgtagtgatatcttgatttagtagtctagtcttcgatcttttcattggaccattaagaacatgcattgcttccttttttgtagctccaagcagttcatcttcatgttgggtcgagtagtccatcgagtcattagattcaagctccctcaagtcttcaacagcatgcttgatcgagtggttgataactttccctccttcaaactgctccttagctccatgatccaagcttgtcattatctcatcagctccatgatccaagcttgtcattatctcatcagctccatgatccaagcttgtcattatcacatcatcctctcccagttgaaaaggatttgacctcaaatctgtgttgtctgcaataaaaggaataaggtcagcaacattaaaactattactcacattatacttaccttgcaaatccaaagagtaggcattgttgttgatcctcttgagcactttaaagggtccgtctatcctcgacataagtttggactttctctctttaggaaaacgttcttttcggagatgaatccaaaccaagtctccctcgttgaagatgacttcctttctactcttgttggcgtgcttagcatactgttttgttttctcttcaatgttcttcttggcctgctcatgaatctgttgcaccaattctgccttcttctttccatctagactgactctttcactcaaaggcaaaggcattaaatccaaaggagtagtaggattgaacccataaacgatttgaaaaggcgaaaatttagaggcagaatgcatagagtgattatatgcaaattcaacatgagatagacagtcctcccaagtctttaaattctttttaatcaatgcacgcaagagtgtagacaatgtcctattaacgacctcagtttgcccatcagtttgcggatgacaagtagtagaaaacaacaacttagttcctagcttagaccaaagagttttccaaaaataactaagaaacttagtgtctctatctgatactatggtcttaggcatgccatgcaaacgaacaacttccataaagaacagattggctatatgcatggcatcatcagttttatgacatggaatgaagtgtgccattttagaaaatctatccacaaccacaaagatggaatctttacctgtcctagtccttggcaaacctactacaaagtccatagaaatatcattccaagaacgcaaaggaataggaagaggagtatacaaaccgtggggttgtgacttagccttagcttgtttacaggtcgtgcacctttcacacattctctccacgtctcttttcatatgcggccagtgaaagtgatcttgcattattttaagagtttttgagactccaaagtgtcccattaagcctccaccatgtgcttcccttataaacagctctctcaaagacgaattaggaatacacaaacggttatcataaaacaagaacccgtcatgtctataatattttccaaatgcaaacttttcacaagatgaatatatcttttcaaaatcagaatcatttgcataaagagattttatatgctcaaaaccgagtaacttagcatcaagagatgagagaagaacatacctccttgacaatgcatcagcaactacattgtccttacctttcttatatttgatgacataaggaaatgtctcaatgaattcaacccaccttgcatgcctcttgttgagcttctgttgtcctttaagatgcttcaaggactcatggtctgtgtgaatgacaaactccttaggccagaggtaatgttgccacgtttgtaatgcccttactaaagcataaagctctttgtcataggtaggatagttgagagtagctcctccaagctcttcactgaaataagctattggcttcttatcctgcattaagacagcaccaattcctaccccggaggcatcacattcgatttcaaaagttttaagaaaataggaagagataaaacacgggcatgagtaagcttctcttttaagccttggaaagcatcctcttgagcttgttcccacttaaatcccacgtttttcttgataacttcggttagtggggctgctagagtactaaaatccttcacgaatttcctatagaagccagatagtccatgtaaactccttacttctcctacagattttggacttgtccatttcccgaattgctttcattttctcttcatcaaccttaactccatgtgtactcataacataacctaaaaagacaaggttatccgttccaaaagtacatttcttaagattggcataaagcttttcctttctaagcacttctaaaaccggttttagatgctcaacatgctcttctagactcttgctataaactaagatgtcatcaaggtaaacaacaacaaaatgtcctctataagctctaagaacatgattcattagtctcatgaatgtactaggtgcatttgttagcccgaatggcatcactaaccattcatataatccttgtttagttttaaatgcatttttccattcatcaccttctttcatcctaatctgatgatatccactttttagatcaaccttagaaaagatgctagaaccatgcaatttgtctaacatatcatctaatctaggtatagggtgtcgatacttcaccgtgatattgttgattgctctacaatcaacacacatacgccaacttccatccttcttaggtacaagcaacaccggaacagcacatggactcatactctcacgaatatggcctctctccatcagctcattcacttgcttttctagctccttggtctccacgggattggtcctataagatggtctgtttggcaaagaagatcctggaacgaagtcaatttggtgctcaatgcctctaatgggtggtaaaccttctgggttttcctcaggaaaaacatcttgatagtcctacaaaagaaacttaatactactcggcaaagccggttccaaagctgttatgttcaataaggtttctttaaagacaaacaagagattaggtttagtactcccctttggtttactctcggaagtcttggattgaacaacttaagatcctttctttttcatgctaagctgatctaagtagacttcattaggtgccataggtgccaaaacggtctttcttcctttaaactcaaagctatgtctgttggtaaacccatcatgcatcactttccgatcagattgccaaggtcttcctatcaaaacgtgactagcttccaaaggcagaatatcacataagatttcatcctcatacttcccaatggctaatggcacttgaacttgcttagtaacagccatttctccactctcatttagacattgcagtttataaggtttaggatgcggaaactcctctaaaccaagtttttggaccatagcctcacttgcaacatttgtacagcttccaccatcgataatcaaactacgcacttttcccttaatcaaacaccttgtatggaacaaattctctctttgcgcttgttcttcagctttatctagaacacttaagaccctcatagtcacaagtaactctcctttaggtgctttttcaacattagaatcttctagtttctcatcctcggactcaatctctccattgtccctaattatcataattcttttgttggaacattcaccagcataatgcccaagtccgtggcatttgaaacacttgagatctctagtcctcgtaactactttttccttcccttttgaactgatttcttcaactgtaggcttcacaaacggcttaaactccttttgaaaaccagatttctcttctctttggtagctaggtttgctagaattgtagctaggcttagcactccttctcttaatctgtttcttaaacatgactgccttgtgaaacaattcttcaaggttctcatagtgtatcacctccaaacggtctataatgtctctattgaggcctcccatgaatctagacattgttgcttcacactcttcttgaacatcagcccttagcatcaatgttccatttctttgaagtactcctcaactgttctatttccttgaactaaattcctcaacctttggtgcagctctctatggtaatgactaggcacaaaccttctcttcatgatattctttagctgattccaagtttcaattggatcatctccaagacgccttttaatagtaacaacttgatcccaccagcttagtgcataatcatagaatttagtggctgc

SEQ ID NO: 6812 - DNA, 967 bp, Arabidopsis thaliana landsberg
aaagccaaaactatcaaatattttttccttttcataccacccataagataggtctgttaagagtactccaaaataacaggggtagcgagattcattgactaggagactttcatgaaaactgtatgtttatatttatattaatgtaggttatattgcatggcaaattaaagggtttaaataattaatgcaacaaaagaagtttgcagagtgagatcgcaaacttttatgctttgggatcataatagcatcctaagggtttctctgtctctgcctaacctttcctttatagtttttttttctttaatttgctttaattcattccacatactattatcaaaagaagtaacaatgccattaacataactacaaaaaaataagtctcagatttgtcagtggtacagtttcattggtatattgtcccttaagaaagacagaaatcaaaaagaggaaaaaaaataatctaaaagctgaaaaaagcaatttcttctgtcattattcatcagtactttctctatttaatgtctgcagaattttactattttgttgttagtgaagtaaagaagagaagagttgtacagataaatattttgctttatgatgaaaaataagttaagatacaaaaataaaataaaatgcttctattctgaaatcagctttttcttttgtcccttagattctcacgcccttgtaaggagaaagtttgtaccttttcttgcatctacttgattgtgtttttcctctctatctatattcaaaaaaagagaaaagaaaaaaattattggtttagggttctaaagattgtgaagtcattttctggtctctttctcaggtacccaagcgatgctgataagcacctcttagcacgacagactggtttatccagaaatcaggtcagcctttatctatatagatacatacatcaatatttttttaatataatatggtttcatacttatcatacaagaac

SEQ ID NO: 6813 - DNA, 737 bp, Arabidopsis thaliana landsberg
tttattggggtttttgaagtttaagatgaaaaacatttcacaactgaaaacttaccccaagatgattatgaaatggaccagttagtgcgccagcattaccaacggtgttgtactttctgtagaagaatggtaaagtatcagattcaaatcaatacaccaagactcaagatgcagcttgtttttggcagtacaaaagcgagacttggagagcagaaagaaatgaagctaattgatccaatctgagcttttaccttattccattggaatgagaaaacactcctggctcacctacaataagtttcaaatcataagagactccgactatatgaagacctcaaccaggttacacaatctagcatttcacatttgtatgcaatttaatcaacttatcagaagaaaaagagagacctttcaaagttttacagaaattgtctacttaattaaatgaccatttttacagaaatcagctccaaattcgaaacttagagattccaagtcagtaaccaaacattagagtgctatcttcttccgcattaaacttttaagtatacaaacgaatttatcatgagcaatactaaccataattttcgtcacatcctcctccaatgaagagatttcttgctgctgaaatagaagctaacggcgccgttagatctcctcttgcgctactaacggcgcgtttcaaaagaaatctaggaattagagaactgaaacccgccattggagacggtgcgcga

SEQ ID NO: 6814 - DNA, 10149 bp, Arabidopsis thaliana landsberg
  unsure (1)..(10149): unsure at all n locations
aaaaatccaaatttcgaaaagaattaaacttgtctaaaccgcagacaatccgagataccttgcaccgagcctcagattacgtatcccatgaagaagaaatggaactactatccaaaagacacgagccgcctaagcaaacgcctcatagcgataaatcccaacttaatgctccaaaccacaaaaagggctctcaaggcgggacattcgttcaccatgaaggtcgaaatttctccggagcccataattaccaagctgatacgccccgaggccgaggacgaggctacggtcgaggacgcggatgagaatcctacacttggacgaaggatcaacccgcaggaaacgagcaggaatactatgagttgcataagagttacgaccatcatacttccatatgtcgtagcctcggagcaaagttggcagcaaaattcctagccggagaaatcggtggaggcttaaccatcgaggacttagaagcggaaaagggtaaaaccgagcaggtcaacgctgtggccaatcctgagcagacagcccccgcggcaaaccccgaaggacccaaaagaggccggggtaatcgccaaacagacgacgatgagccagaagctgctcggggaaggattttcacaattttaggggattcggctttctgtcaagacacgacagcatcaatcaaggcatatcaaaggaaagccgacgcgaatcataactggacgcggccatttaatggaccaaatgacgaagtaacctttcacgaaagcgataccaacggtttagaccgtccacacaacgatcccttagtcattacactgaccatcggtgatttcaacgtcgaacgagtcctagtcgacacgggaagcacactggacatcattttccttacaactctgcgagaaatgaagatcgatatgacgcaaatcgtgccaactccccgacctgtgctcgggttctcagtgaaaccactatgactctcggaaccatcaaactaccagtccgagccaaagggtaacaaaaatcgtcgatttttctgttaccgaccaaccgaccgtgtataacacgattatcggcacctcatggctaaatcagttccgagctgttgcctcgacatatcacctatgcctgaaatttcccacaaacaacggcgtgaaacccatccggggaaaccagaaaaatgctcgtatctgcttcatggcagcgcacaagctcaggaaccccgtcagtgaatcgacggccgatgcgaatcataagaaggccaaacttggccgagccaaagaaaagtcaatctccgagcagttatagcaattaaagaccgaagaagctcgggaatctacgataccaactcccgatccggtcatctcaatttgccttgacgacaaaaagcccgagcgatgcgtagaaatgggcggagatctaggagaagaactaacagctgaactcaccattttcctcaaagaaaacgtcaatactttcgcctggtccccagaggatttgcccggagtaagtgttaacatcgtatcacacgagctcaacatcgatccaccttttaaacccatcaagtagaagaggagaaaattgggtcgggaacgagcagaagccgtaaaagccgaggtagaaaagttattgaaaatcggatccatcaccgaggcgaaataccccgactggatcgcaaacccagtcgtagtaaaaaagaaaaacgggaaatggagagtttgcgtagatttcacagacctaaacaaagcttgcccataggacagtttcccattaccacacatcgatcgcctcgtggaatcaacttctagaaacaagctactgtcgttcatggatgctttcgctggttacaaccagaacatgatgaaccccgaagatcaagaaaaaaccgctttttacacagagcaaggaagtttttgctacctatcaatgcttcgtcggcaaaattttttccttacagatcggaaagacaatggaggtctacattgacgacatgttggtgaaatccatggaagagaaagatcacgtgacccacctgcgcgaatgtttcaaacaactaaacctatacaacgtcaagctcaatcgtgcaaagtgtcgcttcggagtaagatccggcgagttcctcgggtacctggtcacacatcgcggcatcgaggcaaatccaaagcaaattgaggcattgttgggaatggcctcacctcagaacaagcgagaagtgcagcgcctaaccggaagagttgcggcccttaaccgtttcatctctcgatcaaccgacaaatgcttagccttttacgatgtgcttcggggaaacaaaaagttagaatggacgacccgatgtgaagaagctttttaggaactcaagaaatacctagcaactccacccatccttgccaaacccgtaatcggagaactactatacttgtatgttgccgtattagacactgcggtcagcggagtgttagtccgagaagacagaggccagcagaaaccgattttttacgtctcgcagaccttcaccagtgcggaacctcgctatccgcaaatggagaaacttgctttagcagtcgtaatgtcggctcggaagctacgaccttacttcgaattccattccatcgtagtaatgggatccatgccactccgcgccatcttacacagtcaaagccaatcaggacgtctagctaagtgggcaatcgagctcagtgaatacgacatcgaatatcggaacaaaacatgcgcaaaatcgcaggtcctagctgattttatcgtcgaattacccaccaaagaagctcgggaaaacccactcgacacaacttggctcctacatgtagacggctcgtcatcaaaacaaggctcgggtgtaggcatccgcctcacctcgccaacgggtgaaatcctcgagcagtcattcaggttaaacttcgaagctaccaataatgtggccgagtacgaagcacttgttgccggacttaatctagctcgggggttaaagattgaaaaaatccacgctttttgcgattctcagctcgtcgcgaatcaattcaacggggaatatacagctcgggacgaaaaaatggaagcctacctggttcatgttcaaaagttagtaaaacatttcgacgaattcaagttaacaaggattccacgaggagaaaattcatcggccgacgccctagctgctctggcctcaacctccgacccgaacctgagaagagtcatcccagtggaattcattgaaaaaccaagtattgagctcggcgaagaagaacacgtcctcccgatacaaatcagcacggatcaagatgacctagacgaatgcagcccaaagtggatggaacccatcataagctatatatccgaagggaaattgccctcggataaatggaaggctcgtaaactcaaagctcaggctgcacgtttcgtcttaatagggaaaaaactttacaagtggcgattatccggaccattgatgacctgcgtagaaggagaagcgacttgcaagatcatgaaggaaattcacggcggttcgtgcggaaaccactctgggggaagggctttagccgtcaaaataaaacgccacggattcttctggccaacgatggtcaaggattgcgaaaaaatttcaaaacgatgtgaaaaatgtcaaaggcatgcgccgacaatccatcaaccagccgagctcttgtcatcaatctcctcgccatatcccttcatgcgatggtcaatggatataatcggacctatgcatccctcgaagcaaaaaaagttagtcctcgttctaaccgactatttctctaaatggatagaagccaaatcttacgccagcataaaggacgctcaagtcgaaaacttcgtgtggaaacatatcttatgtcgccacggaataccgtatgagattgttacggataacggctcgcagtttatatctacccgtttccaaggcttttgtgataaatggggaattcgacttagcaaatcaacgccacgatatccccaagggaacggccaagccgaggccgcaaacaaaacgatcctcgacggcttaaagaaacggcttgatgctaaaaagggctcgtggtccgacgaactcgaaggcgtgctttggtcgcatcggacaactcctcgccgagccacaggagaaacccctttcgccttagtatacgggacagaatgcataattccggccgagatgatagttccaagcctacgacgaagcctatcccccgagaacactcctgataactctcaaaggctcctcgacgaactcgatctgattcataaacgaagagattcggccctggttcgaatacaaaattaccagaatgaaacggctcgtcattacaattcaaatgttcagcaacgaagattccacgaaggagatcgggtcctccgaaaagttttccagaacactgccgaaccgaacgctggaaaactcgggacgaactgggaaggaccgtacttaatttctaaagtcgtccgactaggagtgtatgagctagctgacttaagcggcaaagccgttccaagatcatggaacgcaatgcacctaaggaaatactacaactaagtccgaggtgactaaacttnnnnnnnnnnnnnnnnnnnnnnnnnnnnnnnnnnnnnnnnnnnntcgtcttcggacgagttcagctacccccccccccattaaaaaaggggggagtgggtccgtatattcatactcccatttttattatcttgtaggttttcgaaccgaaatatgaataaaaattcttcgcaacattttattcggctaatacaatgagcgacggctcagagtatccattacgcctattcggctacagcgcgctatacaaatacgaggtgaaatctatcagattatttctgataagaaattttcatcttcagaaacccggttatacttttaacaccggtatcccagctcgttcctaaacgctggtcgagaagtgaatatgatcgggtcgcaaccgagaaactttcactttaaaaaaaaaaataaaaaaaatatcaatcttatactagtaaaataaaacggttcgcgactaataaaccataacttttggatttcaaaaagaaacttaaattggataaagccatccaggcacaggttctacatatcatcggataaagccatccaggcataagtattataaccgagcataaagaaaatagagaaaaacaaaaaccgcctcgggtccctaatcaagatcttcagatggacggttatccttggcaggaaggagcgatccagcttgatccgtatctcccaccttgtcgactagtgattcgaccgacctatgaccacccggactcagaggagcaaactcgggagctggagccttgagatcatctttcagctcggcgatgaagcgattgagattagcttcagcatcggcgaaatctttcaaccctttgtcaacttgctctttctctctctccaaaactccgccaccttcgagtgcctcgattagctgcgcgttggctcgcgcctgagacaaatacatgaatcggtcgttgacctcatcaaggagcgacactttgtgctcggcagtttttatcttggcaatgaaggttttggaaacctcccgcctcgtcgtctgaatggcccaagccacctcgctatcacgaagccctctatcctccgataacattcgcttgagatggacgatctcagaattcgccttgagattctgctcggccatcttgatggcattttctttgttcacgaaggccatcctctcaacctcctccctttccaacttcgctgcggcaactttggagagtgccttgtttttctcccgctcgacaacctgaatccgagactccgcctcggctaacttgccagccacctccatgttgctccgcatagccgaatcatacgaatgtaccatccggttcatcaaagcgacagcataaaaaaggaaaagttagatttataatgacaacgccaaaagcgaattatacataacaaagcacataccctcaaaaacagagatgccgtctcggcatatttctgagattccagaagagtatctggaggaggaagtaagggaccaacgcatcccccgagcagattggccaaggcagtgcgatcttcgaagatcgggagtactttctccgcctcggagccggatgtcttctttttcttcttcttcttctttgacgattcatcgtcaacccgaacgcgcttactcgccgctttgtcacttgcaggtaacgccacaaccgctttgggtgcagcagcggatggctcggctccctgagcctcagcgggatcgaccccatctcgagacgccttgggagcagtctgcggcgcgatagcatcgggaataaaattcccatcttggatcgcttcaggatcggcccgcggcgagatcaatcccgtattaacaaggcgcctctcttccgccaatcgcctctccttgtcctctttcttcttggcatagacctcccgcaaagtaagtttcgtcgattgcatgtccacgaaaaattgagtgcgatgatcggaagattccgaactagtgggacaagaaacgccgtgaagaagacgaagcgcacgctcaactcgctcccgagaaaaatgtttcagccaatcgcaccttggagccgacaacgcgtgaaaagccgaaagaaaatcgtctggaatcggctcgagaaacttgagagtgcgttctgcaaaaggaaaactgcaattagagaacgaaattaacatcacctcgggtactaataaatttctaactactacccaaaattccccatcttgtcagaacagtcccgaggagatcttcatgaatagcatcttcaatggctacaaagaagaagtgatcggtatatggctcgtctttgctcgggaacccatcgataattttctttcccttagcgggggaaatgtagtaccggtccgcttcggattttggcacccgccggatctcgagaaaatttctcagatgagccagcgttatctccgtctcagactcgtaacttcgaatcaaaatcccgagcagatgtctcaaagaccgcatcgtgatctgggaaagagcaatctgatacgatgtcacatattccaagaccaatctcgggatcggcaaccataagaaacagccgtagaagaatccctcgtacagagtatagaaacctgcaggagaactgtcggctcgctcttcagggctcggaacacgcaaggttacagcaccaagaccaaatcgagccttaagatccgagagagattgctcggtacacattgatgaaccgggaggatttggcattaccgcctttttcttctttttcctcttcttctcagctttctcgaaagccttctgctcgttaagacgcaagatatcctctgtctcattcgggccgaagtaaagaaaatcctcaatcttaactgtcggcatgaggggctttgacgcatcttgccaattggatgtcccagcttcatcgaccgtaggagcagaagacctccgaacaagaggcggctcgggatcctcgggtaaatccaactcccgagcgatgtcggcgttggtgtcttcccgagccgtgaagggagtcgtctgctcgggggaattcgatgaagaaacagtatcttcagaagaccaaactgatctccgtttatagatcggaggaagatcgtctggatggtttgaatcgctagaatcgacaggggacgacggtgattgcgaagaactcattctcggctcgggacgttggacgagaagggaaacaaccggcaaactagaatttctatcccggcaaaatcaaaaataacaagaagnnnnnnnnnnnnnnnnnnnnnnnnnaaaaacgttagaaatatcaagatcaaagagaagtaaacaaaccttgtttattttcttcgaaaacttcaaatgaagtattgaaggagtggctcgccgtatatatagagtttttcaaaggcgcgtcggatccgctttaaacattcaaaacgcgttcaagcgcgtgggctcggcagaagaaaaagatccgcatgatcctcgggaataagcgagaaacgtttccactcctcaagaatagtcggcgacacgcgacagaagtttgaccgtccgagaagatgaagcgacagaactagaagacgaacagtccgctcggaaaaatccattcatgtagctcatcatctttctgctaagtcactgagctggggggcaaactgttgggatcggattccacccaggataacgagccaaccacaaaacgcctcagagatctcgtcaagaatccacaccgaggcgatgtcgagaacgcttcggagcagtctcatgaaatggtcccccgacccgacctcgaaacgcctcgggcataaaacctggcaaatcgtcccgagacgggctccaagacacctcgggaatctgtcctcgaataccgcggactgagcatcccgagcacgatccgaggccagcttaatcacggctcggaagagtctcgggttagacgaggaaaacttcaaaagacttagccggcacaagttcaaaacacatcatctccgaaaacccaaaaatagataatcttcgaagatatcaccggatacagaaatcccagaatcctcggaagataaaaacaatctccaacaagataaagataaagaggaatcttccgagaatatcgcgagaggtgatagtctcggaccctataaaagcaccccagagaacaaacaaaaggggacgtacaaaaaacgctctaaacttcaggctatcaaaaacgctctgactttgaaggcaaaaacacctatttctcatattctaacacacttgtacgataaaatcattattttctcattaatacaatcaagaacaccgtccgcggtaattgagaattctgttgttctttgagaatctcacaaagatccattctttgaagaaacccctaaaataaattctattgtgcgagttttgactctcacaaacttcgctgggaatttttggctggctttgtagcgatctgaaataaaaagaaaagaccataagagtagatacagatcgccgcgggagtaagctgggatatcgcgaaacgacggcaagagaggaaagaaataattaaagacggaatcgggcaccatagatggcactgcttgaaatacgcctcatggaactagacatagccctttgggggattccgtgggtggtcatctgttccgggaatcatgtctgtaatcccgtaattcacaaaaccacaggaggtcaacatgtcgcgatagagcgctccgtggaaagggtcggatttggggtgatcttgtcgttctaagcgacgatcgggtcaagattgaagtcaacaatctcaatcgggagtagcttcgcttcaacctccggcttcagtatacttaggatgaccgtcgtactcgtcttctatatcgatgatgcattcaaatcgatctaagccatccaccagttcatcatggggaataatcagatttccaccatcttcttctcgatctggctcatcccttaacgtcaggatctcaatctgattggctcgactagactgggcctcatctcctcggctttgaacaaaccgagaattatgacgaactaacataatagtctcactgtcataagaggaggaggagacaataacagccttacccatggtcctgaagttgtcaaaaatcaacgaaagcacaaagaacagaaaatagttcgtaggagaaagagcaagaactaccttcgattcttcttttgcaagcggcggaaagtgaagaaagaatgggttgatcgaatttatatagaaggcaatgtgcggcagacctacataaataatcattagacctacaagacggttcggttgccaaactccacgcgtgcgtgcggatgctaggctatgacacgtgttggagacgtccgagaatatgaaacgattcagaaatctaatgtttaattcacacattcctaagttataaacaaaagattgacttcctaaattcagaagttccggattaaagtattcggatctcccgaactgggggaggcctaattgttggtgcaagaattagcacctccgacaatagcggcttaaaccggaggtattgtgaataaaatcgagaattcgactaaaccggtgtacctcagttaacctaccaaagcaatgaggtcaacagccgatctaattcagcagttggagatcgcccagccgacttcctgaattaagaaaaagaagactccc

SEQ ID NO: 6815 - DNA, 10559 bp, Arabidopsis thaliana landsberg
agtgttgatttctcctggacctggtaaatattttggcctctgaaatttctcctataattatatgctggagaagtggataacacttttcttgaatttgataggtacccctcaagactctgggatttccttgcaaactgttttggaactcggaccacttgttcctttatttggagtatgtatgggtttgcagtgtataggagaagcatttggaggttagttgcatataaacaagacatcttattttcccgtatcagtgttcaaacatggttttgttctttattctatgcatccacagcttaaatgcaattttgtttgaacattgattaggaaagattgtgcggtcaccatttggtgttatgcatgggaaaagctcaatggttcactatgatgagaaaggagaagaaggcttgttctctggattatcaaagtatgaatcaaaatcaattttttttgtgtgttgtctaatatagttaatcataagtctgtaaaaatgtgtaataaaacaaatctggttggtttcagccctttcattgtaggtagatatcacagtctcgtgatcgaaaaagatacatttcctagtgatgagctcgaggttacagcatggacagaagatggtctggttatggctgcccgtcacagaaagtacaagcatatacaggtaaaacccgcacaagtgtgtactgtaatcttattgccccctccattcaaaacagaactcttgaagtcttgtaaacattgttcacagggagttcaatttcatccggagagtattataacaactgagggcaagacaattgtccgcaatttcatcaaaatcgtagagaaaaaggattccgagaagctgacgtagactagcctgaatgagaaaatctgctgtgttcgaatagtgcctccctgtaataatatttgccaatgcaaaatgttccttgccatcttcccattgtttctatcataaaaattcgacttgttcctccacttttacttaatttgtgaaatgtggaaagcagaaagctatggttatttaagcatgcctagcgacaaaaattgccgagggtctttcagtttttatttggttcctagctaagcacctacccaaaatgtgtctagtacttctttcactacaggacgaacctgtaaaggccagatagtattcataatggtgtaagaaacacaacatacatgagatgagatcagatatcacttttcgtatatataagatatgtatgagatatgtactccataattgggactaacttagaagtaaacgcagaaacagactaacttatatgagatatgtactccataattgggctaacagtacatgaaaccatgtcatgctttgcttaaggatggtgcaagtgaacaagtgactagaacaatgctttgataaatttactagcagacgacaatgcaagaaacaaataaggtacctaaccatctcactgacgaaaagtaagaaacttaaaccatgacaagagtaagtttgagaagagaaactaaaagaggagaaagataacatggaaatgtaactgagaattgactagcagtcttgagaactgcaaggaacagaaaactaaacatgtctttctttccttttgcgctgttggttgacttgcactaaactcggaaggtaagtagacgagcagacaagcgggggacgatatgtagtcggaatatgcccggttctgggacaaggttccccgacattgggagctactcctagagtcacaggtttaaagaatccatcctttccactgataaaagcggtgtggtaacgagcgctctcggtgcttaggtatccgtctagatcgaaaaccacagcgactttctcatcctcgtcaatgaagaaggtggcacccatatcattgtcaaaccgaacaccagtgagtgccaatggtctcatatccactgtcaaaaacttgctccaggacacagagttgggctcaatactagtagtaacccaaaactcaactgtggtaaaccgatcatcactgtgaagaccctcattatgatatagcaccgcgagctgctggtctctaacacaagagagggtcacagtcgcatcgatagtagagtgaaacggaagaggcagacgcagaccaaatgtctctgttgtaaaatcaaaacagagtaagaaatcttcaagatcgattatgtcgccatcttcatcaatttcaccactgctgctatcctcatgcgcaaaaaagtaggtatttcccttcacagaaacgccgtagaggggatgattagggtccatttccccgttgggagtgacctcgagaaccctccatgaattagagcgcaagtcgtagatttcgtacctgtaaacggaaacgtttcttgtctgcaccatcctcaagattttgtggttacggttgatgtcgtatccaagagcatagctgtctcctatgttggattctgttctgggtctgatccatcttgtttgccccaaataagggttccaaaccacgaccctcgagttgtccttagccacgcataacaacaagccgtcgcagtgatacactctagatatctcgacttgattaagcaaatctacctgctttatagatagatccatcgtgtcttcttcttcctccttgctgcgacggagatggaatctaactgaacagacctttgaatccatcgtcataaaccccaaaaactgcgccgctgctttacccagaacccgatctttggttaaagcgttccataatttgcaagtggatcgcaccgctctcagagatgttatcggaatcctcgtgaggatcttctcccctaccagcttcggtggaagatcgcacatactcgttctcttcggttgaagatcgcacattctcgttctcttcggttgaagatcgcacctcctcctcctcattcttccaattttcgaccacaattgaaaattagggttctcctctctcgtaagtaattagggttcttctctcttaatacgtatcctaatacgttataatgtacaacaattataaatacgagtaaaaaaataaaaataaaaaaggagaggaatttaccttttcctaatgtgaaaaatgtatccaagtcaaattctttttcgttttaaattattttattatttttattagttctgttccattttcttttattttcagtttcaatatgttaaattggtacagagtaaaactattattgaactacaacttaagtttcaattcaatttggttttggaacagtttgatcggttaaaatgtccctatgattagtacctaaaatagtttaatgttacaaattttactgtattcacaagagtaatgatcttccattgaacaaacaaaaatcccacattggtaccatctttggataacgaatccaaaaagaaacagaaacgatcaaggcttttgcgggatatggttgacaacgagcacatactcttcagtccatggtaaggtgacgtgctaagtcagtgtgcagtgcatgacccgcctgcatttgaaagataatactattgttttcttttctcgagaaaactataagatgttttttttttttcttttttgtgcaaactataagatgttaagctagtattatttaccttatatgcgactatgtgagccacggggagtcctccatttccgccccgtgaaacaagggagaggtcaccgattaggtcaagaatcttatgtcgacatgcttcatcatcaaaccgcagaggaggattcatccatccatgctcagcgctgcattagagacagtttcagttgaatattgtgtccctttagtcatcaatatgcaagattatttacctacaaactatggcgttatccagagaacctcctttaatgagccctgcttcacgcatacgctccacctgcaaacaaaaccctcagacacagatggttgaagaacgaacaccagtttactgattccaaagctcctaagcaacaacaatggatctaactaacctcttcatagacacagaaggttcttgatgatgcgatatcctttgcaaaagaagactcatggataggtctccaagaaaaccattggcagcctatagcaggcacctgtaaagttcatcatcatacacaacagaccaagtcaataacaatttatgtacaagcagaaaataagtcaaaatgccattagactgaacctgtgggaagtcgataccacaagtgatccgagtctctagagccggaaatgcagcaacaaaagtatcgttcttgcaaacatacacaggcttgttcacatgtgcgaccatcttctctacactttcaccatcatggttttgagccgcgtttatgccaactccttgtatcgcatcgacccattctttagctgatccatcaaaaatagggacctgtcacttggttagtgttgcctacactcatcatctcctccagtgtaccaagtctataaaactaagagctacactgcacagcaagatgttgacaatctctatagcatacaaatccagtcaaaatagacaatacgagacattgattcgacctatgattactcaaaatgtatgtattcaggtaacaaacctcgacttctcgatcatcggaactttcgctctcgatttgaatcctgcaattatcaactcccttcgcctcaagagctgataacaaatgctcaacggttcggattttgagctcatctttcaacagcgtcgtgcaaagaggcgattcctgagcaaattcaatcgacgcagggatgaatctggatcgaaactcgaagaacctaccagctccggcgatctccggatttagcttcaccgtcgagaacttaccggagtgcagagattttcctttcacttccacagatcctgcgagagtttgctgtaatcgtccactctacagtattgaaccccaagacaaaaaaaacacactcaaaatgattccaatggataataaagtcgcatatacatgtaagcgtgtgcgggagagaggtttactggattcaaggagactgtcggcgacgacgcggcggaggagtatcggatccaaatgacgagaaacgacggcttagtggctttgacggtgacggggagtctcattgattcaacgtctgattaattttaaccatgcccggattattgatttaagtaagtactaggatatactaaaccggaatcaagaaacaaataatgtatagtaaaccggaatcaaaattcatgttatgcaaatatcccaattgttccaccaaaaaccattttctttgtgtgatgcttttctcaatttcacataatctccatttttgaagtcttaatcttctaattatcatcaaatctacctatataattaaaaggagaagtacaaagtaaagaatgcctaaaaaatttagaaatattacagcaattgcctctaaattatggcataaagaagcgattaattgaaattgagaagaaaacttatcataattgaaaaatctgatagttgctccaagatccacaccaaacactatgatcattcgtccctttttcttttgcctgtgataccttggtagatttgagtcaaacttggaacataataaaacatacattacagagatgatccgacttcaaaacccacttgtttcactttgttgtcctctccaaaaatgtgtaccgtggtttttccttggtctctaatattatcacaacacacgaccactctcttcttctcgtcgaccaagaaacttccgctttccccaatacaacgtttaggctgcaaatccaaagctaagaccatgctccacgacaccacttgtgtctcaccaatcttatttgtcacccatatttctgcctttgatttaattccgcgttgcgataacatggaaagtttctcttctctaacaacggatagagccagagttgcataacaaggatacttattcggaagacatagacgttcaaatctttctgtcgtataatcaaaactgattaagaatttgccaagccgtttctcttcttcaccactagcaatccagtaagtctttcccttcaaagacacgccacgaccaatataccctaatttgaagtccaaagtggcatcaataatcctccatgaattggagttaatttcataaatttggaattcgtggtcgtagccaaaaccagtgtgtgccaatatattgtagctattattttggtaggatccgagagtatagttgtcatataagtcatgggttgaatccaccttgtttgaccagtacacgggttccataccgcgagccaagtattgtcctccttggtgacgcagacgcataacaataagccgtcgcagtgagagactttatatatctcgaattgatcttgatctagacaactaggatatttagggttgattagggtaaattcaactgtgacctttacatgtggaagtctatggagatcgacactcatcgagcgtaccctaagccctttagacatgtgaatcagaaactgctttgggcctttatccaagtgttttcttgtgaatctcctatccttgaataaacagttccatcctttgcaagtagaccctaactgtttcaaagacatagctggaacgcggtagagtatctcttctaacaaatgctctggaagttccgacatcattgtcgtttgatcaaatgttggttagggttttgtatagtacttcacgtttatataaatccatgctcaggcgacgaacaatttaagttacttttacggcaagtcaacactctttaattcgtttcctataaaaagcgtctttcttattctcttcaatcttcaatatatgaaagagctgaggaatatggaaatgaaagacccgaaaaaatggaatatgcacattatgacaaatcactatgtaaatgtttgatttacttagtgaaaagtgcaacatcttaacttaataaaattatcttataccatcttaactatttttttttagttttattttcttttaggattatgcttcgtttaattaaattgttcacactgtaaggttggactgaattcatagtatatatttataaaaatgcaaattcttacatgcataaggatgaggagagaaaataaatcacaatcctaatggaacccataaattacgttaccaccctttaaacaaaactatttcataacaaaagtaaacatgcgttgtgaaataatgatatgataggcatatattaaggagtggtattagaataaagaagcgattaattgatattgagaagatagcttatcatagcttatcataatcgaatttagatgttgcattgtggtaccaaagtggtggtatatattaccttatacatatcagcatttcgcatgaaccatatatgagtattaattaggtgccatatgcagctagtctttctactacacgccacagaagtaacacgtaattaattatgtgtatcggtttatgtaatgccgtaaactatgtgtttaatgtgtccaatcacgtcttatcatctatagtatgcgtttgttctttttgcattatatgtgtattaattaggtagacactgagattcgtatgatacgttcaaccgaatcgcataactctatatgaatctaaagtccacttactcactacaattaatagtttatggtagctgttgatgcacgaatcacacaagtacgaaaatgggatctctagggaaggaagaatctttctattaaagacgagcctgcgacttaggcgaattggacggattacaaaggatgatttcttcaacgagcatagatggagtaagaacgagctgattgtagatgaaaggcgagcttgaggccggaagacgaacttgatgtccgaggaagaatagagtttattcgttttatagctgaaccttgtaaaaggttgcctacgtacccttagaaagggatcaagccacacgtagttcatattagaataagtgagctaggccgtcattggaggtaggtcggcaggtagttgacgagccggcaaatgtgcgacgagctggatgaaccgtggaagagagacgagttggacaaaccgagttgtttgctgaaggtgtagacgagctgggcgacgagataggtggactatgcagtcaatggacgaactgccgctaggcgaggaggtagatgagttttgcagtcgagggatgagctgatagctagacgagttggacgatctgactagctgacagctaggcgaggagatggtcgctgagtgatgggaagagcttgaagacgagctgaggagcttgatgacgagctgaggagcttgaggacgagccgaggagcttgaagagcttaaaggcgagctgaagagtttggcgatgaggagcgagctaacgagcttcttgagaagggcgagctgacaagctactttagacggacgagctacttgagaagggcgagacaagcgacttgagacggacgagctacttgagacgggtgagctgacgagctacttgagacgggcgagctgatgagctgacgagatgcttcggacgggtgagctgacgagctggttgagacgtaccggctggcgggatacttcggaggggagagctgtcgagctgcttgagacgggtgatctgtcgagcagcttgattcgtcccggctggagggatacttcggagggcagagctgacgagttgcttgcgacgggcgaacggatgagctacttgaggcggaccggctggcgagatacttcggacgggtgagctgacgagctggctgagacggtcgaattggtgagctacttgagacggaccggctgacgagatgcttcagacgggagagctgacgagctggttagacgggagagctgacgagctggttagacgggagagctgacgagcttctctttgtttgtaagtgtcctcctggaatcccctttgacaagacatgctattccgtatttatagccttctgcgtgtagggcattcctccagggttttgacgagcctaccctcttgacttaacattctgcttaggcctttgacttggatttgggccttgggaaaagcaagcccaaatctaacccctaacatctatatcttctatttttcagataaagctcaatcaaattaaagctacgtaacaaggtggtaatcctgtaaatttcgatttttttgcaaaagttttacaaatagagtgaaatatatcatttacagtagacaagaagaccatgttggtgtttcaactataaagatcgactcaagctgttcgaagtttgttctacagtattccagaggtgttgagtttcttacgatgtaactccataaggaagcaatgcagcagcctcgatcctgccttcctcattgagtatgttgtaagttgatgcagcatttctctggatagatcagagcgttaatcaataagcacagaaaaatactccgaaccaacagagcaaatacttgtatagttcaaaggacatacagaatcaacagtttctagcttcatgccgattgactttacgaactggcggacttggggattcagtgggtgggtgtatcttccacacccgacaatcaagagctctagagattgttttgaaaaaaaaaaaacagaaaaaggagagtcaaaaaccactgatgatacacttcaatatgtgcaaaaggtttttatctttttagccactaaaaatatggcgtaagcaaacgtatcatatagtttctaacgatcctggaacaaagactattgtataaggaatgtggaataaatcaacttacaaaatgctaaaatgtatagaacctggaattggtcgaactgtctggaagattgacaagctgcatccatgaattagacatgtaaattgtttagcaatgacacattaacttcaaatatttcagaaaacaagtagaaagagtccagaacattagatttttggtcctttttttggaaccagtcaatccccgaaccgcattataaacctttcgtacaaatatttcgactttactcagatctttatagggtacacaacatgaagaagtggaagaggaagatacctttggtttaggcgacgagactagcagaagcttttccccgtaaaagtcctgaaaagctatgagagagaagaagtaatagtaaagtgacggtttccaaaatcttggctggtgataatagaacaccaaagcttggagacacatcgaaatctcaataaagacttgacaggtaatcttaagagtatattaatctggaggtcgagaggaatgtaaatctgtgtcgttttcggaccaaactttattgtcttctttttaagattgctttttctctctacaaaaccctataaataatcaaaggaaaaccctacaaaattcatagttttatattttaaattagtatttgataaataactgtaaaagtaatgaaaaaatagtgtttgaaaatataatgattgaatataacttaatatatatattgataactaccttgtttttgagttattatttgaaaaacaaggtatccttgagttataattaagaagaaacattccgtaccatctttgtttggagtatccttgatcagtattatctgtcattttcaggagagtcagaaaggatccgctcaaccatatgattttaagctggaatatatgaatggtggtgcttcattcacaatacaaaatttaattttttgtaatagaattaaacataat

SEQ ID NO: 6816 - DNA, 1248 bp, Arabidopsis thaliana landsberg
cagagttattgactttgtaaatgggtttttggttaccgctgcgagattgaagggtaaagctggagcttcttcatactctgctgcatctaagtcctgaagatgagctcctttgaagaatctagggaggagatattgtcgtacggggattaagaacatgatcattaaagggaacatgactcctgcgattggtatccatgtgagaccaaagcagatcaagagataagtcgtttggaaaagagtaaacattgcaatcgtcttgaatggaacggtttccacgaatgtcgcgtggtaatcttcaagaaccctacaaatagaaatgtgaccgaactgagaaaaaagagagcctttttgaagttgaatgtgagaaaaagattgcaactttagttattacttgaagcggcgacttggggcggtgaacagaagtaagattctttcccagaattggtttccgggtaagctttcgatggccatgaaggcaaaatagccccaaaggactgatgttgggatcattttaaggataggcatagctgcaacgcatcctcctaccattgtagactgaagcaagttgcttacccgttgttctttgacttcaactggtagtaaatcatctatttctttctctatgtcgaacagagtttcatcaactggagcattgaggtttccggtgaatgtagtagcttggattgtcgattccttgagctcttttagaccctgccaatggaaagaactaactctcagtttcgtgttctattgacaaaacatagaaagtttttcagatttttttttttacttggggttgctggtatactaatggtgtctgcatgtgatggtaagcttcttgcatattgtcatagagttgacccaaactcgcatttgttttgatacttcttcgtgctgttgcgaccagtctgttacgaagcaactgcagagagagagcaaacgtcaatctcaaaactcaggaaagactgaaaaataagaccgcggtcagtgatgttacctggtatttaagagttgctaagctcttggtatgcattggagattgaggaatgacaccgtttgatggagggactccaagtagaccacacattaatgtctgcattcacattcttaagtatgaaacagggtccaaaagatgaagtcagatagataattcttttattttctgcaaattctcaccagaaacccaagaagaagcaagtcatagtgggaaggaagacggtttttctcaaaatcaattcttttctgctt

SEQ ID NO: 6817 - DNA, 537 bp, Arabidopsis thaliana landsberg
ttatactcattcgagtacttctttgacaacaaaagctgtagatcttctattcatcagtacaagcctgggaagactcgatacgctcatttccgtcaaggcaacactcttttagcagattctggttggcattgcagtttctgtttcaggcacatcagtgagtttatattcaagatgaaagcgtacagtcacaatgaccgggtcagattctctcattatctaaacccaaaaagaatacaagatgtgatctgtaaaggaactgatctgttcgatatgcttcctgaagagtatacgttcagggaaatcatcgggaaactaggtccaatcccgcggtcttattccgcagttcatctaccagctcatctgatagaaaaagctgagagttacaaatacttgttacctgggaactgcataagggaaagtggctgataagggtttgttcttatcagtctttgtagtgttaggtaatttggtggggaaacggcttattatcagtagagggagtgtggaacagagaatggtacagtttcttgggactcg

SEQ ID NO: 6818 - DNA, 503 bp, Arabidopsis thaliana landsberg
cgtgagatcagccatttgcggtatgatacattcgattatcggaggtcagccactgcttattctcggtgttgcagagcctactgtgattatgtacacattcatgtttaactttgcaaaggccagacctgaattgggacgagacctgttcttggcgtggtctggatggtgagtttttttttttttttttttgcttataagagtgatcagggtgttgaaaactgtttgaaatctgtgtgtagggtttgtgtttggactgctttgatgctgtttgtgttggcaatatgtggagcttgttctatcatcaataggtttactcgagtagctggagaattgtttggactgcttattgctatgcttttcatgcagcaagccatcaaagtgcgaaccctttagagcaagattctgcactttctatattttaacccaatctgggttttctaacgcattgaccataaaagggaaatagttgatgaattccgcattcctgaacgagaaaatcacaa

SEQ ID NO: 6819 - DNA, 630 bp, Arabidopsis thaliana landsberg
cacacaccatttttaactttcataattaaacctaaaataacatttttttttgtataaactatagcataaattaaattcagttaatgataaaataaatatattttgtagcaatcattctattttgtaatttggtagggctctttaaactttgattattatccaatttttattaaaatataataaaatctcaaagccatgacccattcctttactcaagtatcaatgtctattgtctataaatattacataactcttcttcttcaaccaaacattgaaacactttgtctcactctctctctttctctttcttgtaccaaaagctttttgaatctccaagattatagcaaaaccaaagataaaatactaacttaaaagatttctgaaaataatgagttgcaatggttgtcgagttctacgaaaaggttgcagtgagaattgcatcctccgtccatgtattcaatggatcgaatcacctgaagctcaaggccacgccaccgtcttcgtcgctaagttcttcggccgtgccggtttaatgtctttcatctccgccgtaccggaatctcaatgccctggtacttaaaaacaaaaacctctcggtcctttagatcttcgtctaaacgttgtcgtttt

SEQ ID NO: 6820 - DNA, 2329 bp, Arabidopsis thaliana landsberg
  unsure (1)..(2329): unsure at all n locations
aatgaatcaataacaccaaatcatggcacgtggagcttactgatgaaatcacgacaagcatgcatgtcaggataattttcaaactcaaagatatgactccttccctgtaataatcaaagacgaggaaacttcagtgatacacctatcaatattttttagccttgagcacaaagggccgaggaaaaacaacctgcttgctggtcagattgagccaaggaggtttatttgatccttctttggtatatttctgacctgagaaatttaacatggcacaataatcatttagagaaattattcatgataaacctgaatgaacaatatggataatcaaacacttacttttgatgttgtgagtctgaactttaagcttcaaatctgatttaggatcatttgggacaaagagcagcatcaattcactctgagaacaaaaattggaagatcctttgagaaaaaaaccattgactaaggaaacaaaaatagaaatcatatagtggcaaagagttaaagtattcttactaattcgagggatccaagagttcctggatccttcacagagctcttgtatttgactcgcttctccattgatatatgcccaaggttctaaagcatggtaaaattggtggattaagtttgtgagccggaggaggtaaggagtgtcgacggcggaggaaatatttgaatctggcggaggagaacggctagcgtcggcagatcagacaaaaatagctaaataatttgggaattttgttaattttaagttcgagagataatgaggtggttagaaccacgtgtacgagccgtgatagctcaggtcttgagatggttcaacagttcacacccgaagttgatgaggctcaagagccacgtgtacgagccttgtttttaactgggcctgcgatcgatagtagtgttgttagcttaagcccgtatatgtatggcccatttattgtctcgagctaaaagtcgcaactttttttttattgtttttgagtttattataggcagacgataacatttgtgttattaatttcatgttaggaggacattggtaattttcgcttgttttttgtgtttggtcaatgaataattttttttttttatggagccgtgacgcaaatggggcaaatgcaatcatgaatagcagccacaataaaattaataaattgatcgagtacatatgtcataagataaatggtcggttttggatatgtaaggcgccggcattaggtggtatgactccacgtatcttatcgtcgatgcattggacggctattaaataatcactctccaacataaaaattccaaaatcacacttcacacattcttttgtcatgtcatgaggcttaatgggtcggtctttttttttagtggctagtgattttagctgatgtttcaacattttggttttaagtgtttctattttgcagcttaaatatacatataaaaataataatttaaagattgaaggtcctcaaatcgtgtaaatgtggatttttagtttgagaaagtatctcacatgagccttttttatcattaattacttaattacagtgtcaaaatgattgataaggagttggaaaatactaggtggtaatcaagatggcccttggatgctacaagagcgtagggccatagggcccattccagaacaatatagcaaccactaagcatgtttttgttttctttaacattgtcttttctatttggcaattagtacactacttacgttttgtggtaggaacaaataatttgtaatctttgcacaaaccagtgctttgtaactttgatgatagaaaaaatttattcactagttcgataacaattatcaatcatcataaataaaaaaaagttagtttagacgatcatgaagagagaaaaaacagaattattggtactatctcttaatttcccaactccgtaggtacactcattaatcattatggagaatgtcatagtcatggtacataatgaatgtgcatggtgcttatggtacagatgttcttaacttcttatcctggctggcaaacgccagatcatctcaactggagtatcatgttttgttcgtaacagttagtaactaaccaaattagtgacaatcatgagggattattaaaaacagacattgatctatttttgattagaaaacattactgataaaactacaaaaatagctggaatggagcattcaaaactctgtccaaaatccaaacggttaaattatcactgacccaatccaataattagatttatttagtaagtatgattactacgaagataacattaacaaaactttatgttattgtcaacttgtcatcatcgnncttatttt

SEQ ID NO: 6821 - DNA, 839 bp, Arabidopsis thaliana landsberg
ggcttgttggtgagattgagccacggaggtttatttgatccttctttggtatatttttgacctgagagattgaacaaacacagtgaaatttgataatgactatgcagctatcatcataactgaaatcgtttatcaacacaacatctattatccaataagcaatgttaatgagaaaaggtacaaacaatacttttgatgttctgagtaagtactttgagcttagaatctgatttgggatcattagggacgaagagcaacatcccttctctctgcaaatttttcgattttgcaaaagaaacagttaagctgagagataatataactcaaataagagcgaaaagtgtaatcttcatacaattctgagaaatccaggagttcctggatccttgacagtgctcttgtatttgactagcttctctatttgcccaccagccatatccaactgtagaaacggtggttctctgtttcccagtcgatcaattcatcggaaatcaagcgaaattggaatctaggtttatactatagaacgggaataagtatccgacccgaatcatgacccaacttactgacccgaattaaactgctacggcccattatgattggtcatgtgataaaatgaacaaaaagtcaaaactaattaggggcatcaaaatgtaagattcatccttatgtcgattttcatctgatcaaagaccggtgtgtagatatccgaccaagctttcttgagaggagagtaccggttcggtggaacggctacttctctaaactgaactttcccatcagacatttcatgagccttcaaagttcaatggcttaaacattggcttaaccgtcatagc

SEQ ID NO: 6822 - DNA, 1484 bp, Arabidopsis thaliana landsberg
cagacaaaagagcaagtttcacccggtcgacattttgcttctaagaacataaagttagttaacaacctcgttatttgtgcaaatcaaccaagttctgagaatgtaaaaatgtacctcatctttgggatatataaacggcgatttgtagctcaagaaagctgcgatcgagagaataggtgataagcaaccaaatattccaccgtataacagcatctgcaaattatcaaacatatattcatgatggtggaaagaattctatgatgcactctctggttatcaacatcaacaaccatgttgaaacctaggcagcaattttcttaagaatatgaaaaaggacacatgatgagatgaggcaagatgttgtgaggagaggaataaaacatatatatgagagtcagtgaccaaggcctccaactcggaaattttagtgcaacagtaatgttactgacgcaaacctttccaattaacacatcaacaggaagtttggctaaatgatgcccaagtggtgtcaactcttcatccccttcaacagcaccaacctaaagacgacagggttcacacgagaaagctcaggacaaaaaaactctcaaaggtatgcaaaactctctacttagttgatattccatcaatcggaactaaaatgagggattggaaagcataaagtataccctaaggctacaatgtaaagaagataaatcagccacactgcaggacagcctcaaacacatcagctatatgtccaagtgacaggttggatgtaccaaatatgactgatcccaggaacttagagttctacagaaagaaaagacttatatccattacatattacctcatgtaacaatgaaatcgcagaggtcatagcaccttcactcggaggttccaaagcctaaagacagtgtgtaaattagaatcagatggatgataatgttctttgttttatcagtaaagatggtgtcacttgccttggacagaaaaggtttaatgtgacccaagccaagcaatttgatttgtagacataactctactaatggcatccgcagcatttcaggaaccttaaaaaaagtgtggaatagatgagttaaatggctaaaaccaagtgaacaagtgaccaggaatggacctattgaaaacacctgatagggacgcattagcttctcgaacctatagcgtgtgtacaatgaaaagcaaatcccaggtttgacgcgtccagctcttcctgttctttgtcttgcatttgcttgagatatccaatcttccaccatgctcgacagtttctaaaaagaattgaaaatcaaactgacatctcagagacaaaacacaatgatcacgaggcaatcatgctgggatatacgacaatgtaattaaacagagcctatatatctagggagcttttggtttcaatatggagaactgaaaagtaatttcaagatacaggctaatagatatatcaaaataacggacaccaattcttaaaaacaggttca

SEQ ID NO: 6823 - DNA, 1080 bp, Arabidopsis thaliana landsberg
ctcaggagtttggtaacagagtctctgtcttggaaaaattctgcatcacaaagtgactcatcttcatcacttggtggggtattcacagcatattttgtagtccaaggaactccatgtctgcctagaatgtaaccaagaccctttaagtatctataaacctcgtagttttcccaacagcagccatattttccctccgctatttccccatacaagtccttcaatgaaatcactacgtcatcctcatcacccaagagctgcaactctccaatttcactcaaatacctgcatcagaaagaagacaattcgaaaaaggaagaaacttcatcaggtgatttgagtaaacactgcaatctttaaaaacaaacttgtaatgtttcgtttgccacatacagagcctcttctatgaagcaatatgtttttccggtacggataattccagttgtcgtccaaagtttaccccttttgacctcaacttcggccattcctaaatcctaattcagcattccaacgagccttggaggatcctactctataatttgcaagcacaaaaagaaagaaattgattgtaagaactaagaacaattagcttaacacggacaatcatatcctatcctgaatcaagtctctccacctgaattgtaatttgggagctggaccaccaaattgatattcttcgtcatcatagcatagtaaaccagcttcgttttcactcagcggagaaccttcacagtctttctcctccatagctgctgagatcagtttcagtcgttcaagaggaaacgaagtcgctgaggcaattcgtcgaacacttggcgaaagggggaaatatattttgttaaagtcttcaactttcgcaggccgtacgagaattcggtaacagagttactccctgcgaatgaattattcccaacggggagacgacgatcatcggaagtttgatttcccgttttgctggagacgagataattgcaatgacgtttaatggcagaatgatgacgtatctacttactttgtcggaaaagtttatatgggccgaccaaattactaagcccatcgcataaacacccaaataaaaaggag

SEQ ID NO: 6824 - DNA, 452 bp, Arabidopsis thaliana landsberg
agagacaaatataattaacaaattcgaagacaacgataagtcgataaccgagagaacagtattataattataaatagaggtaagaggagacacaatacaaaattcagacccactcgtctctcatcactcacactcaatggagccatcaccgtcgtccccaccatcatcaccgccggagattctcgaccttgactctatcaaagctctcaaaatcctcggtaaaggcgccacaggtaccgtcttcctcgcgcacgacgtcgtttcaacctcttcttcttcttctcccttcgcggtcaagctcgtccccaaatcctctgcttcctctctccgccgtgcacggtgggaaatcgaggtcctccgtcgtctctccgttgactctaatcaaaacccttttcttccacgtctcttagcttcttttgagtcaccggaatactttgcttgggccgtccctt

SEQ ID NO: 6825 - DNA, 458 bp, Arabidopsis thaliana landsberg
cgatcgtaaaaaaagtcggagcttttctcggttgatctcgccgacggcgtgagaaaaacaaaacagggttgaagaaaacaagatccgctcgggttaacccaattaatcgccggaaaacgagtttctcctccggtgaacgttctaactcatttgttggaacggacgagtacgtctcgccggaggtaattcgcggcgacggtcacgacttcgccgtcgattggtgggctcttggcgttttgacatacgagatgatgtatggagagacgccgttcaagggtaagagcaagaaggagacttttcgtaacgtgttgatgaaggaacccgagttcgccggaaaacccaacgacctcactgatttgatccggcggttactggtgaaggatccgaatagaaggttaggttgccaccgtggcgcggcggagataaaagagctcgctttttccgcgggtgtgaggtgg

SEQ ID NO: 6826 - DNA, 641 bp, Arabidopsis thaliana landsberg
aaaaaagatcgacgtcttgttgtagtgtcgtcttccgaaaaaactacgaccaaacgctgttgttgcggcggaggagggtgtggtggtggtggtgggtgtggaggcgggtgtggtggtgggtgtgacgccggttagaaattaggggttctgtatagctatatatattagtgtcattataatgattgtgtgtgcgctttttttccctcgtattgtgcgtgcgatttaagtgcatgtgagattcaaatgtatgcatatattaactaatctatgatgtgatatttatctctaaagctcaccaaaaaaaaataaaaaatctcacaatgtgcatctcgtccacagtccaattcgaaagcgtggaatcgcggccaaagattcgctagtggtcggcttcttggacctccaacaatgcttatttgtatgtttaccagatacagactaaatttaaatctatggtttattagtactcttaaatcatttctagaacgtaactgaattaatccacctacattattaaatgatcgctaattaatatcattatatagaacaaaaaaaattatgttaattcttattacttgtaatcaatataacgtgattcccataccaatggagtttctgataaaataggggatcctctagagtcg

SEQ ID NO: 6827 - DNA, 1146 bp, Arabidopsis thaliana landsberg
agattaagaatacgagcaagtcacatgtagcgttttatgtttgttttggattcaaaaacgttttgattatggttgttgctgttgttgctgttgtcattggtgtttatctctgctgattatcttggtttctccagtttcaaacaacagtaccaaagagttgcttcatgcgcccggctggtgctattcttgctcccggggaagaaattatcgcaactggtatttgcttctcttgtatatatgtttgctaaggtacattttgagcattggcctcgaggattatgtggtgactgtttgtttctatgtcttgttgaattctttagttttcaagtttgttgagcctcctgagaataatgaaaagccgatggaacaaaagagcggggttaagtttaaaatcatgagcctgaagatgaaagtcccaacagactatatgcctgagctggtatgtgaaacttttagtaactaccagtcataaaagaaaagagaagacaagttttttgttgttggattctaagaagtgtggatgctcttgtgttttgcagtttgaggagcaaaaagataatgtctctgaggagcaagtaatgcgtgtggtattcttggatcccgaaaaccctaactccgtgagtccgtccgcttcttcttctttttctggttcttatcgccatcatttgtgaacttgattgggatcattttacggctttaagcaattctagatatcactgattctttaagctttgttacttctctctttacagatgatggagaaattgaagagtcaattggctgaagcggatgctgcagatgaagcacggaagaaagcatcagagggtattgttggtccaaagccaattggagaagggcttgtgatcgatgaatgggtgagagacgcaatgccattcttttcatgccttactcgtcttttttttatgttttgttttataagacaacaaagaaagtgtgatactgatgtttactgtgtttatcttctgtactaatgaccagaagcaacgccgagagagatatcttgcacaacaacaaggaggagtagactctgcttgaaacttaaagaccaccaagaccaaaaagtgtgtgtatgtgttttttttttttaggtttgtgcccagtcaaaatgtgttgtgtgatgagata

SEQ ID NO: 6828 - DNA, 1180 bp, Arabidopsis thaliana landsberg
  unsure (1)..(1180): unsure at all n locations
ctctctgaccaaatcaccacccaaaataaattacattatttattagaaaatgtatatttagttaagacatataatatattttttaaaagaaataacaaatttataattattattttcaccagcaatttggatgtaacagggtcaactcctgcaccacctgatgcgaagcaaacaccagttctaaggtcacttggagaattgaacaacttacgataagctggtaaaatcttcttgatccctaaaccttcagctgtagtaataataaacttactatatcagaataatattattcataccatatgattttctaagctatgcaatatgagaaaaattaggaaatacaaagaagcattgtaaaaaaaatgataatataccaactatatcagagaaaactcttccatttccaaatcttcctgtcgcccttctcatgctgaaactccttccatatggccagatatttcctttcataaaagtcaggagaaaattgttgttgccagtatcgagaattgaatctccaaaagccaaaagcgcaggaaatgatccattcacagcatctgttgatatgaaataactggaaaataaagttaacactaatgttattttactacacatatctaaaagtctatatttttttctaccacagtgtttagactctcttatgttttatagagaatttaattagtggtgcttctaagctcatgtcagtagtaaatatatacaagtgattttctaagtatttttagacgtctagtctttgttgtctaaggaagccaaaaatgcatgaaagtggtgggtacacacaggatgaatgtcagcatgttttagctaggaagataataattaactccataaatcaaatctgacgaaatgtagacaaataaaaaaaataaagaatatgtagccgctttacaccaaacaaaaagaaaagaaaacaagactttagaatgaatgatatatatgatgatttgttttgtaaacgtcaatggtttcgtcatgtagattcacattcatccatgtactcgaagaggccctaactacagaaagttaagttgtgtagtaaaaaaaataaaacaacangaaaatattaattttatttaaatcgaatacaattatcaaataatacaaacaagatgagataaaatataatcaatcattatgccgtgaaaatagtttttaattc

SEQ ID NO: 6829 - DNA, 979 bp, Arabidopsis thaliana landsberg
ttcttatcgtaagttatacattgctccaagcgaccttaaaacgggtgtttcttttgcatcaagtggtgcaggagtcgaccctgttacatccaaattgctggtgaaaaaattattgaacttgttatttggttaagaagtggtatatattctaactaattcgggtgtttgtttgatcagagagttttatcgccagctgaccaagtaaaagatttcaaaggctacaaaagaaagctaaaaggtgtagtaggcaggtcaaaagcaaaaaaaatagttgcaaattcagtgattcttgtttctgaaggaaataatgatattggaatcacatatgcgattcatgatgctggtatgcgattaatgactccgaaagtatacaccagtaaattagttggttggaacaaaaaatttataaaagtaagatggagaaaatgaattttttttattcatcaacactgttatatatgtgtttattcacatttttttggtttttgtaaatgtatgaaggatttatatgatcacggagcaagaaaatttgcggtgatgggagtgataccattgggatgtttgcctatgtcaagacttatttttggtgggttcttcgtgtggtgtaatttcttggcaaacacaatctctgaagattacaacaaaaaattgaaaagcggaattaaaagttggagaggagcatcagattttaggggtgctaggtttgtctatgtcgacatgtacaactctcttatggatgttatcaacaatcataggaaatacggtacgtaaatacgtaaatctcctttttataaaaatatatgcattaccaagatcaatacaaaggaaccacatatttagtgatgcttagacatttgaaatctcaggagcgaccataatagttaggtattgtgtacttgtatggtttcaggatttacccatgagaagaatggatgttgttgtatgcttacggcaatagtaccatgctccaacccagata

SEQ ID NO: 6830 - DNA, 751 bp, Arabidopsis thaliana landsberg
  unsure (1)..(751): unsure at all n locations
taaaatgattttgaaaagatatacaagaaagtcaataattggtttgtaaatatctcgtttaacaaccttgagtgtattgttncaggtcacgtatcagactgaactttttctagacaagaacaaggattatgttattgctgagcatcaagcgttgttaaatgcttctacatgttcatttgttgcaaatttgttcccaccagtatctgacgattccaaacaatcaaaattctcctctataggtacccgtttcaaggtgagtctgattttggtctccactttcatcttagcatgttttaatctttatttcttaatgttactgatttcatatttatgcttttttgcagcaacaattggtatcattgcttgagattctcaatacaacggagccacattatatcagatgtataaagcctaataatcttctgaagcctggaatctttgagaaccaaaacgttctacagcaattgcgttgcggggtgcgaatgacatctcttttcggttatatatcaagcttctcctaaaaattattaaatccccaagattgattgtattttgggtgtttttctgacctcagggagtgatggaggcaatccggattagttgtgctggttatcctactaggaagcactttgacgagttcttgaacagatttggtatcattgctccacaagtgttggacaagaagtaagatgtctcttcctcatcggatagccttcaatgcgaggttattttcaatgacttgtcttgctga

SEQ ID NO: 6831 - DNA, 662 bp, Arabidopsis thaliana landsberg
ctaaaggaaaaaaatgatagacagactccgcttttaaggcctgacgccaagattgaaaatcggcttcaaagcccgcagccaaacagacttggaaaattctttcttctaagtctgcgtcacttgaaaagggtaattcttctagctcttgtcggctagatacctgtctatttccataatcaaactgaatttctaaacgaatccgattatcttcttccctgtcaaagtaaaaagagggcgcaaaagttttgatttgtagacgttctggagctgaaacggtgcccatctggataaaaagagtcagacaggaggccaatttgtctcgatcactgctatcaaattgcaggtatttctttccttgttgacccacaggtaacgctttaatttccttgagaagacgcatctgctggtctgttaaaaaataaacctgacctttatggaaaagtactgctccctgataaaagacattgaccctaggactctcactgatttccatttcaaaataatccgagtattctgttactgcaaaggcaaatagattggcatcagcatgcatatcctgaaaaagcagggtttggtagctaccacttgatggcaaattgaaaatggggcaaggcatcagtaaatcacacctgctcaaaaaaggtcagagggaaaagaggtgc

SEQ ID NO: 6832 - DNA, 1399 bp, Arabidopsis thaliana landsberg
  unsure (1)..(1399): unsure at all n locations
gcacaacgatttcaagtcccccggaaaaaagctatgtccaccattagtctactgaagtatcaagtatcatctactgaagtatcatgctcgttttcctaannnnnnnnnnnnnnnnnnnnnnnnnnnnnaaaaaagctatgtctacctttactgaaggatcattatcatgtgacacagggattttaagtcccccgcaattaagctatgccgaccattactgaggtatcatctactgaagtatcatcttgcttttactaatggtgacataaggattttcagtcctctactaatggtgacataaggattctcagtcctctgcaaataagttatgtcgaccattaccgaaggatcatcttgcttttactaatggtgacacagggattttaagtcccccgcaattaagctatgccgaccattaccgaagtataatctactgaagtatcagtatcattttaatatatgacttaggtctatgtcaatgaaaagaaactcaaaagtagtaaattcaaaaagttgtggaccgggaatttcttggattttataaataaaagaagactttctaagtttgaaaatgaaaaatgatatagattataaataattcaaataaatcacaacattttcttgaacccaaactaacaaagtggatgagataaatgaaccaatgttgatagagaagtaaaaccagttaaagaaagaagcttttctaactcgttccctcgggtcagtatcatcaaactgatcagcaccaaaagatgatacacatggtttgatacctccagtaccaagagcaataaggtaaagccctgtaaagaaaacggcatactgaaccgttgttgctggtgagcatagagccgcagcaacaccagcacatgccgctggcttaagacccggaactgaagctgagagtgtcaatgcaaccattccctaaattcaacatcaaagaacagaacatcaagccaagaacagaacataaagcaaagttatttttcaagaaaatgcttacggtgaaataaatggcagagaaacaagcaatagtccaatatcttccccagtaagcatcagctattaaagctccaataagaggagtgatgtaacatgttccttgccatgtcatgacatgtctagctgcagaaacattagtctcatgcaattcatttgtgaagtaagtgattagattcttggcaatgccataataagccaaccgttcgcagcattcgttagctgcaccaacaaaagcatagatatcaggttttggagattaaagacagaacatgagagaatacaccaagtacattacaagtgaataaaacaaagtgtttaccaaaaatgaatggacaagctttccagtttcagtagaatgcttcaatggtgggtttccatgaatatctattgaaccatc

SEQ ID NO: 6833 - DNA, 3698 bp, Arabidopsis thaliana landsberg
tgcgaaagttttatgactagttaacaattaggtacaacaacggttaaatcgaaaatgatcaaaaaaaatataatttataattatattaagtattaaaacattaaatattatattattattgtaagatataaaataatttaactatagttaataataaaaattatttaaaaattctacataattattcaaaataaataaatttttacgtaaaatgcttctttttttgtggtaatgcatttgggacacaatgactcccgagtttattatatataaaaatttgtctaggacacgtattcacagtcttgttatcactaacaagtgtctctaaaattggcggaacataatcaaaatgataacctagctgtaaaaaatagcatagttaattatcatttgcgagttaattagctttcttatacacatgagaaatccggacaattcagtcccttgaatatataccgtcatggcgcaaacataccaagaaagacagcggatgtggcatgtcgtgagaaatccaaccgccacctccgattaacttccacttccaaaaagttcgctttcctctcccacgcgatgtacatgtcataataaccccctcccctcctccccccacaattctgccaagagagccgaacaacgaccaatatttagagtaaatccttacacgaacctccagctatatctcggataacttcaccaacttcatccagcccacactcggtgccacccaccctatcattctttccactcgttgtctggtggactgcctctccttattagccaaattggcaagttatacaataaaattttaaaaatcaaagttttgttaagtttaatttaacttaaaaattttaaacccacaagggacggatcttaatcttagtataacataaaagaaataattaaaaaggtctttaacaaaaaaaataactaaaaaggtgatcagagaactttgtggccctaagttaggagtaaccatttcaagacaactttgttattttcactctacccaaaatacataaaggtgaaacaaaagcagaggattttcaacccacaaagtcatgaaacatttggcttccagttccaaactgatgatcctgagtctgcgtttggataacattgtccacaccacgcctaagctctaacgtgagtgacacgttccctctattgaaccccaccatgtccatgtactctaacctcgaccgttttgtcccggagaggcccgttagcgtttgttcatggctcggactgctaacagtattcggtctatttgatggctcaatgttgtgactagtatctgcatttttaattgctctggtctcaagtgtgtgtatttcttccaccataggtttccataatcgcacacgggcgtttatgaaccaatttgatacctttaaaaaaaaaaacgaaaccaagtcagcaaatcttgtcaaaaaccaaacctaaaattaggtgaagtctatactaaagagtttttgcatgtgaggataatgagacgctctttgtcctgacatggttcatggtggaaatgtttgaaaaaagttaatcttctatttacacgttgaacaatttcagtttttagttacacatgcacttgtctttcataaaatctagactaattctatatatgcatgctttactttaacatataagattgatgttatttgagagtaagaaattctaaaaccattaggttattgtcccatcaacatgctttaaaccaatagaagaaaacaggaccggccaagagcaataattcaagagacaagcatatttaaaggtttcaccaaacaaagaattacataattgagctacctggttacgagagagaccagtttgagtggctagcatctgcttatcagaatcagtggggtacttaataacagtattagcaataaaggatatgagaaatcacatcaaaacatcatatcaaataaaatcaaattacatcaaaaaaattgtgaggctttacggatgaagaaaatggtcaaagagccatgctctaagaacagccactgcacgttcgggcaatcccctttgaggcctccagatatgttgttgttgagattcaaacccgacattgttaccaatcaaagatctttgcctcttttggaatcggttgttgttgttaccgtttgatgagtgacttgagatttgcttcacatgttcagctattgcggttctaagggccttgaaacttcgtgaagtccgtttgagagccaacgagatatacggtgttgcggtgtttagaccagccactgtattgaaggaagacataactgtttgcaactgatgattgtatagtttgtaccacttgcaaaccttttcaatgtcacaagttataacatgttagttttgtaacgaatctatagattaaaacatgactgtgtaagaatatagtttcacaaacctcttcttgcagaaagagaagttttgctttctttagtctattcttgggttctaatggctcagaagaactactaaaccctgacaagttatcatcatcatcatcatcatcctccatggaagtagattcacttctaataatctttgaagcataagagatacaaaactcttctaacattttctgagccggctccaagaacctcgaactcttcagtatcgatgcatatcccgtgaaaggcccgagcgggccgtgaatattcattgttgacaaaacagctgcatttccaacgtctctagatggagggatatcagacaaaagtgagagtggaaagcctttcttattattagtatgagaagtggcagtaacattcactggtccgtggttccagttgcttgcattgtgcgcaactgattgattctccaaacttgggagaaacgaaaattctcctcggtaacttccagaagaagaaccttgatcataactgctccttaaaatctcattaccagtacccgaacaagccaccgttacacaacccttttgattatcatctagacaagaaacttcacttctcctaatcatgctagactgaggaatagagtcccggccgacataaagaggacggtccaatatttggtttcgagaactgaaatgatcggacaacaaatctgcaacgttgtttggcctaataccagcctgatcatatccgtgattcacggtactaggttgtgacaaatcactgattctccaattactagggccttgtgggtctctatgtatcgactgaggcatgttcataaaggttgcggcagaatcttgatacaaatcggtttgaaccggtacggaaatctggttctgtaagataccaatcaaatcaaggttgttgggaattctgatgttctgatgctgctgctgagtccaagtgttgggaaaatcattcatttgctcaactctaaacttatctcttcggatttgttgaaaatctggttttatcatatccatctttatgtaccttttgatattctatcataagaaattaccaacaaattaaatatgcatgagttccatatatatagcaaattaattaataaacatctgtaaattggaagaggttttttttatgatcacagaaaccacaaaagcgagttgtatgaatggaataatcgtagactgttcaaaaaaaatgaaattcttactaacatgaacttaaagatccaaaattaaaaccaggttacaagaacataaagattcatgcgaccgggaccttttagctaacataatatatgcattaatttct

SEQ ID NO: 6834 - DNA, 1386 bp, Arabidopsis thaliana landsberg
gttatagcttattggacaagaaaaggctagggcttaattcctatcacgtcatatatgaatttctcaattgcggcaaacgaagatccaccattcttcgtagctctctggatcatctgcgagatatccatcactcgtttcctcacaacattattatccttgtccattacacaacgaatagcggtctctatctcgtttgcgtttactatctcatcactatgtaccctgtaatcaagcttcagctccacagctagcttcagttccttcaccatcagaaacgcattgagttgttgctctgcatacattggccatgtcacaattggcacaccaaaccacaaactctctactattgagttccatccacagtgagaaacaaagcctcccactgccttatgggccagtatttctacctgaggagaccaaccacatatcattccacgtccatcgacacggtcaaggaacccctctggcaaatcatcctttgtcacctcttctgtacggagtgaccagaggaatctgtattgacatagctcaagtccatgagctatttccttcactagagaacctcttaaccttgccatactcccaaaacaaaggaatacaaccgatgcctcgggttgatcatcaagccatttcatcaactcgtcacgacgggttaggtcctgctctggatgaggctgggctttcaagtcaaatatggggccaacagcataaacagaaggataattctgttcttgaagaaaatgattcacagagtaaggctcaatatcaaaggagctattcactaggattccattggcctttgtaaacaatatggccagcttaacgtaagcatcataaccatcttcaacaaacagagctgacggcagaacattggctgggacagggtttacaaatccaggtatcgacaacatttcttccgagtttcttacaaaaaccgatgtatctctactatgtcgatctgctagatactgcatcatagctaagaacccggaatttgtagtcaagaacacatagaaagggggacttatatctttagcaacgtcaatcatagggagacagaaaaagtcaacaactaatcccttgaccttaactccatccaatgcaagagaagttaaaatatccatgactatattcctcacaagagggatatttctctcaataacatcatacacataagcttccacagattgtgtactaccaagtgtaggtttctcctctaactcagggacatcaatgaatctaacaaacggttgagaggaggcaattgatttaacataagtgtctagatgagactgaccttgtagtttcatcaagaggattgtgatacggatcctatcatcttgctcaatgagacgcctagcaaattcaagaaacggaacaagatga

SEQ ID NO: 6835 - DNA, 2777 bp, Arabidopsis thaliana landsberg
ttctttttttataaatgcttcaatataatatcaaattaaatctatatgccttgttgctaatttttgtttgttaattttacagaatgagctcttattttctgaaatcgactacatgcagaaaagagtaagaaataaatcttaacttaatttctattcttaatatgttcttataataattttgctcatttgcattgcaccgattaagcaggaagttgatttgcataacgataaccagattcttcgtgcaaaggtaaaagtacacattatatatcaatttctataattttccctattgtttcaataaatattatatgaaaacgattaaaatggtgaaagtacttgtagataaatagtttatgacatatatttgtgtaatgtagatagctgaaaatgagaggaacaatccgagtataagtctaatgccaggaggatctaactacgagcagcttatgccaccacctcaaacgcaatctcaaccgtttgattcacggaattatttccaagtcgcggcattgcaacctaacaatcaccattactcatccgccggtcgccaagaccaaaccgctctccagttagtgtaaggacacaaaatcttgctccgatcaatcattctagtcttatattattaatcggtccattttgtaaaacttgacagcatggatttggtcttttatgctgttttgtaggtaatattggctgaaggaaatggcctggagtgaataaaaaccagaattgggttgagcaagcaatataaagctaatgcatgttatatatatatttatcccatgaatgttgtatcagtgaattctatgcttatgttgatgtgaaattaatatcttaaagacatgtcattaatgtgcttaatttgcttcaaaacatctatgtgtataagtgtactattagttcaattgttgtatttaattaccaattcctgctctattaatgattttattatagaaaagtctcaatatgataatgatatatattcatgtgctgagttccatcctcctcctccttctccccatgtggtacagttgcaaaatgtcgaaacattcgttcattttgtagctgcctaccaggaatacattcaccacccggtctcaatatctcgcgtcttgctcggtgaaaacacatacaagagtattaaccatattttctttaaatgcacatacaatagcttatctctgcctagcttcatttcgtaaaccaagagcaaacattatgggatggctccatacctgttctcaataaatcatggtcataatcaagctcattttcctagcctccggttactagattttgtatggaacgcaacatccatttccatccatgcccggtccaacaatttcttttgcaagggacaagatatagttgttattgttcaagaacctgactcttatgcacaagcttcctcttatcagaattcgccatttaaatcaacttcagtttctttttatatccacttactagaaaagtgtttgaccaattaaaagattgatacatagtaataactaataagagaatcagagatccaaatgaatttagtcatctataagaaagcagaaatttcatgtcattatatagaaccatgatacataaactcaacaaaacaaacaattcttctgcagcaaaaagaaacaatcaccaaacacttaaataagaaaaagattaaatctgtctccctctctttttcactctgtgtttgcttggaggaaatttcatgaactagagccgagcaagctgctggatatcataaggatgagcatcagaagcagattctctctgaaaagatcgactaccgatgacaacattcgcagcttctcctggatgaaacgcgtcccagaacacatactcgtccctgttaagacatggagcttgacccggaagacaagttatctgtccattgttcctcccaactccacaacatcccgcgtttgtcaccctaaaccctgaaccattaacaagacgttgatgaaaccatcaacaaagttttcaggcaacatttgatagagtttgtttaagaggtgactcttaccatagcgagaaggattagctaccatgtcttggaatataccataagcattaatgtaagtgaacttggcccctggtgtgttttggttgaagtgatcaaccagagacacaagcttactgttgaagattctgttagcagaattgatcctttcgtcacaagttaccccgtctctgctgttttgagccagctcatttggactgcatcctattgccccgataccaactagcgcaaacttcctcgctccgttgttatacattatctactccatacaaaaatacaaatattcttatcaaacacagagaaaacagagtatatatgaacagcggacagaggaaacagagtttaaagaaacagagaatattagcaaataaatgaacggacccggagttgctcggtgtagcggcttatgaggtcgttggcgtaggcatccggggagtactggctcccggtggagtaataaacaggcataaaatagttattgagatagtcgttactgcctaacccgattgagtagatgcatttacttaggtaattagcagcttcattctcgtctccgagtatgttcacaacttgtgacacagtgtttacatgattagctacttgccctgcaaatgttattctagctccctgaaccaaaaatggacaaaagatttatgtttcctagttttaaaaactgaagtctaaatgatatctcattacatcaaaccaaaattgtgtattctgtttaaagactaagttaccaatt

SEQ ID NO: 6836 - DNA, 1159 bp, Arabidopsis thaliana landsberg
gcttgtcacagatatggcttcttggtggctcattcggacaagatcttaatagcatcgaagctggttggcaggtactacaatgttatcccaacgagaaacatataagaaatgtgaataagatttgtgtgtgattcttttttcatgtttagaatattgactcttgttgcttttatttacaggtgagcccggatctgtatggtgacaataacacgagactcttcacttactggactgtaagatcctaacactcccacctaatcaagttcttactgtcatatctttctgtttctgcttatatttctctgttgtatcttacgttaccaaattatttgcagagtgatgcatatcaagctaccggttgctacaatcttctttgctccggttttattcaaatcaacagtgacatagcaatgggagcaagcatttccccggtctctggatatcgtaactcgcagtacgttatcagtattctgatctggaaggtatgttaagccataaagagataagtttaacgcaatccataagacaagaaaagctgaaatggtctgttaacttttttcacaggatcctaaagagggacactggtggatgcaatttgggaacggctatgttttaggctattggccatcttttctcttctcctacttgacagaaagtgcatcaatgattgaatggggaggagaagtcgtgaactcacaatcagatggccagcacacttcaacacaaatgggcagtggtaaatttccagaagaaggctttagcaaagcaagttacttcaggaacattcaggtggttgatgggtcaaacaacctcaaggcacctaaaggacttggaacattcactgaacagtctaactgttatgatgttcaaaccggaagcaatgatgattggggtcattacttttactatggaggccctggtaaaaaccagaagtgtccataagctaggctccaagtagtagtggctcgtctctcgagttatcttgtcttgtgaattcaccttgtttctttctacacacactcactcaaatccgccttcttgggtagtttttagggatggttaaagttatgtaatggtaaaagtttggtgtctttttctccatgtaagtaggtggggaagaagtggaaaggtgtggcttaagtttctttaaaaccagaaa

SEQ ID NO: 6837 - DNA, 1305 bp, Arabidopsis thaliana landsberg
tggtattaaatatttttttttttatcttaattgtaaaaattatttctactaccaaattctttcaaattttttttttttttgaacaaaggcttgatttcattcagtgttgataggaaccaagtacagagacagaatctgagattccagtgtttatgatacaactaataaaagtattctccaatccctgataagtgtgtattttgcctgttttgactattcatttgtcatcactttagcatcatatcatcactattttatatcatttctcatcatttgtcatcactttgcatgtttaggatagttttgcatgcatattgcatatttgtgttgttttcaggtgatttggagctgttggcgagctaattggaagaagcggccatgatcatgtcaaaccacttgaccctctggtcgagtagaagctccacgacctcaacagagcactcgaccccctggtcgagtagatgacttcaccaattcaagtcaccactcgaccccatggtcgagtaccaccctgagagtcactcgatcacatcactcgatcacatcacgcgaccacctggtcgagtatcttcacctccaccacctgaccatcactcgatcacagcactcgaccaatcactctaccaacgtggccgagtcccacaatcatcgttcactggaccaatcactctaccaagaggtcgagtatcaccatcatcattcactcgaccaatcactctaccaacatggccgagtcccacaataatcgttcactcgaccaatcactcttcctacaggtcgagtcccacaatcatcgttcactcgaccaatcactctaccaacatggccgagtcccaccatcatcattcactcgaccaatcactctactaacaggtgcagtatcaccatcatcattcactcgaccaatcactctaccaccaagtcgagttccaccatcatccaccactcgacatcatactcgattgccagcagagtcagaacaaaccttttgttccctacaatcaaggctttgctcccgaacagcaatttcaggagaactaccagcaaacaccacccaggtttgccccacagcaacaccaaggtccttctgcacctgatgctgacatgaaacaaatgctacaacagctgctccaaggacaagcatctggctccatggagattgctaagaagatatctgaattacaccataagcgacattgtagctacaatgatctgaatgcaaaagtggaggccttgaattccaaagtccgatacttggagggctaatcaacatctacctctactcccaaagttacaggactttca

SEQ ID NO: 6838 - DNA, 2621 bp, Arabidopsis thaliana landsberg
gcaataagatgagtttgaaccccaaacaggaaagaaggatagtaatattagcaataacagaacaagaattgacaactgctgtaaattagacaacatgaaattagtacaggatgccgctaatcacaatctgactgaaacggttacctgcaaatcgcaacagtaacagtgaacgatgtgtgggcaatcatgttcaaataaaatgatttcctccaatcaacttcagccagactttcaccaagcagctcatctaactgctttacaagtaagaaagaaatgcattatcatatgtttgtagacaatacatacaaggtgcaacacaacaaataaatggttactcgaagtgtctctgtcccatggtctaaataagataatgatggatcgtgaaaagctttagcatgtaggccagaaaagacaatcctttacaataagcacgtagtactctagcttactttaatccctcacccgaaaagaagtaaaatcaatatttccatcaccttcaggggagttgcaatctaagaccttgttaatatacaatttttacatcgcagttgaaatgttacatgtcaaaaccaaacctcatgtggtgagatctaactaggtatctgtattgtttcgtacagttttttaccttaggtgcccacctgcgtacaaagtaaggagctggtgcatcctcattttcagtcaaaccatatgacttacagctctggccaaagcaacaaaacactcagtaacattaaccagcaagataaatacaatattctaagttttcgacgcagagagaaaggtccaagcttacataccaatttcctgacaaaaaacagaagatcatcgtcttgtcgcctcctcgactccatacaacgaacaaagtacacatcaaacacaccatgccagaaattagagtccatttctacatcagacgcatcttgctcatcaagagacgtctttcctaatgactttgagtgcttcttcaccatactcagaatctcatgtctgaaaaaacatgaagcagacaacaaaatcaatttaagcaagatcgaatcaaataaatgctgaattactacgaaatcttagtattcgaattaggcaatttcatggtggaataacaaaattcatcaactagaaaactatctcatttcaatttgagcagtgactggaactaagcacgagatcaaacatagaacaacaaaagaatctgacttgtttacctagaaggagtcacttcgccatcgttgagcattttttctaccctccgatgattctgctaaaaacgttgattacgatctcgtgatcgaatagggtttttctctctctatctttgactcgttcttcaattttaatttttgctgaattcgatgcgagtgagagatagaagagagcacaaatcttcgatctgatttgctttagcgttggcaaaatcttggcgtgttgcgtcaatcggagcggggaaacctcaataactgccgatttgctacagtgacaattaaatcttttttctctttcatggttgttagcggataaatccgtttgtggagtagattattttttatttaccattcatgaattatagtccgtcttaatatgcccgaaaaaattagaaatattttactacatacggctcttacataaagataaatttgatcaggagcggataaatccgccccaagaaatagagttgcctagtccgctccgccggcaacatccattcgaatacattatatggttcgactggaaatggtagcatagatgcagagattatctcaagaatcctctataaataaacaataatgaatatgtgggtacataacactgctaagactctactacgctattcagctccaacttaccaataagaatatggaaggctgaagatctaatgtccctaacaactctaacaagctaatagatcgatccgattaactagaattgctggcttaaacaaaccggagggcctcgaacaaagcggttaaagatgtgaaagtaaaccgcaagacaaacagtgattatcactgaagatttggcaccagcgtatccaactacttgacgtcctctctctgtaacttcttcatgaatcacatccaaactcctcttaaaactttgtgacgttttcaagattacaaactcaagaattgatctcatcgtctctagcgtcactcttcccgtaacatcaaacatgaacttcctattactcggcactgctaaagtagtcgaaagcgcctctgcccatccgttttctcgattctccgacttcctcaaggaggaatcggttttctctcctgaagatgtgaagacatcatgagaagttctcatgaacgtctcaagagctccattacaaaccgaaacaagaacatctcgagcactatctcgatgtttcggattcgtcaaaccagcgaatatctgatcataagtattaacaccaaccgttttatcgatatacaccgatacagctgagctagtgaatctctcaatacaatctgctaaaagctctctacacttatcatcactaagcaaattcatccatctaggttttaaagaatcatcactaccaatctcaatctcaccagagtaaaatccaagaacaagattcttagcaaaactgccaacaacaaaatggagcgcccagc

SEQ ID NO: 6839 - DNA, 3083 bp, Arabidopsis thaliana landsberg
tattaaattataaaaacgatatataacttggggtaccagccgcgtgggaggattacaataatgcaattgatggagatagtataacctaaagacaaattacttttaactaaacaaaatgtagaagcaccagctttcttttcccatcttttggactatgtagacaaacacacacgttaatctatagttattggcttaatttcaaaatctttcactttcatgatcagtcaagaaatacgcgtttaatcgactttttctctctatatatacaattctttcaaaatgatcaaacatagtcataagttccgcaccaatcagtggaaataactaatcaaaactctgtatcatcgttttcaaaacctaattaatggctgtaacaaatcttcctacttgtgatggtttgttcattatcagtcttattgtcatcctttcttcaatatttgggacatcatctgcgcaactaaacgcaacattttactctgggacttgtcccaacgcctctgccatcgtacgcagcactattcagcaagctcttcaatccgatacaagaatcggagccagcctcatccgccttcattttcatgactgttttgttaatgtatactaatattttcgacgcaactgtttaacatcaattaagccatgttgtaattttcgccctaaacctactttgccttctttattatatattctgaagggttgtgatgcatcgatcttgcttgacgacactggaagcatccagagcgagaagaacgctggtccgaatgtaaactcagctagaggattcaacgttgtcgataatatcaagactgccctcgaaaacgcttgccctggtgttgtctcttgctctgacgttttagcccttgcctctgaggcttctgtgtctttggtaattacacgttctttgtgaacatatgaaacaaaacataactaaaaattattgtggtataattctatttttagctattattaagatacgtttgatcatcttcaggcaggagggccatcatggactgtattattaggaagaagagatagtctcacggccaacctcgccggtgcaaattcttccattccttctcccgtcgaaagccttagcaacatcacatcgaaattttcggctgtcgggcttaatacaaacgatctggtagccttatctggtaagttcaattcaatgtttagttacttgcgtctcaagttgaaacaaaccctaacgccaactcttgtggatcgacgtaggtgcgcatacgttcgggcgtgctcgatgtggagtattcaacaacagactatttaacttcagcgggacaggaaatcccgatccaactctaaactcaacgcttctgagcactcttcaacagctatgtcctcaaaacggtagcgcatcaacgatcaccaatcttgatttgagcacaccagatgcgttcgataacaattacttcgccaaccttcagagcaacaatgggcttcttcagtcagaccaagagctgttctctaccaccggttcatccaccatcgcgattgttacttcgtttgcaagtaaccagactctgttttttcaggcctttgcacagtccatgatcaatatggggaatattagtcccttgactgggagtaatggagagattaggttagactgtaagaaggttaatggaagttgatttccttaaagctcattttctttgaaaaaacattggcaagctttggttgaataatttttgttatcataatcacatcaaatctgtattgcacttaaatcattctaagcaaatttatgataaatgaaattaaatcaaaacaacagaaaatcagcaaaatatttaacagttttactattattaatggaacattctctttatctttgcattcacagagaagaatgcagaaaattgaaagttttcactttagtaataagaacaactttattttgtgggctccaacagagaattatcattgacaaattattttacgaatcaccaatcaataacgataacaaaaaaaaaaaaaaaccgtccaacatgttaatcgaattatctatcaaccatcattacagtccttgtggaatgatttcgccgacaaataaaaaatttcatttgaaatttaggggagacataaaataattcggtaggctgattttgcggtcaagataaagcggtccctttccacgccaaactgccgaagacgagagtgcttgattctctaattttcctctagagtactattgattttattttttgacaggaactatgaattttcggctgtaaatgtaaatattaattcattaatgacaaataatattattctattttataaagtaaaataaaaaataagaacttaatgaatatctcaaaaaatgttgacaaaaataaatttgttcaagaataccaattttttaaaaaataggtatagaaattaggttatatttttcttatcttctcacacacactgagacatacatatatacggatgaaagtcatgatctatatttatatgtttattatttaggtatcatcatcgcctctattacctacatataaataaagcaataaaaatgtaaatatactctcatatatatattgagttaccagcggaaaaaaatacgcagttctctgaattcgttaatttattatatataatgaatgtggagttattattgggacgaaagtcctaccacaatttaaacgcctcaaacatcttctttttaaaacattactaaaaagggttaaaagaagacaaaattgaatgtgaagttgttgacttgtttctatctacaactttagaatacgatagaaagcaaagttcttacaaataaaattaatattggataagtgatctgttttgtgtgataggtacgctttgagtcagaatgtcaatggttcaattcttcatatgggttactaccggtggtattatagtgtcgattacaaacgattaggagtgttgccacaagtgtcataggaaaatttaaaacaaaaactgagataattaactaaaccagacgataataacgatttgtgacaaacttagtgttgaaaaagttttgaatcaaatccattaaaattgagcaacacaaaataaatgataagagc

SEQ ID NO: 6840 - DNA, 952 bp, Arabidopsis thaliana landsberg
actctgttgccgttcaatatgcataggagcgcatacgtttgggcgttttcaatttgtaacgttcaacaatagactattcgacttgggcgggacaggaaaccccgacccgactctgaactcaacacttctcagcagtcttcaacagctatgtcctcaaaacggcagcaatacagggatcaccaatctcgatctgagcacacctgatgcgttcgataacaattacttcacgaaccttcagagtaacaatgggcttctccagtcagaccaggaactgttctcaaacaccggttcagccaccgtcccgattgttaattcctttgcaagtaaccagaccctgttttttgaggcgtttgttcagtctatgatcaagatggggaacattagtcccttgactgggagtagtggagagattagacaagactgtaaggtggttaatggacagtcatcagccactgaagcaggggacattcagttacaatctgacggaccagtgagtgtagcagatatgtgaacaacgatgagatcagtttcaccgtttgtttatcatatatgaataataactcctaggccgaatcatttttgtgaaaaaaataagtttggttgaggagaaaataagtgagtggtagggttgtgttttacacttttgaaaattttaatattctaaaacattattatgcctaaatacatgcatgcatgtataacgtctatcgttttgatacattttgtggatttgaatctaaattgtgtcacaacgacaaaatttaaaagaataaaataaaaaaactagatccatgtcatgatttatcaaatctaatgtttttagtgtcaatcaatggaaaaaattattatttatgagaaataaatagaagtacggcaaagtgatttgaaacataggttcatattttgaaaaatgggaagcaaaatctattaatagatttcataatattataag

SEQ ID NO: 6841 - DNA, 659 bp, Arabidopsis thaliana landsberg
  unsure (1)..(659): unsure at all n locations
tatcctctatataatgactaattagattaatcataagttcagaatcaatcagtaaaacgaaaagctaatccaaaactctttaattatttgtaacaactgatcaatggctgtaacaagctcttcttctacttgtgatggtttcttcatcatcagccttattgttgtcgtttcttcattgtttggggcatcatctgctcagttaaacgcaacgttttactcaggcacgtgccctaacgcatctgccatcgttcgcagcactattcagcaagctcttcaatccgatgcaagaatcggaggcagcctaatccgccttcattttcacgactgttttgttaatgtataataagattcttggtttttatattttatcataaatccttctaaattttgttacactaaaccgctactttgcttctttacatcggaaaaagggttgcgatgggtcgctcttgcttgacgacacttcaagcatccagagcgagaagaacgctcctgccaatgcaaactcaactagaggattcaatgttgtcgatagtatcaagacagccctcgagaatgcttgtcccggcattgtttcttgctctgacattttagctcttgcctcagaggcctctgtgtctttggtaataaataacacttcttcnataaacataatctaa

SEQ ID NO: 6842 - DNA, 3030 bp, Arabidopsis thaliana landsberg
cgacgactactcactactcagctttgatttttcaacagaacggtttcaacgtttgtgtgctcactttcatcatcaaccatgccgtgttgatactattgctctctcggttgttagagaagaacatctttccttgttttatcagagtaggcagacactaaaggtggaaatatgggtgaccgttgagattgagaccacatttgtctcgtggagcaagttcttaacattagatttagtttctccttgtttatcgagatcaatgagcttctatattcttgatgaggagaagaaaattgttgtgtgttgtgatgaaagcgaaaatttctactactccaaattggtatggattgctagagaaggacaagaatatagaccatctcccgataagtcagttttctgtggcatacaagcagcgcattttcaatgttaccgttgtataccaaggttgtttggttatgttccaaaaaattagcattgtggtttcttttgcttgctttgtcatgtccttggatgaaatgatatctgttttttttttgttttttggtgtctttagtattggtggcttttatactttcttagacttttccttcaagtcttggaaaataataattatatgctctactcatttcaaacaaaggccccgattgtttctttgcatttgcctaaatcgaaaagtaatttatataagaagtaaaaagaaagtgttgtgacgatggattaatttgaagaaaaaaaaatatggtaagacataaagaaaagaaaataggagtgggtgggttgctttgtgctttaaagttttaaacaaagaagaaaaggcaaaaaaatgcttttgatatatttaaaatattttaattcgtctccaaaaaaaaacagtttcttaatctaaagatagaagacatttgattcaaaagggaatgcccaaaaaactacaagattgaaaacaaatataattgatagagatcaatgatgctttactttagcttcgtctaggtttatatattattcccgtattctttatttgtttttcttatactatctttaacttttgtgctaatttattttcgagaattggctaatgttttcggtttgtaaaatatgcaaaaaaaaaaaaaaaaatggaatcattaaaagagttgaaaatagatttcagaatcattaaaaaaaagtaatctacttcaaaatttctaaacaaaaatatttttgtgactaaagaaaatatacggaatcgcataattgtttctcctatgtgtatatttagtaagttgatatacttctttagtaatatggaatctttgtagatggtaagaagatcaaataaaatcaaacaaacacatacacaaaaaattcataaacaccttatgattgcgtcataaattaacgcgatgcaaaatcgttagttgattacatcttggtgctcaagaacatgcgtcacactgaatcatctgattgcgttatagactaacgtgttgcaacatcattggtttaaagacatataggtgcaggtacacatagacatgcgtcacactagatcattttggggttttaattctccacgaagaaatgttaaagtggggtctcttctattgccgggaaaacaaaagagagaagaagaaattaaagtttctttttctccttcactttctcacacacactgagaccataacaaacacacacacaaaaaagctctgcaaaaaaaattcaaattccgggaagaagacgccggagaaaatcgaatcaaatagatgaagatgaagcggactgcgtcatcgaactcagaagcacagagttacaacgaatcacctcactctcctcttcgatttcattctccgttatcagatgccggagatttacctgaaagccgttacgtttctcctgagggatctccgttcaaaatcgagaatccgaagtcgatcgtagctggtaataagctcacacagttttcgcctcttccctcgccgattccgcctcctcctcctcagtttccgccgccgcggcgtcagaggaatgcgagagttccgatgaattcttcttcggataagtctccgtcgtctatggtggtgcacaatagctgggtgagagaagacggtggacaaactacgacgagaaaagctggagctccgataaacggagaagaatcgacgaggacgacggtgaacagagcgagaggagacgatttagtaagtttgacggcgctagggtttagaattaccgaagtaattttgtgtgtgatttcgttttcaatcatggcggctgataaaactcaaggatggagtggcgattcttatgatcgctacaaagagtacaggtctctctcttcttcaccacaactttttggttttagaatcgaaatcttaatcagattattcaaaaatcatcatctgcacaaatctcttgcaggtattgtttggctgtgaacgttatagcattcgtttactctgcatttgaagcttgtgacgctgcttgctacatcgcaaaagagagttatatgatcaactgtggatttcatgacttattcgttttctccatggatcaagttagtctttctttaaaacatttagtcgagcgatttgtgtaatcaaacatagttttttgatgaattctgatgagctttttcgtagcttcttgcatatcttctaatgtcggcttcttcatgtgctgcgactcgagttgatgattgggtatctaattggggcaaagatgagtttactcaaatggcaaccgcttccatcgcggtttcctttttagcgtttggagcgttcgcggtcagcgcgttgatttcttcttacaggctcttcactcatgcttcctcctagttgtgttgccttcccttaaaccaaatgttactctatatctatgtacagtctctcttatagcttagaatggtaatgtgtgatacaagtttcaaaatattaaaataagacaagtaatcatcaaatgactgagtttacttgtgtagcaagacatattttattaaatgaaggtaggtggtgataaatcccaagacctaaatgcatgttttcttacaggcaaacc

SEQ ID NO: 6843 - DNA, 3925 bp, Arabidopsis thaliana landsberg
aagataagagatggatctttttggataaaacggcttccaaacaaataatgcaagagttgcggttttgttgtggtgggttttgtatcaaaattgaagatgcgaggacctaattgtacttctaataacgtcatatgtaactgttactggttgtagcaagtttggatccgaattatgaagttactaaattcatgaaaaatgtcttatattactgatccatgtagggcaccattataactcttacctgtataattaaatgttacatttattattttgctctcatgaacaaaaaaaaatcatgttcacaattacttgtgtatgtttctctctatatatacacaagtaattgatggacttcaccaagcactgaaacattccacaatccgagacgaacatggaggcattgagcattaggtcgcctaaaccggtgacgggatatgcggattgtggaagtgattgagagcctggtgaacagccatcgatacgttgtagctggagtgatttagtgcttagttgttgtatccctaaaagttaatggtagattactctaggtaggtataaacagcggcaaaatgcttaaactaggagaaagattcatgatcatcgttgggatcagaaacagattacattgacagtttgatcaaacaagtaagttatacagataaaaatgaattcctctacattatctgcatcatcctaacgcaaagcgtttctcttttcttataaaaatccagataaagattgtgtcaatatatctggtgtagaagtgtagtcaaacgcgctattcctttacctcatagcgaccaaattccccatgaaaccaccgcttatctcataatggcaggcacttgagaagccagcttctagagcaagagtctctagctcttctcctgccaaaggacatttgacattccaatcagctaatgaaaacatagagacttagtataagctctttaatacagctataagctttggattaaaaacacacaaatatcagctctgccatataatgaaaaggcatatatgtcatcaacagagaacgaacctgttagatagccattgattgaatacttgagatattcatactcctttgcaagatcataaacagtagccacagggacaactacattgtcaatcatccagccctaacaaaaccaaaccaccaaccaaattatttcctcgagatataattagcaaatcaaacgaaaccacacatcacagtcgatcagtcatacaaaaacaagtacctgcataaacgtagtaacggattggttgctcttattgaaatcaagtatagatactcttgaacctaaaaaccaacaagagataactaagcatagcacgagaaaaaagccttggataaaactcaaatataccaaaacaaaacaccgacctggtttcaaaacccgatacatctccttcatagctctaagtctatcaacaacgtttcgaagaccataacccatcgtaaccgcatcgaattcacaatcatcaaatggcaaatcaatagcatcaccttcaatccacctaaacaacacattcataaaatctcagttttaactctttcccaagaaatgttagaacaaaaaaaacaacaagcatgattttaccagtgagctcactctatacacttgtaacaagaccttgctttaagactctgtctagttgctgcaacagctagttgttcagatgagaaatccaagcccatcacctataataatattaccaagttatcagaacaacaattttacgatcaagccaagctacacatttctaagaacacaaaccttgccagttgaaccaactttctcagataagagaaacgctaaatcaccacttccacaacataaatcaagaacgtaatctcctttttttgctctaattgtcaaatcaaaacaaaccaaaatcagaaaatagagataatcaaaacacagaacatagactgagatgtaatactcttacccactccatgagacagccatgtttttccaaattcgatgctggcctaagcttaagagatcattcaactacaaaagcatataagaagacgatgatttttgtagtcgggacaagttagaggaaaggagataagagagagagaagagattgatgtcaaacattatcgtaaactggagcaatgcggttgaagagaatccggcgttcgttcgagcattttactaccgttctccgtcgcgatcgggaatttaccgggtgctttccggtgaaagtcacaggagagacgataccgagtagagccgccattttttggccgttggttcacacgatcatgttgttttgttccgattactcggattggataaaagtctggtttcagtttaatattgggccgattttaggcccaataaggataatttgaaacccaccccaaaatttaaacagagatggttggattatgggcacaaggttccaattgctagatagctaaacttttggctacaattagcaaaatgtacatgatgattaaactgtcaataaaagaatgtgtttaatttagtgtgatttacacaaataacaagatattttataattatttttgaaaaacacatagttaataaacaaatctaacctatctaagtattttgtttgttcaacgttttgccaataagagggtaaaagctatatcacgagaggtccggagaagacaaaagaggttatttttattcaccgataataatagttacaaagcattttgacttgttccttctactacatgtgagtgagtgtaatatccatttcatgtgtcgtccatgcttcactctttctttctttttttcctttaatcatacatccatcttttaatcaacgttaaataagtaccataaataaattcattcctcggtaaagaatgatccactagaatcatccatcatagcgaaaggcatattctctgatggcttccaatgacgtttcctttggtttataaaccaattgttgatttgtttctggtctaaccccgttgcatcagctaatgctatcttatctccttcctgtgtacacacacattcataccacccatttatatataagtgtagtggttagttatgtcggaaaacatgcaagtgttgcttttgcttacagtagggtaaggccacttataatggagattccaccaatcaagaagagcttgtcttgcttctcttggtaactttcctttcttcttcttctttgagaactcaagctttaaagtactaatacggcttccaaatttgcgtagcaacctatctttgaggtcccggtcttcacatctttgtctcccatcctctgctacctcatgatcacctccactcagttcctcgtcagatgatattacaccatcctctgttacaccaaattcacaagaattatcactatacaaagacatcaaagacagagaatggttataggttatagcaagtaaatgtaacagaattatcactattcactaccatgaaaaagtttaaatgggctttctcggctaaaacggctaagtggctaaagagggcaaaaaagggaaagaagaaagagtggtaaggggtagagaatatcgaggacgcacacgattgagtgcagcagtcaaaaaaccgccgcagtgaatagttacctccattgtcatttgtcaggagaggactaatagtcttgtccccatgaggagcatccccccttaggcctactaattacccaatctcaatatgacacgtgtaaataccatttagaggttgtgtgaacccccggaaataacgctacacctctcatttatgttctccacaataccccaaaactcaatttccttttctctctctctttctttaatgtatttggacatttatatatatgccccaacgactctactgaccccattacccagcttttctgaccccaaaactcaaccccaagacgattcaagaacattccctgattttacaatagt

SEQ ID NO: 6844 - DNA, 875 bp, Arabidopsis thaliana landsberg
ctcgagttctctaaaaagaagaagaaagggaagctaccaagagaagcaagacaagcgttgctcgattggtggaatgttcataataaatggccttaccctactgtaagtgtctttctgattccaccgtaacctagcatacactcattaatttatttcttcgacatattaatatccgcctctcgaatgtgtataggaaggcgacaaaatagctctggctgaagaaacaggtttggatcaaaaacaaatcaacaattggtttataaaccaaaggaaacgccattggaagccttcggagaacatgccgtttgatatgatggacgattctaatgaaacattctttaccgaggaatgaaaagagagacatgggattgtgcattgtataatttttacactgttttcccaagaaaagaaaacagtaaaaagcttttggtaaatgggacatcatcgcgaatgaatggaaccagttagccaaaacggtcaagggcgtggcgtaacgagacattgtattggaaatagtggcaatattatgtcactaatcttccaatggtccaaaatgatagatttcttatttgtattgaaccttacttagatagctgatgtgtcaactaaataatttattttcatccttatactacttgtatcaatgtctctaattgatcaattgttgcttgctattcaaatatctgtcttgtctttgtcagttctcaagatcgtacaataaggatgtgggaagttactggggatggtgctctatgtttccggtggtaaagataaatgtttgaagcttggatgggttaaagaaattgcacctagagattgaattattgagtcttcttttttgttaccaagtatgatacataagataacttacctaa

SEQ ID NO: 6845 - DNA, 732 bp, Arabidopsis thaliana landsberg
catgccatataaaataaaaaatgggagcaccaccttttcagaatagcattttcctttcacacattattaaataaaaacattagtgagaaagcaaaaaaacaaaataccccgaaaaaaagagaaaataaaatgaagggatatttctgactaggaagtctcaaactccccgaacgacataagacattacaaaaggcgtgaaaacaaagaaagctataagtagcaaactgatgtaggggaattcaaaacatgagttgtaacaagaaagcaacaagaggttgttattatgtggctaaagcttttggatgtcttatggaccgagacgataaggtccatcacccatgtaatgaccatccatgtacagagctgcgtggtgcgggtgctgcagaccatccatcaccatgaactgcatgtcttcagatggtttccagtgacgctttctttggtttatgaaccaattgttgatttgtttctgatctaaccccgttgattccgccaacgctaccttctctgactcctgccacacaactcaaaccaaccatcttcatttatgtagtaatcaatgtataaaaagcaatgctagagataatcgaaaattattaaatgattctagacataaaaatggaaaatgacctaaagtttgttgttttgaacgattctctaagtaaaatgactaacttcatttttctttgacatcaagtaacgactaactatatgttgtcttgttagcttttg

SEQ ID NO: 6846 - DNA, 2032 bp, Arabidopsis thaliana landsberg
gcgacgatgactcgatgtcatgtgtcccatcgagctgcaaagtcatataattcacctgagaagaggaagacccggcattgcttaatctgccaccataaccacgagtttcagtccttctcttacctccatcctcaccgttgttgctcaccctacgaccacgtaacttcttcccaatttcttcatctttaacctcactctcatcaccatcatcaacaacagagctagatgataatctaccataaggtttaacactatgaacaacacctttaggaaaaaacctagcagaaggcaaatcatcaacactctcaaacaattgaggaccatctctatcagtccataaatcaaatccaccaggtttctgaaaccgatccgcgagtactttaacttgctcatcagcacaaactgagaatagattcggtggtttatgaatcggttcccatggtcgttctagctcagccaccgccgcttttagctcggcgcgttttcgcatctcgtagatctgacgttctctgcataaccttgctttgagaagctgtttctgtttcttcgcttgcatccttttccattgccattttgatacaccgccggggaaagttctcggaccaccgcccatacggatgactgttgattttcgtggctgtgttggagagggtttgagagataggagagagagctttgattggagagaattgaggtccggtgagaagaacgatgttgatttgaagcaggagaggttaattccgatcatcgtcgccgccattggagctgaggaagccgagcaaattattttatccgttccagatttttttttttattgttctttaatataaaattgattttacaatttttaggttgactttttcagtcaactcaattttcacaaaatgttacaaaacaactctcttaattatattcgaatgcacacacacacatatcaaatcaataaccaaaaaacattccattctcatagggtttggttggttacactcacaagttattgaatatccctattcctaaacgcccgcccacggaaaacagcgaacccaagagcatgcccgaaaatcgcggctaggaaaacaccaccgttgaaggaaacaacagccagaatcactaggtagctaaagccggacttgacggtatacatagccgtgcgaaatgcaactttagcaagcttatcggtgcccggtttgatggatgactcttcagagcaccgagcaagccacttagctaagaacgccagaaagaagacgaagataagtgcgagtgcatacatcccacggtcagaaccaggccagcctgagaagagcacttggcagttgtaaccccaatagaatgttgggtgtaacagtgacggtctatgtggcgtttgcgtttgcgttgtggtggtggtgttccaagcctctactacgacaacgtttttgctcgacaacatctcctttaatttggtgtaaaaagagaattgggatgtcgttgtcgtagtggaaataggagactcgctagtctttgcctataaaaagtgtttcgtcttgagaggaagagactggtcctactaaattatatgctatgttcatgttatgaagcaaactcaagatttgcttgtcggatttttctttcgaaaagctacaccatgtccatcaataaactatttttggccgtatatttgtaatcaaaattcgtttttaaacgtatatataaatacattgatgcacatatcataagctaagctagctaactaaaagtaaagtatcttatggtttaatatgtttttttgtctacgttgaatattttctttgctttcttatataaattttatcacaagctattgcaagcaataataaaaatattaaataaaatatgctaataaaaaccagtaattttattttgattcacttaacaagtaaattagttatttccccaagcttgttttcaaataatcatcaatctattctaggctatctagaagttaataagtttttagactagggaacaatcgatcatatgattagtcgatatacgaaatttttgattatgc

SEQ ID NO: 6847 - DNA, 1561 bp, Arabidopsis thaliana landsberg
tcttccgcgacttgctcttcttatagacgtacgtgtctgagtttatgtttcttttttttccttacataaaaggaatatacttgctagtgctagtgccgacaaaaaagttaaggtatgggatgtggctactggaacgtgtaagattactatggagcatcacacaaaggaggtaagaacaagattcgtagaactagaaatttcttagattataggattctcatggatttttgtttgtatgatccacaggttcaagcggttgcttggaaccattatgctccagaagtgcttctcagtgggtcctttgatcaaactgttgtattggtaaatgttttgttccatggtttatttcatgtattccagtcttttgttttacacaaggatcattaatataggtttgtatattgttgtagaaagacggaagacaaccttcacactcgggtttcaaatggtctgtcatgtccgatgttgaaagcttagcctgggatcctcatagtgaacactcctttgtggtacgttacactttaagtctttaattaatatatacaatgtggtttttttggcggtttaaagaattttttttcttcggtttcttatcccttgtggccttgcttatatataggtaagtctcgaagatggaactgtcaagggctttgatgtacgtcaagcctccatttcagcctctgaatcaaatccaagcttcactattaatggacatgacgaagcagctacttccgtctcatacaacatttcggcacctaatgtaagcgtctctttctcattatttgtttcgtttcgattcaaaaatatgaataattaactcataaattctaaactttgaaaacatatttcttattcccctttgtctactctctcttgtgtcattgttctttgttatgtatgttttactagttctcaccattttggagctgtaattgaacagcttttggcaacgggatctaaggatagaacggtaaagctttgggatctttcaaacaatgagccttcatgcattgctacacacaatccaaatgctgtaagaaccaataatcgaccatttaaaaaaaataaaattggtttcgttatcttaacttgattattaatttgttcatatatatgattccaacacttttgatatcacacagggaggcttattcttcattgctttctctccggacaatcctttcttactcgctatgggtggcgtaatgggggagttaaaactttgggatacactttcggacactaatgtctccagcagatacggaagcagagaagtccgaccgtgaaaagtccaagctaaactttgattggtcgtcacattcgaacacaacttaaccacaattttgtttagtttctttctttcattaatgttcgttttatttcttgtgtaatggctataattattatttctggctcaatgtttaatcagacccatacgaaatagcccattagtttatcagaagtagctcagaatattttagttaattaatggttattttacaaacatatgtggttaggatagaccaaattagtcatggcttattggtaaaccataagggtt

SEQ ID NO: 6848 - DNA, 1522 bp, Arabidopsis thaliana landsberg
actaatgtagctctccctttgagccaccaatagcaagcaagaaagggttgtccaccgcaaaggaaatggaaaacacagctccctgatgacaaaatcagaatggttagggacaaagaagtagatactaatggggaacaaaaaaaatttatgttgactggttcttacagcatttggttggtgtgtagcaatgcatgaaggttcattgtttgacagatcccaaagctttactgatttatccatagaccccgtagccaaaagctgttaattacagctcataaatggtgagaactgattacaaaaaacaaaaccatgaaatgccataaggacgtagaagggagagagatatatacattgggtgcagaaatgttgtatgagatggaggagactcctctgtcttgggcatgtgcttggatagtgtaagttgggtttaaatcagaatctgaacctgactgtgcagcacgtatatcaaaacccttcacggttccatcttcaagacttaccttaagagggaaaataaacaacaaactatttattgaaaaatgtcttgaaaccactgatttttctatctgaagaaaaagataagtgtcatgtaccacaaaggagtgttcgcaatgaggatcccaggctaagctttcgacatcagacatgacagaccatttgaaacccgagtgtgaaggttgtcttccgtctttctgcaacataatatacatacagctattaataatcattgtaaagggaaaagaccagaacacacgaaagtaaaaccatggaacaaaacagttaccatgacaacagtttgatcaaacgacccactgagaagcacttctggagcataatggttccaagcaaccgcttgaacctgtgatcatacaaacaataaacaatgagaatgccatataataaagaattttctccttctacgactctcgtttttacctcctttgtgtgatgctccatagtaatcttacacgtcccagtagccacatcccagaccttaacttttttgtcggcactagcactagcaagtatgttccttttatccaaacaaatcaaaagaaaatcagacacgcctaaagagcaaaccagaagaaaaaaaacttaaaattaatgagcactagtaagcttagacataccgaaactccttgttccaagcaagaccaagtactgactcagtatggctaccttctttgaatttctgtaaagtaaaagacagacctcaaaattaaataaataaatacatacgaacttgccatagacgaactagagatagacgagtttgatgcacacaccggtttctgtttcttgctcttctttttcttactcactatcatctcctctattcctcctagttgtatacaaggtagcacctcgtccctctgaagcattataataaccttatcaatagactcataatcgataaaggcaaagataaatacatagtctggtataattacatacaacgtcaagatcccatatttcgatggtcggtgtatcctttgaacaatagctacacaattccctg

SEQ ID NO: 6849 - DNA, 1062 bp, Arabidopsis thaliana landsberg
ccatgtatgcaatcatggatgcttgctgtccatatacccttccaaaaacaaaagactcagatgtgttatgagatgaatcggcactataaacagcgctatcacgtgcggtatagcctgaagtatcccgtccagcggatggaatgcgagccctgaaaacccgaaaaacatcaagtaaagaagtcaccattgatacaagctcttgaatttagattgagaacatatagctttgacataccggcaaatggagagagtgtgttttgcttgttgtacatatgatgggtagcatggagatgcttatagagaaatttaatgtcatgaagctctttgtgaacccaataaatcataaactcaactaaaacaagatagagagctatgtagaggaaacagaggaaccagttgaaatggtcaagtgtagagtaacatttggtccaaccatgctcgatcatatactcagagacagctggaagaagagtgtaccaaggcatagccttcattgccacgtatatttgcaaaagcattgcctttctcgtaggaatggattctaaccacaaaaatagaagaaaccaagcaagaaatagaactaagaaccacaaatttcaatttcatggtatattttgagctcaaatttcatggaagattcaacttaaaaaatgtggattagccaaaaatattaaactttaaaactaattaaatgagaagtagaagacaagaactgaaagtaacagtaagaaaaaaggttaacgtataacacaatctatcaggcgatacaatccaaggaatcaacaaaagaaaggtttcaaaacagaacatcgaaattgaaaaaagtaacctttggggacgtaaacgttgagtttaaggtaatagatgtagaagcaccagaggaagccggagatgaagtagagtatgtttccggcgaggtagttccggagccatgtctggaggaaatgtggtaaaggttcccatagattcaccggcaaaaggtgactcagaaccattcggttgtaaaaagaggtctcattgacgatctgatcattataatctgccatagtcgccgccatgaaa

SEQ ID NO: 6850 - DNA, 3363 bp, Arabidopsis thaliana landsberg
tggtcatttgttggcactaaataattagtttatggacacaagtaagacaataaactgttttgttatagcgttttgtagtcaaaagtgttccacacttcatgtgactacaccattacactcattacaataatcaatagaataccaaccaactctatagtattacgtgttaaaaacatgaaggtgttaatatttaaataatagggcacgatgtttatatgcgttcttaagtttttctttcagtagttgtgtcttgtatatcgatatatatgtagtggtcttacaaagtaggtgtatgtatgaataaaacaatgttaacaatctaatcaaattattgtttactttggagtaaaacaagaaaaaaactcaggttgattatgattgaaaataggatcaaatgataatggataacgcatatatatgtgtatgagaatgagatatttgagaaattttattttcggtagaaatttgcacagaaacgtttagggaaaatgttatatgaaaaaatagttagaaaaaaaaatttagtgaaaattatttactttgtttgtgattatcttcattagatgtcatatataaatatggacatatccatgtttttctaaagtgttggcgctacatcaaccaataacacgttttattgtttgatctgtagtaattagtgagtagtaaacaacgaagcataaagcttcatctatttcatagtcgttggttgatcaattttttttaacaacacatttcaatgactagcgacttaaattgttaatcgctaaaagtaaggtttcaaattttgaattaacgattaattactaaaataagttgttgtcgtcaacaattacaaaatgaacacgattgctacaatatgttattgttatagatctttggcaactgcaaaacgaacataatttaatcacgtacgatacgactatgaaaaatcaaacttcatctaagatatatgttttggttttcattttaagattaattaaaacgagagtggttatgtattaaattgtttttaaatttataaagaaaaacaaaacattttttacatgtttcaagaaacacttaaatatttatccacaaaaaataaaataaaacaatgaatctttatttttcattcacaaaggaaatctgaaataagagtaacctaaaaaccacgtcaccacattatccttaagaatagatatgtaatgtacacgtggcagatctcaagtggagggaaacgattcgtttaacccaaaacatctcaaacaattcctcttttcttagccttacgaacatattactaccaacaaaacaatcaagaaccactctttcgtgtcgcaataacaataagaaagaaagaaaaagaaaaccagagatggcgatgacgacagcatctacggtatttgttctaccggccaatgtcacctcggtcgccggcgcttcgtcgtccaggagctccgtgtctttcttgccgatgagaaacgccggttctaggctcgtagtcagggcagccgaagatcctgctccggcttcctcttcttcaaaagattctccggcagctgccgctgctccggatggagctactgccaccaaacccaagccaccaccgattggtcctaagagagggtctaaggtcagctaacctaaactgtcttaaattccattagcttgtatatatatacgcataagccaaagttacttatcgatggatgcattcatgtatatgagcaaattttatttgagttcttattggtaaatctgcagaatggtgaaatgacaaaatgaatctgccaattacacaacgtaactagctagctagtaggaatcgttaattgtgaacttgtaatttttgttcataatcagttaatcgctatgcaaaaattgtataattagtgacaaaaaattaaatttcaccacatcttatgttcataacatggttcaaatctaattgcatgtttatgtgtgtgtgacttgtaaccacatattttgttcataatcaatcgtttcttatcttgatataaattgttgggattcgtaggtcaagattctaaggagagaatcctattggttcaagaacgttggatcagttgttgccgttgatcaggtaacgcatttagtctccaatcaacgatctaacggtcgtatgaatatctttcaccatgccggttttgtttagtttcttgaccagggttataaattgtgcaggaccctaagactcgatacccggttgtggtccggttcgcaaaagtcaattacgccaacatatcgaccaacaactatgcattggatgaggtcgaagaagttgcagcttaaatgggagaattcaaaaactctgtgtattctataccggtttatccgtttgtaacttgacccaaaccgtatgtaccgcaaaagtttaccaattatttctcctcatctgaatctcgagccggttttcttattctttcacagaatgtgtttggaaaattcagttaaaagtctctttctactcatggttagctctcttaaccgtcttcatattcattctgaaaccggtacaatttcccttggtaaacaccttaaaaactaaacacaaacactttgcttctgaattcattcattcggactaaccacgaagtgaaaataataattttgaagtcaaaatcttttcataactatacattttataaaatttataggagactaaaaaacatatgactttatccctaagtattagagtatttacactctaccatccataccgtcaagaagaccggtccagattcccttaaccggaggaagctgtgcaacgaaggcttgccatggaggataacccactccacttgcccttacacgcccatccaaacgcagagacaaatacctaatatcaacaacaattccgtatcaccgattgcaaaacgcggtttaaatcgattgtctttacgcaaaaacactcatattcagctcaagaaccggtgcaatattcagtttaaaccggtttcagagcaaatgcaaagaactacttacactggagagtctgaggaaacattggcaagcttcttctgctcatttaaccacctgttcacgcaacaaaaaatatgaacactctcaaattcgattttttcaactcgggtttcactatctttaaggaaagattcttacttttcccattccgggacaaaaaccggagtcacccgccacagtttcttccttctctggctcatttcttcatccgcaatgtcagtttcatcaaactccaaaaccggtgaattcccatccgtagcataagccaccacaaccacacctctctccacgagcccttgtgtatactctttacttctcttaaacgcttcttcaataaactccgcaggaccagcacagatcacaagcctagcaacccct

SEQ ID NO: 6851 - DNA, 969 bp, Arabidopsis thaliana landsberg
gctcggatcgttgaatctcatgatccgtgcgatcaccgtgctctttcccgaaccactaggtcctacgactgctagacttttcccggctgaaactcggaggtttaggtttttgaaaatgtcaatttcgggtcttgtgggatacacaaaactcacgtttctaaactctatatctcctttgacttgactaaccattcttgagttaggctggtctggagatatcttggtctctctatgtaaaaccctgaaaactgacccgagtgcttgcgtgcccttcacgatatctggggtcaaagcaagcgtttccgaaactgagaaagctgtgacgatcaacaccatgaaggatttgatactatccccaaaattcgtctccttatgattgatcaaaaccgatacgtaccagagaccaagagcgtaggaacagaacgcaagaaactgagacaaaccgtatccaaatccagagatatgacctctgacaaaggcattcttggtgggcttgcttagctcacaagtaaactgttccgagatctgcttttcggcaccatatgcagcgacagttcttatatttgcaatcgcttcacgtgccactgaagttgccctagagtaagctcttgtgtaatctcctccaaagccttttaaaaatagttgctgcaaaatgtcatattcaagcttattcagtttcaagattcaaaatatggttgagaggattttttttattttgagttacctcggtaagtgaagccgcaatgagaagagggaaacaagccgttaccacagctgcaacacgccaactatagaaaaaggcaagtgccaatgcagtgactgtaagagacaagttttggactattgtcgagaggcgatccgctagagcactcctcaccaaagttgcatcagcagctaagattgaagtaagtgagccagtgttgttctcatccagatcaaaccatccaatctcatttgaaagaatcgctg

SEQ ID NO: 6852 - DNA, 1347 bp, Arabidopsis thaliana landsberg
tccaaaatttaactactttctaaaatcttccacgaaattgaaactgagctataaagcttaatgagcaaacaaataagacctagggatccgagaaaaatgccgatgacgagaagaacgacggtgtacggaactctagtgccgttaaacaaatatctacaagcggtgccgagaaccagcgaagttcccgcgaaaataacagcatcaacaggactcgaatcgttctcagctgaatacgaagaagatgcaattgctttctccggtgatttgtacggcaacgccgcgccgattatactcgtcatctccggtagaaagaagcaaacgatcaatctttcgttttgccagtgattacggtcaaagatgcttttaccgaaccgaatctgcttcgtttaagagtgaaccaagattgaatctagtctggtttggcttgacctgttttatttcggttacgtctggttttctatcactaatttgaacgaaaatttgagaaatcttaatacgtttttgattaggtttctgttttctttgctagatatgaatgtagttactggattatactactctgttcaaatgaagggtacatatatttacatgaaccaaattatgaaataacaaaaccgactcactctagtctctaaacttaactagtgtcacttttgtttgtttgttttgatccatacttcaatgtatcttgttcaaattgtttgattttatttttggtataagtggctacattgtaatttcttgctgattcaatctataaatcgaaaaccttaaattatccatgcctcaaaacgatgcacgttgtgtataaatgagaattttaaattgtttagtttctataattgctgtcatgacgtgagatcatgcaaagcaattacgtacgataacgcacgtaaaggaaaaatgattatcagattcatatattttttttttcaaaaacttggtctcgtgtaacatcattcgtcattcttcatattcactatactataaccacaaaagatattaaaaaaatagtcactccactccacatctaatacaaagaagtaataatttaactattcaaaatttatgaagtgttaatacgataagattttcgacccaaggaaaaaaaacactataagatacataggtttggcagaacaattagttcgctcactgcctacatattctttttttggtttaattagcctacatatgggaaaatgatttgtattttgttaaatgccactcacatttgttataaataattagtcttggtttcaaaagccatatatttatgtatttatagtcattgatatttaattttatggttggcaatggtataaagtattattggctagagttttt

SEQ ID NO: 6853 - DNA, 1694 bp, Arabidopsis thaliana landsberg
  unsure (1)..(1694): unsure at all n locations
tgcagacaaaactatgttacaaaatttactttagctaggaaaaaaatactgtacactatcaacattaaattatggcaccttggtaggcaatcttatcactgtcgagaatgccttcagcaatgacaacaccactgcaaacataaaacgagaaacacagtcaatattgcaacaccaggctaaagagtagactgcagtaaaatagctcttttttctacccatgagcttctattttagggttggcaagcacaagcatgatatgagtctataaaatttacccttacctgaggataaatatcaaagtgtttgcaatatatgcaaccatttccctgcacaagttaccgggaaaatttatatcacacagatcaaccttttacatagagttacaatataaaaaacaagtccaaattccacaagttctggaaataccagaagtgatgcaagcttttttgactgtcacctttattggttgtccttgcaaatgcagcataaaacctgttacagttattttatgagaagagacttcttaaatgataacaaaagaaagggaaaaaaaaaataacgagatcactgaaatttacatgcccaaagtcatgaccgtcaaaacaccagaagccccagcccactcttgagcctgtcacacaataaactctcagttttactacaaagagaatatcttagcacaggaattcaaggtctacagaaagacgtacagtgtagtatgcgaaatagctcactgcaattgtaagagtaatctctattacagtgtcattgaatatgaacttgagccaaataactgatgcaatgccaaacgccagaccaatgcctacactaaatagacagaagaacacgttggactgataagaacacagcagcaacttgatatcactaacaacagatgaaaaaagatcaagacatacgctccaagtgcgactttaagcagaaatttgattatagaactccagtcagagttttgccccatagccatttttaagaataactggaaaacaacaatcgccgtcctggaattgttgttaaaaatcatgaagagtgagcataaatgtcaaaaataaccaaaccatgacagaagataacgtcatttacccatcattcatcagggattccccttcaattatggtgcttagcttcttactagcaccaagctcctttagcaaagcaacaacagcaaccggatcagtagcacttaaaagtcccccaagcaacaaggacgttttccagtcccattcatacggaaacgtgacctgcatatagcaagtatagtttcataacataataatcgatttgtctttctttgttttcaggacagctacttaataccaaacaggctaattcataccttcacaagcgatccaagacaagctgttgaaataagaactccagggacagcaagtaacaccatttgtcccagacacctctaaagaatcatgcaagtattcagtacctatttctcttaacctttaagcttaactaggaattagagccagaggaataaaccttaatttggtgaacttccattgaaaacgaactctcgaaaagaagagccggaagaaaaacagctaanagaangtctggatcgatctcattccctgcacaataacattgattctatagttcttacaaagccagccatggaagagaagaaaattcgaaactanaaactacagatacgaaattca

SEQ ID NO: 6854 - DNA, 885 bp, Arabidopsis thaliana landsberg
cggttgttgttatggtatgtcttaattagggtaaaaaaatacttgattgttttctctcatttatcatgcatagagtacgcaataaaccggttaaatccaccgctactgcttccgtcaagcatttaatcaaacagagaggcggcgacggagctacggcggcttccaagtcggcgaatgattataataataatgatagtctcttgacggatatgcaggaaccaagcatcgatacagataaactcagctacgagattttctctattcttgagagcaaatttcttttcgggtacgacgacccaaaacccgaacccgcgaattcggttgttgctgggtcgattaagaaccagagaggtaaaatctgtattctgagtatcgatggaggtggaatgagagggatcttacccggtaaggctttggcttatctagaacacgctctgaaatctaaatcgggtgacccgaatgcccgaatcgccgattactttgacgtagccgccgggtccggtataggtgggatttacacagccatgttgttcgggtcaagagacggtaaccgccccatcttcaaagcagatgacacgtggcagttcttaacgagaaacgccaagggtctttacggaggagcaggaatcttgaaacgggtcttgagaaccgggtcgggttgttgttccgggacggctaagttaaagaaagtgatgaaagagtctttctcggagctaaccttaaaggacacgcttaaaccggtgcttataccttgctacgacctcaaaagctctggcccgtttctgttctcacgggccgatgcgcttgagacggacggctatgattttaggctctcggaggtttgtagagcgacttgggctgagccgggtgtgtttagcccgtgag

SEQ ID NO: 6855 - DNA, 3144 bp, Arabidopsis thaliana landsberg
acatgcagcctctttagctgtctctgaggaaaagcaaataaacgcactcggctatctgcaaaagagtgatgctaatgaatgtaacttgcagaaagaaattgctttcagtgaaccatctagtggaaaatctcttgatgaatctgacttgctagataagcatgagggtcatggtgaagttgctactgatttagatggcggattgagtaaaatgccaatgagttgtctgagggtctgctcaggaaatgcagaagacattatttcgggttctgaaatggaaattggactttcaccaggttcaaccaaagctgctgcagaagatgttacctctactgttcagaatggtacagacagtgcgaacgagaattgtgaaagaggtgcgaaaaggttgaaaatttgggcaccggagaacggagtgtatgaatgatgatgataactgagccgagaacctagctagcgagtatttccaagatttgaatgagcaaaatctaacgttgagcacacaaactgagaagcaacatctacggggtctcagaaaacttgattcgagggaggattcgacttcagaactatgatgaagaggctccttcaaagaggaaactgaaagaagccgttgaggtgacattgtgtcttccctacaacgtgaatgagacatccaaggacacttgctttggtctgaaagccgcaacagctgtcaagtaatacgaggaatgtcttgtcctcagctctgtcccctggatttcttaaactatagacttgttgaatagatcatgaaagccactaatgagagtgtctctgtcgacttttctatgctggagatggaactatcgaactgtaaattggataattatgatttaatacaactgtctaggaaaatgattgtattcaaataacttttttttttctcaaataaattatggaataaattgaatactaaaagtccttgtaatgtttcctacccaaaaaagtacgtgtaatgtttataagacgattaaagaaaattaaccaaccatgtagaaaactgccaatgtcaatggagactccactctccatagaccataacacatttataacacgtaaagtagataatttataattgttataagagaatatataatccatatttaaatagatttttaatttgttattctgataatagagaatacatattttaatttttttgtaatcataaaaaattaatacatataaaatgatgaattaattaattagtaatgaatacattattcgtatccttggatatggaagactcttgagatttgacgacactaacgtagcagcaacaacagttagcgcgacgaagagaaacacctcctaagttgttatttctaggattgcaataatcattgcatgtcccgtcgtctgtacatgctattcctgagtaacattgcatggtttgtcctgtttggttcaattattattttttttttggtagaggatggggagactaagtgcctcccctgttttattaatacaactacaaagaatcaaatacaaacttgccgtggaatcgcagttccacgagcatcatccgaaacaatcataacaacatcatgcggagtagtctccaacatatgaaatcctaactgtaaagaaaaagcatagtagctaacccatcggcaagacgattagcctccctatacgtgtgatagatatggacattccagtcttttgagatgtagccgtggcacaaccgcaccaggaaagacaggggatacgtagcgctcacacctgttttgagaaaccccaccaccaccttcgagtccaccgccaactctaagtttgtcaccctcttctgccaagctatatacaagccataatataccccccatagttcagctaatggggcagaacatatgcctatatttagcgcaaacccttttttccattcgcccaacgcatcccgtaagaccccaccagctgaagctcggcccggatttccccgtgacgccccatcagtattcagtttcaaccacccactccgcggtggctcccatttgaccatgcgttccactctaaccctcggtccttgtcctccacgtccaagtacattagcatcattaacttccttagctagcttcttaatgaaaccaactctatctctgcatttgccatttaccccgaagagattaccacaacgccatttccaaccccaccataaagccataccaaatatcgttgaccataaaaagtgttccatcctcacttccacactcaaattcgcatacagccactctaataaggacattgtgaagaactgatgtaccttacttggcggaactatgcgctgccatatcccactcatagctgggcaatccctcaaaatatgtaagatggtctcctccccccctttacacacttgacagattgtagaatcacagagatgacggccgatatctctcagcattggacataatcgcttggtttcctactaaccacaaaaacaatctcaccctctctggaaccatgcagctccacacacaactccagaacttctccatgttcgggcgtaactcaccagaccgagttaagagggagtaagcagacttaactgtgaaggcgccatccacagttaggccccaagacaaatggtcccgagttcctgtaatcttatcaaccactaaggcccccaatcttaaacgtgtattttctgtgttgtatgggagaaagcgccctaactcccaacctctaccatcccaccacagatcgctaacgcaatcattaacccggtcagccggcacaacatcaactgcagaatcaatgattggttcattcgtgagccatctatccttccagaaaaggatgtctctcccatctccaagaacccaactctgtccctgcagcacaacttcacgaatccccaatccaacactacgccaagttgaagaccaagtacttttaggcacagtccaagcgatgttgtgagtgtcacctaccttatacttccgtctcaaaatacgtgcccacaaactttgatgatcagttaataaccgccagccaagttttgctaacaaagccttgttcatgtcttgagccctcttgatccccaaacctccttcctgtttaagagtacaaactcgcttccatgagataaggtgttgtttccgcttctcacttgtgcttccccag

SEQ ID NO: 6856 - DNA, 329 bp, Arabidopsis thaliana landsberg
gaattgcacacacatgagggggagcgaattggtaccaccacaaacagagcccaagcgtcagaggaacatgaagaaaaaaccgcgctacaccaaaaaaccaagaggccgaaaaacccacggacgacgaacaaaggagccgacaagctagcaaaaagagcaaggtcgaagaagacgacccatgcaagaacccggaccgatggaagaggaacgaacttaagaaaagcaaaggcgacgacaaaaaaaccaaaagaaaacaagggggcacccaaaaacacagcctaacgaacagcaaaaatcaagaatcctccaacacgcgacatcgcgacaca

SEQ ID NO: 6857 - DNA, 2099 bp, Arabidopsis thaliana landsberg
ggactttgtggttattagggttacaaatctgaaaacaatattttccctatatacatactttcattctttagtggtaacatatattgcatatgaacgtttctagacaagtgtatatatattttttcttttccttttcttcatttccattttcctagttttaaattttccataaattttcgtagttactacataatattttgggcaggccctaatatttttgtattgtgcgatgaaaatgtaaactggatgatagaatgatgtatacgaatctatgaaagtattttagactaagtggaaaacttactaaataaatttgaggaaaaatgggaaaaaatgaatttacgaaagaatctaatagaaagtaacacatgctaatatattttcgtaacatttgtcttgtcgcaatgcaataagtcattacgaaactacttggatttttttttctagggttgttgtcttcggaaatttcagcatttttcgccaacttaatttttcaggggtttttgttttcccgttggcgatttagcatatgtacttttatcaatttttaataaaattaaaactgaccaaaaagagcaatgtggaaagggaagaaaatgagtaaattattttaaggttggacattggttgtgaaaatgcttcatttactgagaaaattcgccacgtttggacattcaataatatagctttgacaagacattgactccggtagaaaagaaaccaagagaaatctaatgagattctcaatcgtaaatagtattactgaaagttgtccaatctgtttagagagctttcttcacctcgaaaaagttggagcgttcattgttcgctgcatcaatgtcttccggggatgccacagccaccgcaacacctttatctctaaccacatctattgcttgtgcgaaatccttgaagtccttcaaactgtggaacaacaaaagttaattaacacttttagttaggatgcagaagaaaatttattgagagaatgtccttaatttaaccaaccttgttgttagtatctcttcacgctttctttgtcgttcttcgtcagttactccgagtaaatgcctcaacaaactgggtgaaagagattcaacaattttgattcaggatccgttatgtttgttcaaataggcaaacagaaacaaaataaaataacatcatttacctgctataacctttggcatcaggtaattggtatgaatcaacatcaccgatggtgccaataatagctttagtgagtgtttcttgatccacatcaaggccacgtaagaaatctccagttccatcatatatatcaagtgtcttcaacaagtttggatcccggtacgataagtaagaaaatactcctgaacaaagatatggccaatagaagaatatattaattgacgtaactcttttcatattcaagagagtagaaagcagttattgtacctgaatgcgaatcgaaatcacagaaacctccatatgcaccaccacttacacgaacacgatcccataaccatgtattgctaatatgctttgatataacatacgcactgccatcaagctcatacccggtgctgtatatgttacccgcttttccaacatagtttacctgcaaagggagtatgagagcgagttactgtatcaaaaataataaacccaaccacattctatattactatataaacgtcttttttttacctgggttggtattacaatggcttcatttctcagaggaagtcgaccatcccaagtgacaagcccaccagacgggttctcagggagtaaatctagaaattttgcaacagatttttcgacatttgtgagagacttcccatcagcagtcatattaactatgcaaccgtttctagcaaggagagatcttctgatctcctcaagcgaggatgaaattccttcccagtcttcatccactttcttttcaagagtatgtaaaaattcaagatagctacaaaagagagatgctcaactttgttaggttctacaagtatcaaaagaatagtagagataaacctaaaatgtgaataaagttcaattctaacagagatcaagaccagagagagaagacgatttaaattagggccaaattaaaa

SEQ ID NO: 6858 - DNA, 610 bp, Arabidopsis thaliana landsberg
ttctttatgttttcgctataagcctatgactactggattatggtaacagtcactctgactgcaattctgtttttttctgttaagatataatgtaaccttgatatagaaacagttgtagcgtatggtgattgaagaacttttcaaaatgttcagtgtctttcatgaatcagtaccatgatccaactagacatttattcaatcccatattcgattttttttctgtcaaacttctaggttggctcttatcttcattgctttttgtcttcctgcagatgaactgcttgttgcaagaggttcaatttacagatcagcagaggtttaaacagtttgtctctcaaagcagagcacggatggaggtatgtagtaggggttttcttttctgtctttgcatgataagtggaacttgaaagtagtagtataaacatcacttcacattctatgcagaaccgattgaggggaagtggtcatggaattgctgcggcgaggatggatgcaatgttgaacattgctggatggatgtctgaacagatgggtggtctcaggttggaatttgataattgtaaatttaacttttaatttggcccttatttatatcgtcttctctctctgg

SEQ ID NO: 6859 - DNA, 2304 bp, Arabidopsis thaliana landsberg
agagaaagacacctaaagaaagtgaggaggagaacttggttcagggctttgtcaatatgagcccatcttcgaaacttcgtcgagcttcactggtcaagtctcccagatgtgctaaatccccaagttgttactacaactcagagaatgaatcaccctcactcaaccgtgaaatagggagttcaccttcaaagtcaccgataacaccgtggaagtctctttgggccaaagcggcttgcaaagagcttgcgaacctggctgcaaaaagaggcagtatggatgatatcacagtggtgataattgatctcaaccattacaaaggctgaaaactcttaacaaatatgtttgtattctatataagtatcatatctctctgcgactctagtggttatgtagattcttgttcataatatatgatggactaatctcaccataaatcttattgcgttcttactaaattcatatcagtgacttacatttgtttcctgtctaagaaatcatagaaacaaactcataaaaagaagaaaagcttgtttcttcttgttgtcactgccttttacaggccttgcttaaccctggagcaatcttatcgaaaatgaatttgtatagcagcctgcgtgaagtgtacaccgacccacacaacagccttatcaggctcatcgcacggcttaccaatgtaaacctctttaccttccacaatcttcttcatcccacatccgatacccttgttgtagttatacttccctccatgtccacaacacgaaaccaacgatctcttaaacccgtgaccctgagcgtgaacaaacaactcatgcttgagagagtagacatctacataagtgatggctgcttcagatagagaacttcttagctcgatcacagcttgtttcaaagcgtgattgaattgttgagctaagtggttcaaaggagaaacacatccatgtgaatcaaagtctgatgctttattcggaaaccgttcaatcacataagctaaacaaccaataggtccagtgttgtgaatccagaagtatctccctccttgtccataaatattctatcaccaaaagaaaaaacacatttttatgatttccctttaaacaaaatcagagtcagaaacagagagaccaaccttgatagcattcatgaactgacttatgatctcaggaacttcggtttcaacttgttctacggttttattagcgaagtaacctgctgtgagatcgttctgaccaatgtcaaaagtgtataaagcttttgagaagctgtcggattcaggcaacatcgtcttgtagactcctccacgactacgaacagtttgagatctgttgtggaagttatagaattgtacgaactgtacatcgagtgaaaatgggctgaatccactttgacgtagagtagagttaagagctcttatcggagatcccgcggtagcgaagttagctccgtggctgaagtttgaaccaacggagtctagaaacgcgcttagatatggtaatccaagactctccgctatgttcaaaacagaagcaaaatcagcaaaaacaaaaaacgcaaacgttttggatagggaagagttagtgtacctatgaagtcaatgacgaggcgaccatcgcagtatcgtcccgcgggtgagccgaagaaggaagagccgtgaggaggaccagcttggccaaaagcagcggagagaccgccggtatcggagttagagtcaccaaagttaaagattgctgggaaatggcattgatgggcatgtgttgatggtgatagtgaagaaagcaaagagagagcaaacaaagaagataggattggattcattggtaaagctaaagatgtaaagagaccaaaactcaatcacgggacttttatcctcaaaagaagagaaacgttacccctaccagaaaaagaaagaaggttggcaaaacacaaatcagagatttgtgatatgtttttattgagatagggttagttataaatcaatacattttgaatatgtttacgaaaatacttgtaagtttaccatcatacaaatatgctttctttctttggaggattctcttcttatttctttctttttaagtttatatggtagctttccattttcatattttattttattttcgttgtagatatcttgtttttttaatttgttgtctctattttctatcaggtttttttttctcaaatcttcttttatcttttttttgcatgagttgtcgtgcacacactcccacgattatcgcaacattaatgaaacagggtagtgagattgttgtgtggtttcgttcgtagagatggttgtttgggttc

SEQ ID NO: 6860 - DNA, 800 bp, Arabidopsis thaliana landsberg
tggaccgttggtggcttagatcctcctgcaggttggctcgccattctgcaagacagaatccggttaaggctgctggtctacaaatggtctgcaaatgtaataaatatatgagctctgaatacaataatgattggtgagttacctggtcttgattgcagcagtcatggccatgaaagcttcttcgacattggtagcattcttagcacttgtttccaagaatgggatcccaagttcatcagcgaaagcctgtgtagacagaacaaccattacagtaaatccttgagacaagacacaagagtgtcaaagaacctttaactgtgacgaacttctgaagcatattaccttagctgtctcagtggatacaactttctgtgatgtgagatcacacttgttcccaaccagtagcttgttaacattctcacttgcatagcggtcgatttcatttagccattgcttgacgttgttgaagctttctagatctgttacatcataagtcacctgacaaaaatgagagtttagtttcattaatggatgtcagaaaaagggagataatgtaagtgtgacaacgaacttacaataattccatgagctcctctgtagtaactgctagtaatcgttctgaaacgttcctggcctgccgtattccactgcataattggtgatagtaataaggagagggatcatatatatatattatatatatgcaccatcaacaattttcagtgattggcacttgtcgagacaacttacaatttggagtttgatgggcttttcatcttgttcgactgttcggatttttt

SEQ ID NO: 6861 - DNA, 3223 bp, Arabidopsis thaliana landsberg
tcggatggtaatttttgttgtgtggacacacacacacacttgattacccgatcatgtgagtttatctaaatgcgcatattcatttatgtatatacacatatttaattcttttcttttttgtaatctttaatttagttccgtatataaaactgtaggttgtttttaatgaaaaaaaaaattgtttgatttatacttttatagttacggttatgattattaaacaatttgcagattagtagactgaagttggagctagagaggcttcacgaggagaatcacaaactgaagcatttattagatgaggtcagtgagagttacaacgacctccaaagaagagttttgttagcaagacaaacacaagtggaaggtcttcatcataaacaacatgaggtacttgataaaatcataaaaatgataataaaatatatatcaacatttcggtttattaaaaaataaattgtatatttgtcttttttatgtggcaccgagattagcttaggttttagtgtttgatttatctggttttgaaaatttaaagtgatctattagttttgtttttctcgaaagcaattaaaattttaaaactatgtgtaatatgcgtaaataatggatgtagtttagttatgtaatgaattcataattttcatcttaaatgcccagattgaaagtcataagacgaataaatacgtgcagcttttatttgataaaatatgaagaagatgaaataaatagctagccaatgacttggtcaagaaaaaaatgtttcataacttaatattaaatggaaaatcaaatttcggactaagatatttcaaactagaaaaaaccttttgttttcagaagctacaaacgataagttatttgtttatagttaggtatgttcctgtatatgcatcatattttgtttgtccacaatctgtagatgcatcatatatgagtctttgccttagaattttaatagtttaatacgtccatatgtgaatgcatatgtggtaggttatcaaatgtctattattatgtgtgtgtttatatttattatcttgtctttgcgtctatcggtactatatatattatgaggttacttgatcaaattaattacagatactagggtatgattttgggtaaatttcaacgtctttttctttcaattttcttataaaactgacacatctttcttgcaaatttttgtttggcaaaaaggatgtacctcaagctggttcctcacaagctctagagaacagaagaccaaaggatatgaaccatgaaactccggccaccaccttgaaacgacggtctccagacgacgtgtatggtcgtgatatgcaccgaggatcaccaaaaactcctcgaatagaccaaaacaagagtactaatcatgaagaacaacaaaaccctcatgatcaattaccctatagaaaagctagggtttccgttagagctagatctgatgccactacggtaactttctataagttactaatttttttgattcgtttaaccttacatatatatatgagttatgaaaattgaatcaatattaatatataatataggtaaatgacggatgtcaatggagaaaatacggtcagaaaatggcgaaagggaatccatgtcctcgcgcttattatcgttgcaccatggccgttggatgtcctgtccgtaaacaggttagtataactatatatatgagaaaatgttatcataattatagaaaaaaaaaatttggtgttagaattttgtattgattaacgtatatagtattggttcttttcgtcaacatgtagctttgaatataaaaattgacataataacaacactaatataaccgattatattacgtatcctttagaagtattgatttagagcaataccataaaaccttattaaagtccttcatacaacagatttagaaagttttaagaagagtatagaaaataattctaaatttagaaaggctttactaaatccctttctaacaaaatcttttacttatgaaaaaccaaaactagaatgcgacatatttattcttaaagaaaactttattgttttacgtaacaaaatgatttaaaatgtttatttgaatgtaaataggtccaacgatgcgcggaggatacaactatcttgacaacaacgtacgaaggaaaccataaccatcctcttcccccgtcagccacagccatggctgcaaccacctccgccgcagcagccatgctcttatcaggctcctcctccagcaacctccaccaaacactctctagcccctccgccacgtcatcatcatccttctaccataacttcccatacacctccacaatcgcaacactctctgcctcagctcctttccccaccataaccttagacctcaccaacccacctcgaccgctacaaccgccaccgcagtttctaagccagtatggtcccgccgcgtttttaccaaacgctaatcaaattaggtctatgaataataataaccagcagttattaatacctaatttgtttggcccacaagccccaccacgtgaaatggtcgattcagttagggctgcgattgcgatggatccgaacttcacggcggcacttgcggccgcgatctcaaacattatcggaggaggtaataacgacaacaataataatactgatattaatgataacaaggttgatgcaaaaagtggagggagtagtaacggagattcgccacagcttcctcagtcttgcaccactttctctacaaactaattttactaccattattatatgttatcttattatatattacacacacatattatacattatgcgtatcttaagtttttttttggtgtacattatatatgaatgatatggagatcactgagagagagagagagctattataggtttttttttacaggtttacacgattttggctatcgtttttttttcttctatgttaagaacgaggggtgtaggttttatttttcctacttcttatgatacatactctgtatatgtatacatcttaaatatatattatgttaaaaaagaacatgcatgcctgtatgatatattaatatattacaatgtaactatataatatgactatatgagtaacattttttgttatatctactgaataagatatcatgagaggtatcaaatataacaacgacaaggatcagaactgtattagatttattgttcgtttcgcagttgtcaaaggccataacaatgattggtcgatttt

SEQ ID NO: 6862 - DNA, 2490 bp, Arabidopsis thaliana landsberg
ctttataacgggattaccccatttctcaaaattttatattgtcatatctactgcaatgtataaaaatgggcatggtttaaatttattgaaaaacttcccttgaaaggaatgaaaatcaaatttataatttttaaaaaccttaacttgttaccctgttttacattattacagaaagcaatcattttgtaaataaaataaaagtcttatgagctgttaagattgtaaaatcaatttggacatcaaatgctctgtttttacaaaagctgatatgaacacaaatatgactaagcattattttctgatgacttatatttagttatttttctaacgaccgatctaacgagcattgaactagcctttaaatgcatgtctttttccaaccacaaacaagacagagacaagtagatgaaagatgtatacaaataattaactgtaatctgtgatagatgatgtacagaactatagatagacagtaacaaaaaaaaagtaaaagaatcatggacgccacaaagtcttttgggcacataacattccttctttgtcttgagcataagtcattcgaatctcccaatgcaagcttcttaatatctcttccaatggctctaatatctccactttgtcacgcacaaccacccaacctccaggccttgtcaatctatccatctccaccacgatcgaagccggctgcttacacctgcgacaacaacaaagatatggagatttcacggccaggtttctcatttgacaagcaaatttggattcaagatccctactagtttacctgtttttgagccgcgaaaagagatgatcagcatgaagaaggtcataagatcttggatatgttccaaatggttcacaccaatcatggtatataccaaggaggcctctttcgtatatgaatggaagtgtgtctggtgaatgcacaggcactacattcattacccacacattctgcttcacaagtgatgccccaaatctgttgattattttgtgagaattcaaaaccagtaagaatcaccaaaattctgttctaagaagagtataaatgatctctccttttttcatacccgccatagatagctgtcatgtccatcacattccggatatgtaaccagtcgatgcctaatccagtgaggtaagatttgtttaccatagcattccaatgatttgtatcttccatagctttctctttgctggttaaccactcagggtatgtttcaagtcgctttggccattcttcaggccactctgctccatgttgttctatagccgacggtatttcatatatacaagttttcatcggcacatacctatccaaggatggagcacgtgaaaatgttcatcataatggacataagaagaaagaaaaagtcatgccatttagattatcaccattgctttacttaccaggctgcatctgggttttcgttgtcctcgcaaagaggtgaatttttcttccttctcagttcataaatatcatttgattctggtttctgatatatcctcactcccatttcacttgcttcttcggtcttgtgtgcaagaatgttccaacaaatagaagctgtcaatgcagtcatcgctgcaaaacccacaccagagacaagttgataaatgctaaaagcacaagtaaaattttgatgtgttcaaaatcatagatacatcatgttgatgaaaagcttagatccatcattttcctaatattatggatttttcagtgcgagttaaatgacatatgaatatatataccttcatcatcctcaatcttgtcattattacttgacaaaatgaaatatccattaggccttaatattctgttcatctccaggagaagtttaccacctgtgattgcggaagtataagtactcatgactcgaaaagcatattgacaataattagagaaactaatacttaccatgagaatgccagtggactccgcaagcagcacaatgaatggtatcgaagactccactaggaaaaggaagtcttctacttgctaaagagctgacaaaagtaggaaacccgcgctcaagagcgacctgtgctaagtcgactagatcgtcctttaaacctagagacaccgtcaaaacatccttatccagcaatgcagctacaaaacttgaatctgagcatccaatgtccaacactatacgaacattcttcccccattcaatatctggtaccatctatcaaacaccaatcatgtttttatctctaacacagaacttgtctccaatgaaaagccaacttcagagagtaacaaatgatactcacctcttgaatgaattcaaggtactgtagaacatttccgttgaacgtagtctggttctgtggaaaagataggtattcaccggtttcattcacccaattatgcttcttaatatatgcagccaactttggatgtgccacgttcttatacaatatctgatgttaataaataaaaaagacattagatcaaaagaacttgaaccaaatatctcaaagaagctc

SEQ ID NO: 6863 - DNA, 1746 bp, Arabidopsis thaliana landsberg
tcaaagcttttatcaaggagatattggagacatgctgctcctcaaggctccaaatacggttcagtactttaagaagttcggttgatgtcttgagattgtagtgaggttctctagacggtcctcctcggaactccaatgaactacttggagtaactgctttgttgtatgtcgtaacctgcaaaaccgtaatcatccatatgtaaaatacaaacaaatctccaaaacacaatcaaaatactcaattgtttaaacctcgagagagcttccgtaactagcaggagatacaggctgaagagcgtgattgtttctatcgattgattgatgatgctttatcaacatttgaccaatctgtctccttagacttcccgcactatctggctgagacaaaaagtaggaccatatcagatatccatatccaaaaccacaaggtggtccacacctactcatattgatcataaaagaaccttaaactctgactgagaacaccaccatcaatcgcattgtcttaagattcagataaaactatagtttttcatatagaatcactctcctcactaacctaactagcgtaagctatcaagcgtatactatactgagatatgaaacttaaaaatagcaacttttacattgtgaatccaatacaaatcacttgcagttgcagaactaaaatgccaagaacagagtaaccctagactaaacccacaagggccacaacacctaaaatatcaaaattcacagtaaatcatcacgacccacgtttcaaaatccaaactttaacactacccataatactaaaccgattgattcagctgaatctaggacaaaccgatcaacagttgcaaaagtccaaaaaaggtaagatcttagagaaagacctgatgatcaggagaaggatctcgaaggaattgagaaaggtcaagaccattctccttaaccgcaaccgcctttccgtgacgttgacggcggctactagctccggcgaaaccatttgggccgcggtgcattttagcagaagcagaggagaggtaagagtaagagtaatcttcttcgtcttcgtagtggtattgatgaaactcccagaaagcagcagcaagctttctagaggaaacaacaattgaattagggacgaagctaatgtgcgccggagttgaagatcgattattattatgaatctttaacttttccaccaatctttccactttctgtctctcttcttctcctcttactttactttccatctttttatggcctaaaagcaataaagtttccaccttttttctctttaattcaatacagaaatcttaaaaaattctcagattttctggtgaatttgtttcacctgtaatttgaacgttggctacttttcatgtggggtttctttctttgtttccgtctaaaggattttttcttcttcaatggctacaatcagtttgtttgagtcacatcactatcactattaattatgtcaccagcttgagattgataaaaaagtactattgttttaacacgtggaaatctgggattttgggatgctgtaatattccgacagtaccgtaacttggtactttttggctttgtgtgtttgtattgtggtgtggcattttcctcgttctttgtatttgtcaataagcctcatccattcaagttccaaagcgaagaggtgttgtttctttttaatgtgtcaaagacactaaataaattagagggttagatctaagtaacgaaccaaaaacacataacaggctg

SEQ ID NO: 6864 - DNA, 1441 bp, Arabidopsis thaliana landsberg
ttaatcttcaaagtgtggagtggtttactcctcgtggcgcaccaagatcaggtcttacggtttttgtattccattgacgaatcgggctctctcgtcttcttgatggataactgcaataatcttcatcaatctccccacccgctgacaatggcctccgatgtgtgctgatcattggtcgaaccacattgtgcggttctttaccacatttatccgtttcaggctccatttcattggctctagttttctttttctcattaaaagacatcgcccacgccatttgatcctcgaacttcacttgtaaactcgacgggctttgactccgtctttgtggtctttcactaacaccaacttttgttagttccgctttctcagtttcatcgccaagtggtggctttgcaacatcactcccatgtttcttgagctcaaaacaattcgaaccgcttccgccagaatcctcctcctcctcacggtctacttcccaaatcggggcgctcatggcgttaaatggaaccgactcaagtgaagtacggcgatttctcgctatttcattagagtctgcgttctgcttagtcttaagaaatgtttctatctcaaactcgagcttctccaaagccgatccgttgccactctgaatcctttcatcaagccatgattccgcaatacatagaaccatctgatcttgttcatcccaacctttccagttcttatccaacttctgctttaaaccatgaatctccctttcgtaactcttgatcccttttgcaaactcatcacataaactctccataattttctttgacttagtccctctttccatctccttaatgcagttagacaacgtcgacttcacttccgagagctcttgtgccaatttcctatacaaactctcagaacgtttccttagtttccgctcatcttctaatgattgaaccgcagagcttaaccgatcgtgttccttcgtatcttttgacagcttttcttttgcgagttgcttaacgaaatcatccatatcgcgtttatcggcttgcttgcatctgagaagctctttgatccgggcacgtgagtgagcaagctcggtttttaaagattttattaaggagatattagcggaatgctgctcctcgaggctccagattcggttcagcactttaagaagttcggttgatgtcttgagattgttgttaggctcaccagcacgtcttcttccacggaactccaacgaacttcccggagaaactgctgcattatatggagccacctgaagaatgatccatctcaatatcaatcccaagaagtgagatacaaactaaaattcattctttgcgaccagctatttaatcggttattcggaaagcaaaaaaagagtttggactgaatgtgaatacctcgagtgagctgtcgtagcttgtgggagatactggctgcaaagcatggtcgtttc

SEQ ID NO: 6865 - DNA, 2363 bp, Arabidopsis thaliana landsberg
atagggttgttccccataaatttaatatcataggagacaaaagtgttaagtttttttatgtctgtatgcattcgcaaaaaatgtgaccccaaaagacaatagacaatgtgtataatacttgccaaaaaattaagagaaaaagagtttttgttgtgcatcccaaacagtttgcttcagcaaaaatcagttctttgaacgcttcaagtaaacaactatggctatgcttgttaggacaacagctcctgtaaccaccacaccaccacgccatgaaacccatccgcttcctctgtctcgagaatcacctttcttgagttgggtggtttctgagctcaagctccttgttgactcagtgaagtccagatgcagcctcaaaaccttttgtcctgtagacctagcaagagtaacagcaccaaccaaatcgctatccgatgtaatcaaaaccttatcaccttcatcgtcctcatatataatctgaggccgttgttccacattgttattgtcgctgccaattctttgcatcacaatacccatcagctcttcgaggttttcagctccagaagtaaaccgatgtacacggcccttaaggtcttcaaatttgaacgaaaacgaattccctagtcctagagatgggtaagaactgagcttccctatatctgaatgatgcatcattgccgacatttcactttgagtgtcagaatcatcaggtggctctaacgcaagagctgaatcccaaaatttctgcatcatcgtgtttgccatatcatttacagctccagaactgttctccaccattgaaatagctgcgtgagtaatctgaagaacgtctacacaagctgcagctgatccatctttatctataattggaagatgtagaaactttccatcatgcattgtatgcaacgcatccagaatcgttgtctctagcgatgcacattcaggattcggtgtcattaccttctcgacaagagtcaattcaggagataaattttgtgccaccactcgcatcagaatgtcctttgaagtcaagattccactgattttgttccccgtggaaatgattacagagttaacccgcaaatccctcatccttttcgcagcaactgaaacaggatctgatggtgctacaagtgcaaccttcgaattgtctgtaataatcgttgacaaggcgggtttaaacattctctccctcaaggtttcaatgaaagcatacggtgcagaatatccgcttccccattgcttctccacaccttccactgcagcagctaaagcactaccttgctctgcagctttctccatcctagaaatagcatcatacaaacactttgtaatatccaacaaagcaatgacttcaccattctccacaacaggcaagtgtctaaacttcccttgaaccatcttctgaagagcctcaagcgccaacgaatcagaagtaacaaaaataggattcctagtcataaccttagagaccaaagtttgatccggtctcaacccttcagcaatcactcttgtagctacatctttatcagtaacaatcccggaaagaagcgcacttgaatcagtcaacaaacaagcatcaacacgcctagcagccattcttcgacaagcatcgaaaacagtagttccttcaggaatagtaagagctttcgataacctaagcttcttcactgttctctctccattagaaggagcttgagattgaggttgaggaggaggtgaattgggttttgaggtgttcccattaacacttccattctctgattgtactggtttcttagaaggtggtggtcctcgccgtacagtagaattgcttctcctccctgatgttgaagaaggacccgtcgcttgagtactcatattcggtcaatctagggtttacttagatcctaaatccgtcaaaaatgattcctttagatatcaaactcgtctctgcaaatgaaaaattcaacctttaatgcaaaaactattgaaatttcatctaaagcacgaatctgaataaaacccaattcacaataaagacgatttgctctgagaatacgatgcaacatacacgaaaaggattctaatttaacggacgagggaaatgaaacaacttgaaaccctaaggatttgagcagaagttatgtgggaagattgggaatttagggtttaccttcttctttcttcttcaaggtctctctctcgagcacttttgttgccaaaaaacaaacggctcttaacaattgagttaagccatttatcgagttttcattggttgttcctgtttccgcgtgtgtggtggttcgccacctcctttcttataatcgacgactaaaaatgttaaatataatactaatatttctttctataaaaaatttcgttaaaaa

SEQ ID NO: 6866 - DNA, 843 bp, Arabidopsis thaliana landsberg
cgagaacacctccgggcctgattcacctcttgctcaaccggtttctgatggcgagagaacagtcaagaagctacggttatccaaagctctcactattaatgagggaaccactgtctttgatgcttgtcgaaggatggctgctaggcgtgttgatgcggttttgttaactgattcaagcgctcttctttccggtattgttacagacaaagatatagccacgagggtgattgcagaagggttgagaccagagcatactctggtgtctaaagtcatgacaaggaatcccatttttgtcacatctgattcacttgccattgaggctcttcagaagatggttcagggaaagttcaggcacttgcctgttgtagagaatggtgaagtcattgctttgttggatatcacaaagtgtctctatgatgctatctcacggatggaaaaagctgcctagcaaggcagtgctttagctactgcagtggaagaacggcattggggacgtgcaaacttcactttcattgatacattgagagagaggatgatcaagcctgcattggcaactataggcactgagaataccaaagttgcacttgtatcagcatcatatcctgtctttgtagcttacaaaaagatgcgtgattagcggattaactctgtgatcatcgcccatgggaacacgattcatgggattttaacttcaaaggacattctcatgagagctgtaccacagaatctatcttctgagctgacatcttgagaaaaggtcatgacgcccaatcctgtatgtgcatcaatagagaccacaatcctcgatgcattgcatataatgcatgatgggaacctcttgca

SEQ ID NO: 6867 - DNA, 1914 bp, Arabidopsis thaliana landsberg
gtacacttatcttctttcagttactaactaaataacgtgacgccatgtaaatacgaataactatgtatcaaattagcctattatatgcatatacactgataactatgtatgtaactgtgtcgttgtttatgttgattgtacaggaggatatgaagatataccaagatgaaatctttggacctgtcatgtcattgatgaaattcaagtaaacccctaacaaaaactaacttctcttctcaatcattgtctcgttccattacactaataatatcggaaattgctttcacaggacggtagaggaagggatcaaatgcgcaaacaacacgaaatacggtcttgcagcaggaatactaagccaagacatagacttgatcaacacggtttcgaggtcaatcaaagctggaatcatttgggttaattgctacttcgggtttgatcttgactgtccttatggtggctacaagatgagtggtaattgtcgtgaaagtggcatggacgctctcgacaactatctacaaaccaaatccgtcgttatgcctcttcacaattctccttggatgtaataaaattgtccataacatatagaaagaaaactttatccaatgataataaggaggcttgaatttttttcttttttttgtgcaaccactttttgtcttgttttttgttcaatacttttgtttttgttaaaaaaatttgtgccaaataataacaatatttttacactttcatagcattttttcatatagataacattttcaactaacgctgggtgtttgggtattcgagtcgaattcggatcaggtatttcaggttaagatttttttgatttagaaatttaagatccgttcggatcggattcagttcgggtctttatagacagttttatatcaccaatctaactatatataaaaagattaaaagatgtttttttgtttttttttcttcatttatcaaacaaaacaacaagacttttttttttctgttttacattggtcaacaaaatacaagataaacgacatcgtttcaatcattttccaatttttcccctaagtttaacacctagaaccttctccatcttcgcaagcacagcctgattaggaacagctttaccattctcatattcctgaactacctgagtcctctcattgatctgtttcgccaaatccgcttgtgacatcttcttctccaatctcgctttctgtatcatcaacctcacctctgctttcacacgatccatcgccgcaggctctgtttcttcttccagcttcttcgtgttaatcaccggaaccgccgtagatttcccctttttgttcgaaccggcatcgaatttcttaaccgtttgaaccgcgacaccgtttctcagagctgcgttaaccgctttcggatcgcgtaggtcttggctcttttgttttgatttgtggagaactactggttcccagtcttgtgttactgctcctgggtatctgctcggcatcgtcgatgaattgagagaaaggaacaacgcgaaaatcttattaatctgagttttgaaaatgagaaacgatgaagatgaagaatgttgttgagaggattgtgatatttatatatacgaagattggtttctggagaattcgatcatctttttctccattttcgtctctagaacgttcttagagatgattgacgacgtgtcattatctgatttgcagttaaccaatgctttttgggttggattcgtggtacaccatattatccgatttggctcaatggttttatataaatttggttttcggttcggttatgagttatcattaaaattaagctaaccaaaaattttcgtaaaatttatttcggtttcaattcggatcccttacttccagaacaaaaaaattcgaaaccggggttagccgaaccgaataccaatgcctgatt

SEQ ID NO: 6868 - DNA, 1991 bp, Arabidopsis thaliana landsberg
gaacaactctccatctctaattagtttccagacaatttttttactcaaaatcattttatgtcccaatgtcaacgaatgaatggaggagaaaaaaaataatcatatacatctattagacttttgaagaactcaaagaacatggaagtagcagaagacatggtgaaccaaaagtcaagtcaacacaagaaattgagagatacaaaaaagaagagaacctggtcgagggaagagaagcggtcagggatgagagcgtacttcttcttggtggcgttggtattatcggcaagggagagtgaaggatccgacggtgatggttcatgagattgagacgacgtcgttcccagagtcatatttctactgcttctgctttttccacttccaaatctctttaagaaattccccatagtcatctcctttcttcttcttcttcttcttcgaattggaattcagattttttttcttctcttgataatggatagaatctttttttttttgggctggaatatttaagaagactactcttcaagacgccaaggaaacatttattgcttcactgttctttataattttattaatttcattctacgcggcaacaatcattacttttctatgtcaaccactaattgttgttatctaagtatttttgacgcggccagatggggacttaaacatttatttactgaacccacatgagttcgaacgaaaacctagaaaaaaattaaactatatattatacactgaagatcttatgagatttgatataaatataggatcattaatgctaaaagaatgactttgtgaacaagatggaattagatactcttcttatgtgctaatctcaacttgcaagttaatttctccatttttgcactcaacccgtttctttacttgaagcttactttgctcaaattaaaacggcagaacaatactgggctgggccttttatgaacgttatgggctatattcctcttcaacttttcctcaagacaaaaactttattcaaattttactcatacatgacaatagcaattgaaatgtggtgccgttaaccggtatgatcaagctggaccggtccagagtttcgggtacatgtttggatctaatctgggcttcacacaagccatcaaaggattagccatgaacagattttcttttgactcgactagctcgactctgtccgtcgtaccaggaggaatggtccagtcgaacccttggagaagcctacccaacaacgtaacaatcatggacgttccaagcttagctccaacgcagccgcgtctaccagttccaaatgaaacaagtcgtaagtctggttcagtcaacaccacttcgttgccggttatatggcgctcaggcctgtagatgagtggctcatcccatgtcttagggtttcgaccaacacccggacgactcactagaatatgactgcctgtgatccacatcaaacaatcaatatattaaagttaataaacaaataaaataataatttgaaagattcgtatgtcacaatctacttattttcacttttcagtccaaaataataaatcaaaggaacaaatattctaatatgaaaatattgctcaaatcaagcaaaaataaatatagttagaattcctgattctacatttaaggagttggagtcaaatacgcctaaatgcataaattttggggaaaaatgagataccttttgggatgaaatagccagcgagagttgtgtcatgacgtgccatgtgagggacaaggaaaggattggtagggtgaagtctcagggtctctctgcaacaagctttgacgtagtttagatttggtacgtcggattcttgaacaagtctttcttttccgacaaccatatcgatctcttccaccgctttttctagaatctctctctggttcaacatttccgcaagtgtccactctattacattcactgcattatcaatccctactacatcaagatcctgccaaaaccaaaaagaaaccataacttatca

SEQ ID NO: 6869 - DNA, 507 bp, Arabidopsis thaliana landsberg
ttcgtcatcttcactcatgtatctattaatctatatatataataaacgacaagctttttttgctatttatctcatcatccaggctatcttcagcatgagtaattgtagtttcgcccctaaattttaagtgagttaatatgagagattaagtcgcaaccgttagattagatatgaaaataagggtttttaatcatagccgtcggtttaatactttggcctctgcccctgccttttaaatttacaattaattaatagaagaaataaaatcatgaccgtcagatcaacaacaaaaggaaggagtgtatatcaaccatctgattattaatgaaagttaagtcttggctgtcagatcttattaaaaagacgtggtggatttcaactgtccattttatgactttccttattgttcagtaaataacaaataaatggatcagtcgattatatgggccatactctcgaaaggttgggccatgaaattataattttgttgtatgttaacataatgtt

SEQ ID NO: 6870 - DNA, 2825 bp, Arabidopsis thaliana landsberg
cttgaatgaagttgcaaacattctttaagcttagctctcagacacagaccaattatatttgccatactacaatgctgaatcgtcggtgtaaacgttatcctgagttcatcacataacccaaaccagcttattgttaaagatcatgcaagtaaccacaaaaaaaaggcctcaacattagttaccaatacagagataaaaattggaactttcttctgatagtctctaaaaatcgattcaacaaagaatgatgtgtaatataaactgacaggatgcgatcgagcttggcatctgacagaaacagattcttcagagacaacccttagctgctccaaagtataagggtgttctggatctcttatatctcttacatactttgtccattttcgtcaaagattccaaaaatatacattaaaccccccaaaaagaacaaaatccaaaacaaaattgatctcaaaatagaaaaaggatatcatatatttcaagaggatcaacaccatcatctctatattgatcttctctacgaacaagcccttccttcttagcttgcaccactggattcgcgtttatcagtcccagagtcattttcttctctctttcctcactcttcgttctctgtattttaatcagaagtgctctgcttacaaggtcaccggttcgaagctccaacatttataaagtgtacataattaaatgtttctcataaagtgtttcttatttaacaaagaagcaaatttcatttatcaacatttgacaaaatcttcttaaaggttttgatttttcggtgcaaaacggtaaactacaactccgattctagcaccttcttgaggatcatcacaatgtataacatcaacatcgaagaatctccgagctttcttgaaaaaaatcgattctttcttccatctcttgaggtgagccataagaaacactctctcggatgatccttctaggagcagaaaacgcagcgttttgaggagaggttcataaagatgaacgtgataaaccacgtcagacgctagaatcaagtcaacgttttgacccaaactttccacgtcatcgatttcgccccaacgaagagacgccacgtggactttcccaccgaacttagccacgacttgagcgtttgcgtcggcgttgaatttgagattctcgattacgtttgggagatccgtcaccgtgacattagcacctagtgtcgcagccgctgcgataccgacgattcccgttccagatccgagctcgacgatgttaatcggagaagaagaatctgaaccgtcggattgaaaactcgagaaggtgcgattgagaggactaatgtttgggtcacgacggtagttatctaaaagcgtgacgagagttgttgcaggtatccagagcttgaaggcaatgccttgtgtcggtaactgacgaatcacaaccgttgattcgatcgaattgatccggtacttctgaagctccgattctacgtcgactactttttctccgatgttaacatcgtcgtcgtcttctcggagagccattgattgtgaccaatcctcacgacggccccgctactatttattagggtactcaaatttggttacacgtggagggttgttattggtgatgacgtcatcaaatgtaattgaagaagcctctaagatagagagagggtttgaaaatgtgagattcagagtttgtcagcgagagagacgaagaaagaaagagaggagaggtggaagatgattaaggcagtgatgatgatgaacactcaaggcaaaccacgtctagctaaattctacgattacatggtacgatgcttgttgagatatgtttttcaatttcggtttcttcgatcaaagtgaccgattttgtaaaattgggtttttgattttggtttttttggatttcagcctgtggagaagcagcaggagcttattcgcggcgtgttttcaggttctcaatcactttctgcatcttacgatacctaacaatttcataatctgtatcgctaagatctgggtcgatcgtgaaacttgagctgaaattttgtttttttgttttgtttataatttacagtattgtgcagtagacctgagaacgtaagcaattttctggagatcgaatcattgtttggaccggtaatggcgtcttcgttgtttatgctatataaccacaatacttagtttaacaaaaaaaaacgttgctttggacacttattatttagtgtgtttgcaggactcgcggcttgtatacaagcattatgctacactctattttgttcttgtatttgatggttcagaaaatgagcttgctatgcttgatctcattcaaggtccgtttttaatcactatggttcttagattgcaatataatctgaaatggcatggtgtaaaaccttttttccattttcaatttttgtgctttggaatgagaaaagtttcatagatgtagcttgttttgaacatctttaaccgtttagcttgactatatatagaaagagggaatttggaatcagagtcttgaatagtagagtttgtgcagtgtcttggctcttttattaaagcttgttgccgtgaatctagtacaaatgcatatgagtggtgtgcgagctcagctggtctgcataggatgtgtttaaaagagaactgggtgttgagtatttttggattggtattgggttcagtcgagagtagagattctcttagatcaaattagttcttcgtttttgtgaatacagagactgacttagcatgccatcgactgatgttacatatgaatcattgtctattcctctgctcgtaaattcccctcccttaacgctttgaaaatgtattctcataaaataa

SEQ ID NO: 6871 - DNA, 742 bp, Arabidopsis thaliana landsberg
acaaaagaagaaatagctgcagctacagataatttctcttcccgtaaaataatcggcgaaggaggatatggaaaagtatacaaatgcagtcttgatcataccccagtagctcttaaagttctcaaacctgattctgttgaaaagaaagaggaattcttgaaagaggcaaattactagtagtctcatggcctaataacaacagcagcctttaacactctgagatctgaaatcaactattttactttgcagatctcagtcttaagccagcttcgtcatccccatgtggttcttctccttggtgcttgtcctgaaaatggatgccttgtctatgagtacatggaaaatggtagcttagattgtcacatctctcccaaaaaagggaaaccatctctctcatggtttatcagattccgaatcatctatgaaacagcttgtggtttagctttcctccacaactctaagcctgagcccatcgtccaccgtgacctcaaaccaggcaacattctcttagacagaaactttgtcagcaaaatcggtgacgttggactcgcaaaactcatgtcagacgaagcaccagacagtgtgacggtttacagaaactcgattatcgccggtacactctactacatggacccggaataccaacgaaccggcacaatcagaccgaaatcagatctttacgcatttggaatcataaatcttcagcttttaccgctcgacatccaacggtctttttttctgc

SEQ ID NO: 6872 - DNA, 1886 bp, Arabidopsis thaliana landsberg
tttgacagataattttatatttcaagttggattggttttctgctttttctacactactgattatgcaaagaacatttctgtccaaatgtgagaataacttggtctccctgtgattatttattctcttacttttaaagttgtagtagaaaagtagcagcgcgattggaccgaccaaactcggtgaaggtgttgtttatgggtctttgatactaattgatactcctagtaatgtgctatgtgtgtgtgtgaatctggaaaccatcaaaccagtgagtcatttatgatatatttacaatctttaaaccctatgcatcttgaaatgttgctgcaggtatatttagtctgtctccatcaaccgagtttacatgcagagagatcttgaggtgcttatctctaaccaaatatgggattgatgcagtactattagtggtttccttgaggaagaggctaacagaagaagagaaatctgcgcttttggacttgtactccatattttttgttaactcgcttcaaaacctttttccatatacaattattttcttaggtggagactaagctgatagagacacaaactagattagagcagcagctgaaagaatcccaagctgctaaacttgaaatggaaaaaaagaacaaacagagtagagaaacattcaagcgatgtagttaataggctcaggagggatctcgagagagcgggaagaatgacctagcaagccagagaaagttccaaaaagtgcatcattatgtgattgatattgtgatcaagaaaccaaatttgatgctagatgaattgagtggttttttttttccctccttagatattgtgattcttatctttgagactctcaagttgagagatattgtttcagagaacactgtttctatgcaggagttactttttctgcaggttatctatttcagtaatgatgaaagcaaaaaacttcagagattcctgtttagttttgttggatcactacaattgaagatttatatttggtcaatcatagtggaaacttcaaggttcttaattcaggcaacataaaaagataaaagagagatatagcaacatgattggaccaaccaaagattgttatctttctcttagattcctttcttgtcagactccttttacttctcaaagttattcttttctttctctttccttttatggaatgaatattctgttttgtctctataaattacaaaactatttctttgctttgtaacttgtgataacagttcttgattattttttacctttctttagtcatttcaagaaccatcactagccattagcttttctttataagggtttagatttgaaacaatggcgttggattcgtctgcacttcacgtggtgaatgattggaaacctgagagaactctagttttactcggtcgaacgggtaatggtaaaagcgcaacgggaaacagcatcctaggtaaaactatgtttcagtcaaaggcaagaggaaaattcattaccaaagaatgtaagctacataaatccaagctaccaaatggtctaaccatcaatgttatcgacactcctggtgagtttgtttatcaattcacacatattcttataacatatatacactataatgagactaagaccatatctaatggttgtctctatttttactcctacggttcctaaaaaataaagatctctatttgttagatgaaaaaatagagggaaaaatagagatgagttggagtcaaatagagtcaaaaatagagtatagagataaatatagagatgggttggagatgctctaatataatggtactttcaggtctgtttagtgcttcctcgacaacggatttcaccatccgagaaatcgttagatgcttacttctagctaaaggcggtatcgatg

SEQ ID NO: 6873 - DNA, 2349 bp, Arabidopsis thaliana landsberg
atatgcgagcccacttgagcctatgtcccttaacagaaaagattaatatttgagcccatatttgagcccacttgagggtataggcctttaccagaaaagaaaaatatttgagcccatatttttcgcttctgataagcgtagaataataatagtcgaatttaccaccttccttttcgttccttttttttcttctctcttccgaaacacctctgccacgcgagtactctccacgcgcttcaacagtcgtgaccatcttcttctccgatcgtcttcaccggttttcttgggcattccctcgtgcgtaagtctctctcgtttcgtttcgtctataactcccacgggttttggtgaaatttgattcctttgtcctgttccctgcagaattgttgcaataaatacgacgaagatggttgcgaataataatactagtagcaatcgcaggaagagaatcattactgaaggcgacatcgccactcttttgctgaggtaaaaatatctcctttttttgttttctctttccgaaaacgcaagtggatttgggtttagtcagcgtggggtttttgatttattgacgcagatatgatatggagacgatactgagaatgctacaggagatatcttattgttccgaaaccaagatggactggaatgcgttggtgaagaagaccactaccggaattactaatgctagagagtaccagttgctatggcgtcatctttcttatcggcatcctctcctccctgtggaagatgatgctctacctctggtacttattctgtctctcctctttccacttttgatgaattgtaaaagactcaagtttatgttgtagagttagttagttttcttcaataaaaactcactactactttgtgttatcagtatcatctagaagtgagtgtgatgaaatactagtttatgttctatgtggcagtggatactaaaacttctaggtagcattagggatcgatgagtgtctctcgctggtgtagtttacagattttttaaacgaaagttgcctgtgcaggacgacgatagtgacatggagtgcgaattggaagcttcccctgcagtcagccatgaagcatcagtggaggctattgcacatgtcaaagtaagaacggaatcatagatttcattcccttgacagaatttcagaatctgaagtccctaggctctattcaggataacaccttgctgttttcttaatgattagggtgttggttacttgttctgcatatcaatctgtgcttatccagagttcccattttatccaaatatcattaagttttcgtttctcttgtattcccaggtgatggctgcttcatatgttctaagtgagtctgatatactcgacgattcaacagttgaggctcccttgactataaatataccttatgctttgcctgaggattctccggaaccatcagagtctccttggtcgtcaagagggatgaatatcaactttccggtctgtcttcagaaagttacatctaccgaggggatgaatggaaatggttcagctggtattagcatggcttttcggaggaaaaggaaaagatggtctgctgaggaggatgaggagctgttcgccgctgtaaagcgatgtggtgaagggaactgggctcatattgttaagggagactttagaggagagagaaccgcctcccaactctcgcaggttgtgatttctcttattcaatattgactgctcttttttcattagtttctttgaagtcattttgtagtgtatcttatagtcttgttctttgtattacaacctgtttatgcatcattatctatattctgttgacgatgaatggtggatattaccttccctctttcgtgttgttggaggtggtggctctttacagacgaagtaccactttggtaattactctagaaatatatctgttgtcatctagtctggtatggacgtggggtttttccccatttttccgggttcgaatcccggcaacagattctttggatgatatgagtaatagtcttttggcaatcatagaaggtagctaataagactaataagactaagttttatgatatttgtatccatctttgtattttttacgcatatactttccatctgataaaacttaacaatactttagctacttggacgagcatgggacgttttgcaattgcttactctttttccgttatttgtggtaacaactgactattttctttgtagaggtgggcgcttataagaaaaaggtgttacacttcgacctctgttagccaatgtggccctcaagggactgaagcgaaaccaaccgttaaccatgcattatctttagctctaggaaaaaggcccccctccaataagc

SEQ ID NO: 6874 - DNA, 1939 bp, Arabidopsis thaliana landsberg
cggatgactgaaggaaacccaataacaagtctcttccgaaaggaatgctcggctagggaaaagagatcaagatttctgaggcatgagttgacgacttgatctttacattctgttcatgaaaagaaaatcgccagtcaggtacataaaaacaaatatctatcaatgctcgttgagatgtgagcttccagaggaaaaaatggcaagcaagagaaagatatgaatcaagcggaaattgtaattggcaaacagtataaagactatctgaacaagttgttaaaattgtgtaggaaacaatgaattatgcatttgacatctgaaagaagttaaatgataacttcatttcttagcttctcaaccttccgctagtgtctggaaaactttttagtctttccagtataaaggaatgcccaatagcagtatacttttaacttattattcaaggagactgccattacctgataaccgcagtatctcaaatatataatcagcaacattttcttctaccataacttgaatttgtttgcttggtgtactctcttgagatatgtagtggaagataagatcaagggtttttatttgcacctcgctgtcagtggaaagcaacggacctttgattgcctcagcaaataagacatttaaacaaggcctggcggctacattctcagcagtctgcatagggtcatcatccacttcatccaagctcatgctgctggcactatttgaatgtgaatttgctaaaagaccttgctgggccaagatggtcaacagggctacaaagttcaaatttctctgttagctgacataacaagttaaaaagaaacaacaacaacaacaacaattatgggagactcaaactgagaatgtactactgctataagaaattcattaacaattctatcatggttttctagtcagtctatagccaatgacaacatatcaccaaacatttttccaatggaaaacgctgaataattacttaagcgtcacaagactccaaagtagaggaactaggactttaggatatgactatgcaaatctattcatggttgagttaaagatgaaaacaatgtctaccgcataagaacgaagtagatatataagctcatacgaacctacacaattcaagcgaacatcatctctctgtgtctttgcaagagcctccaaagataggcataaaagcttaggacacaataaagaaagaacctcaattccatcaacattttgttctgtgaactgtagagcagaaaacttgtacagagcaaaaagaatttcaccacggatctcctcactagtatgagaaaaaagataaatcacaacagtccccatacaatatagtaaaaacagtggtctccaaaggtggattatgcacattacctcggtaactgaagaccttcaacgagttggcaaacaagagcttctttatctctgatatgagaattgatatttatattctcacaactcataagaacaccaaagcagtgaagctgcaaaacacagacaataagcaatctatgagagaatatagatttcaagcttatccgatagattcacgaaaatctcaacgagaatccccaattaaaaccctagaaatgtaacaataccatatggagctgtcttcggctccaacccaaagcaccagaagaaagctgatcggatattctctccacaaaatcctcaccgattgaagattcctcaacggaacagagaagagagatcatatccataatctggatagcgattggagcatcatcaatcgaagagagagcgtgaacgagaggcgatacgagaaagtggatatgagaggagagtaaggttcggaggaagataggttcagagatagcgattgagagctggtgaagcgcgtaggagacatgtacagtgggaatgcgtggatcggagacgagattggagaagcagattaagcagaatgttccccttg

SEQ ID NO: 6875 - DNA, 2035 bp, Arabidopsis thaliana landsberg
acccagctactcttttggatgatgaccctctgcagacatttgagattgtagtctccaggccatgtttaaaggtcttatttgctgaggcaatcaaaagtcccttgctttccactaacagcgaggtgaaacatgccgtagtagctaaagactgttttcaaagtcggaccagacaccacaacttttccatgtatacaattagctatggtctgagcctccttaccaaaatctagatgtaagtttcaagagcttttggtgcggttttgatctttaccattctggtaatctttcacatgtacaaccagaagacgctgaaatatccatcccatctttcatattgagctacacccgggaaccttagaaatctgtttctccttcatccactgcctcaaactctcagcttcatcaaaccgacctgcagctgaaaatagaccggccaacgttacatagtagctagcttttctcggctcaagttgaatcagcttcctcgccactctttcccctacttctacattttcatacaccttgcacccactcaacaccgcacccataacagcctcatcaggttccacgggcatatcttccagaaacttctctgcttcctccagacgacctgctcgagacatacaatccgccacactagcataatgtttcaactcaggaactattttatatccttgcattactctaagatacagccaagacttttccacaagaccgccatgggcacaagctgataatacaccaagaaaagtgacagcattgggttcaattccttccttaagcatctcttcaaagagttttatagccattaccacgtttccgcccaagccataacccaatataagcgagctccaagagatcacatctcgtctcgacatatttacaaataccgtgtgcgcataggccagaatcgagcactttacatacatatctgttatagcattgccgagattcaagcccaagcaggagcatctcctgatacaccatccatggacgctcttcccgtgcttcaacgctccaagttgtccacaagccataagtaaactcaccatcaccactgaatccagcgcaaatccagaataccccatttctctgaacatggctaaacccaacatagcttctccttgctgaacatacccaccaaacatagctgtatagagaacagagtctctcacaggcatatcatcgaacaacttacgtgcatataaaattttccccatatctacatacattataaccaaagccgaactaacaaacaaacttgagctaaacccaagtttcaaacacagaacatgaatcaaatctccaaatttcgcttccctagacgcagagcaagctcgtagaacaagaggaagcgtaaaatcatccggtctaacacaagactctcgccacatacgaagaaacaaatcaattgacttggaagcaaaacccgctctagagaactcaccgatgattatattccaagagaaaatgttgcgataaggcatgtgccagaagacagaaagcgaagtgggaaagagatgattctgtttggagtaagcgagaacgagcttggagctgagcacaacgttggaatagagaaatgtaccaagaaggtgagcgtggagatggcgtagatgtttagcgtttggagaatgatgtagaagccagaagagatcaggaggattctgtgtagctactgataaagctcgagctttcaagaacattgcgaatagactctttgtaggagacgagtacaaggaagaggaagatggtaagtgcatcccatcacaaaatccagagaatagtggaagatgctctatgatttaatccaaaactttattttatgattttatatcaaattttaaaataaggaactcttaaaaggaatataactgtaaaatcatttgtgttgggacgccatttttaaaagttggaaatttcccagtctctctcttttgcgctctcacaatgttctttcaacactcacagttgcaaaactcccagcatctccttcatgaaactatggggggattaaaaccatcaaattttttcg

SEQ ID NO: 6876 - DNA, 2497 bp, Arabidopsis thaliana landsberg
attcttatactattacatagttgttggaaagagaagatgatcttttctcctaaaacattaaatatatattaagaaaactgaaataatatttataatcgatttctaattggtcgttaaccttttagctttccttaattcaaacgtttcaacatgtacatctttcttaacaacgctttaatttcgttgagttgaaacagtaaaacattaattttgtgcgtgttatgttgaaaatagctagggaacatcatgaaaattggagacgacaaaaggaagaagagaattcgtcagcttcgagtccattaaataatgcaaattctgttttgcatatttacattaaactcttgtccgcaatgatagatttacatacggattggtcgttaatgatgtaaaatcacagcttagcataaataagaccacagattttttttttgacatttcttggtaggttgcgtgaaggcaaaaacctaatgagtaaaatattcgcttagcaactatatcaccagtaatactttgcaccttaaatttctattgtaaatcttgaccactttagttctatttttcttaatggtttttgtgaaaaaaattagcatagttgatcagcacgtgtgctacttatgccttgcctaactcgattcttctccaccatatataataaggggttgttaacacaaatacggagttccaaccattactttttctgttattaagaaggtccagctttattagttgtattttgtgtataacgtaatcttcttcatgcatgttaagttaatattggttggtaaagatatgtagacaaatatatcattatgcgagcaacaattaaagtatgtagatttttggcctatatatcaccgaaaattaagagcaaaacacacatggcgataaccttttgttccataaacgtagatagtttggactttgaagttgaaagttattatttcattacacgaaagaaaattatttaacaacgataatggctaaatgatatgataattagagaaatacaacaatatcattgttctttttgtaagtggaatagatagatttttaagtcaaaaaaaaaaaaaacaagaacctaacaaatgtcaaatgaatacaaaattttatatattttttgtaattttttaaaaaaatattgccaacattaattatcgtagacagaagaatccaattcacatgaacaaatacgtttcataataatcgccataataacagtataaacatgaacaaatacgtttcataataactaattcgcttccggcaccactgactcacttaaaaccacttgaaagttcttcgtcatatgaacattcccgacgagttgactcaacacaaccgattccgttacttccgtaaccgagttcttcttcatcatcgtcgctctcacaatctcagtatgcatggagctcgacaatctcctgattcctttagctccaccgatcaaaatctccggattaacctcggaggcgttcttgtgttttgagaagaagaagaggactgagtcggggctccggttacgaatccgggtaaacgggtcaccgatgaaaaatgaagttttagcgtcaacaagcataacgtgtttgaaactgcgtcgtactcgaccaagaagcattgggtaacaagcccatctcctcaagcttaacggaacttgatccataaacccggataacgagttttcaggatccaactcagttacgtcgaaaccaactatcgagccatgagtcagctcgttcgagttataattagctcgatgacgactcttcttcccccaaataacaggctcagatgatgatgatgatgatgtcatcgaatcattccgatgaacatgaacgagctttaagaacgagttgttctcttgttcgatcaactcggtgaatattgtagtggatgaaggtgaattgaagagtaaaacgacgtcggattttgaagtaactccggaccggtgaagcacccgtataaagagacggagaacgttctccgttggaaacggaagcgatatgagcaatgattacatcgtgcatgctgttggttcctcttagaaacagagtacccattccttgtagagcgaaacgacgagagatgatgttgcggttgagaagaaatcgccggtgaggagaagaaatggcgggaaaacgagaggaaggttcttcgaatgtagagagagtgaagaggaagagagtgaggaagaggaggatgatgcagcttgagattgtggattcagccttggagaggagaagacgagaggataatttggagcggaaggtagtttttgccgcagaataagaagaagaagagtcgttgttgttgtggtcggggaataggactaagaacaaacccattcctcttgttgtggatctttacattttgaaaatgtataaagagcataaataatttacaaatgtagttagatctgattaattaacacatttgagttttacaaaatgtagatagattgtatatgatgtgtactaatagtctaaaaactgaatgtttc

SEQ ID NO: 6877 - DNA, 1401 bp, Arabidopsis thaliana landsberg
  unsure (1)..(1401): unsure at all n locations
gcgactgagtattagccgtggatctcctaagaagtctgatttgagaagaaactctactccttggagagaccctccgcttctttctcctgctgctttgacggatttcgatgctgagagcggttaagacaggtggtggaacacgagggaggagataagcagctacctcgacttggcaacttgaagtggccgctgttagagccaagcaaagctccatgtcacggcaacctcttttcacaaaccattgaacaacttgcatgcaacctctctctgctgctctcattaagggacccaagaaggcaatggcattaccttcttccactaggcacttcattgttccgattttacaataatgcgaggcaaaaccaagagctaagtccacatcaacatctaagctgttcctttgggcaatctgctccaggaaatacaatatttgagcacgaaaagagaccttctataagtctagaagcaatcaaaagaatggaagcttacctgcaataagacgcggacaagttctgtactaccaaaacgtgaagcttcaaggaaacattggttcacattatctgcgccaccttcaacaagcataccgagcagtccctgtataacagtagctgacatcccagatgcccagccaggatcaaacgagttggagaacagagtgagcgggaaacaagctgcatcaaaggcctcagtgaagtctcttcctgagagatggtttcctgctagatctaagaacatcttgaaagcagaaagttgtagttcaatttcagcagccgaattttggctaactctatcctttgccccctggcatcgggagtggaaacctatacatttgagagcccattcagtgaacttctgaactttggcaccagcctctgcttttagaatctcatccccgttgcactcttggagacgctcatgcaacctatacatcatgtacaaaccaaatatgaactcacatgttaaacaaactgatttaaagttttcttaagcggaattgttttgtctatgacatttagtaacatcagcgcccacaaaactagcagtgtcatttgattatcctgacaaccaattacatacagatataaccaaacactataaccagtaaggaaaaatttgtgcagctacaaatatacctaaggttcccgtgagtgaagcaaaataaaaagaaacagggaaaaatagaaacagccaaccagtctaagcaccccaaatctgctttagaattatacttaaagagaaattaaaagattgcatgattacctttgagccataacagttactgtatcagaaagactcattgtccggctctggcaagcagagacacangaagcgagaaacgaagtcctaagagtagctctagtaaagtcatgagcaccatgacatatgatcttcttaatcaaa

SEQ ID NO: 6878 - DNA, 151 bp, Arabidopsis thaliana landsberg
aaaaatctacccaccagtaaagagcctccccaaaattattcttccatacgcaagaaccaatagaactcaaaacctatccccccctaaatatgccaccggccgaacaacacccacaccaaactccatcaaaagaaaaactacctaccaccac

SEQ ID NO: 6879 - DNA, 479 bp, Arabidopsis thaliana landsberg
tcaggtcgactctagaggatcccctatccgttaatttaaatcgtagtatttatttgcttattttcaactattcgtagaaattagaaaaccagtgaagcccaaaagcagaatccatttgtttcaatcgaaaatggcggtaaggtgatgctccaaaaccgccataaggttacgagtctggcttacttccacaactgcaacagcacagccttgaagctgtctcactgcttctacaagctgtcctcttagcctctgagacagtaaccgaccgtccgctttcatgcactctctgtacagcggcatgtacgctattgctactcttagcggtgcaggaaggtctcttaaggatatcgctgactccccttttttcaaaactctcatgaaattcatgaaatcgtcatggctttctctcattcctttcttaaaagctgactccgaccagtgttcttggagaaacgattttagatctgaaggaacggatt

SEQ ID NO: 6880 - DNA, 988 bp, Arabidopsis thaliana landsberg
attttatcaagtatttaaaacgagttgtgttaacttagatgcttattccattgttgctcaatgtaaagaagctttggccaaataaagaggaaggtgatgctccaatatggtcatgagctgatgatgacctttctttacttcttctgtgtctacatcgaagccttcaagctgtgttgcagcttccacgagctgtcctcttagcttttgtgagagcagccggccaccctcatccacacactatctgtacagtggcatgtaggcgattgccactctcaatggtgctgggagatcctttatacttattgcagactctccgagtttcaaaactctcatgaaattcatgtaattttcccggctttccttcaatccttggttgaatgcagcttctgaccactgttcttggataaacgatttgaggtcggaaggaacagactcgtcttctgactttgcaatggtgtctgcaactgaatattgtggctgctggatccccgaggaaatctgatttaaggagaaactctactccgtgaagggaaccaccacttctttcaccggctgctttgaggatttcaatgctgagagcagtaaggacgggtcttggaacatgaggaaggagataagcagcaacctcaacctggctgcttgaagtggcggctgtgagagctaagcatagctccatttcacgacagcctcgtttcacaaaccattgaacaacttgcatgcaacctctctccgctgctctcatcaagggacccaagaaagcaattgcatgaccttcttctacaaggcaatccatcgtttcgattttactataatgcgaggcaaaaccaagggctaagtcaacatccacgtctaagctattcctttgagcaatctgcaccaggaaaaagttcagttagattgcacaaagtaacttaaaaacagtcattaagaattagatttacctgcaacaagatgcgcacaagttgtgtgctcccacaaagagaagctt

SEQ ID NO: 6881 - DNA, 1247 bp, Arabidopsis thaliana landsberg
cattgggttcccctttacctactctcctaagctttaacagattttcagccaattaaccctcaaccgcatttccgtgcaagtttcagaatttgctcagtctttatctcgttcttcacctcgtttttcctctgtatcaatccccaaatgttccatccctttggccatttctttctaggtttctttaactcaacactatcctgcttcttcccctcaccaccagcagcaatacaaatctttcctttagaaactaattctttactctctggtttgacatttttaatcgaataccaattcgaatccctaagttccttctctgtaaccaataacttagcaccatgaaacaaacctacagtttcaggtgatacctttgcattcgatatacctctcaattcatcaacctcaagcaatccttgtctcttaatcgaaaccgaccgatcaaaactccttctccgacgagaatccgagtaatagttcttcgtttgaaccgtcccacctggactcttctccttctcctctacttcttcttcttcaacaccacatttagctttagcatcttccgtcacagtagacaatgtcgtaagcttgtgatatgatttttcaatcaagcaaccatcccatgaagacctaggtttctcaaacgagatcctacctccatcaaaagacaatctaggatccacatcaggagagtgacgaccattcacaattccggcgaatctggaatctgatttttcgtcatttctcttattcaatgtaaaattcttcaatctcctgctcaaaaccgatgctatttccttcaaatctttgccattgttcttcttaatctggtttctccaatctagatctatgaactccttcatcgtcttgttctcttcgacgatcttcctcggcttgccttcatcaaaacctttgatatcttctccatcgtagtaatcttcttcttcttcttcctcttcttcctcctcttcttcctcctcttttaaatctggaaccagaggctttcgaatcgaactatccacccgttcttcgtcatcatcgacaaacaagtccaggagagagcttgcgcttgacctaacgtcacatgatctccgtcgcggctgatccgaaacggagactgatgcgttacgaacggagtatgatcgaatacgacggagctcgggagtctgaacggcggcgagagaagaagactgagcttctattgttacgagacgttcacgaagacaggaagcgcagaaaccgctggttggttt

SEQ ID NO: 6882 - DNA, 1007 bp, Arabidopsis thaliana landsberg
agttctcaaatgatctttaaaggaaggtttaaaggataaagatttgtcaatccatacaccataagccgtagataagtgcaagtcacttctctccattccatcatttaaggcaacagatacggttttcgctaagactgcgttgaggtaatccgatgagggtaacatgatgaatgataagatttgttctttggtgacgcagttggaaccagcggcaatcaggcagagcaaaacgttgattgacattggtgagaagacaaggttggagccgttggcaacggtagcgatgacatgctttgctagtaataccatgacgtcggtttgattctccattgattttcccaactccatggtttgttctttcttttttcttttccaaacgagaaagacgtggggacgaatggtgatgaatatcatatatatcttgtttcaaaataaatttgaatagtcatcgaactcatcaccttggccacgattacaaagtaaatcttatttaaagtcgaaaacaaagatttgtggggttagaaagccaataagatggcaaaacaattttttttctaaatgtttcttcatagtatttgccattttactaaatcgaaaacacaaaaactatttaaaaataaatcactagtgctaatatatgcggtatgttctttgatttgaccccatgatttgatttggttgagatcttggaccaaactcctaccaatgaagaagaagaggaggaagaagaagaggaagaggaagagtattgattacctcatgcatttcagtgcatcttatatcgtgtatgcttttctctacttaacaacattagtattatcatatcttatggtttgtgtgactaatcagacataacatttagtatcagtaattggtatccatctctcattgattcatcatgatcatgtcaaattatctgttgacattcataagttgaggaatattggagaaaaatagtaaaaactggatcatagacacacggccctgttggaatattgagagagaat

SEQ ID NO: 6883 - DNA, 2293 bp, Arabidopsis thaliana landsberg
  unsure (1)..(2293): unsure at all n locations
cggtatgcatccagcagaaagcgttgcttcacctgttnnnnnnnnnnnnnnnnnnnngatggaatatcaaggagttggcttgagatctcaataccctgttgagagaaaatgggctcttggacttcaggttttgatattttctgtatttatggtataaagacttcagcttttgatatatatgtgattaatattgtaacaatttgatcgcacagtctcgggctcatccccgtgaaataatgacggaagtcctgaaagccctgcaagatttgaatgtatgttggaagaagatagggcactacaacatgaagtgcagatgggttcctaacagcagcgcagatggtatgctcagtaactcgatgcacgataacaactactttggagacgagtccagcataatagagaacgaagcagctgttaagtcgcccaatgttgtcaagtttgaaattcaggtaaatcctcttctccacttcatgatacatatcggtttcccgtacgacattgtttctgatgtgtgatttcgagtgaaagaaagctttgtgtattagtgtccatggccatttttgtaactgaattagaactagagtgaatcttcatgaatctaactatcaatcaatattttctgggcttgatgacgtttgttattgttgatggtgaaacagttgtataaaactcgggacgacaagtatctactggatttgcagagagtacaaggtcctcagttcttgttcttggatctgtgtgctgcttttcttgctcagctccgagtcctctgaatactaaaccggacctcttcaagaataatccccacttattccttttttttttttttcttattcgtctaagaaattatttagaaaacgtaaccctttttttcttcttctctttctttctatttctatatgcgtgctctactcaaatacctcttttaacttaaatgtaagactgagcaagagtaaaaaaaagacactttgtacataacttgtagtgcatcatgccaccaagattgatttttgtttttgtttactccatatttcttatgattaaaatcaataagttaagggaaagacattttgacaaaaattgaaggaaagatgtttaaattagtttcattgaaaacaaattagcaaattcagaagtagttgtttttgtttcgtgtattatttgatgggtcaatattacactatattttttgtgtaaacaaattagcaaattcaaaaatagttgtttttgtttttgtcatcctactaatattaagacattgaaaaacgaacatttaggatgagcttgatgtgtttatttcgaactaagatccaaaaactatacaaactcaaaaacaagcccaaaaagaatttcaaaagtttccaacgtgtggttttacctaccagttaatcttctcctgcaaaaaaaaaaaaaacacatcaagtgtgagataaactctcacaaaaatacaaggaaatttgtaataataataaaaaaaagacacaattatcttttcgtaaacctgaaattgaataatttcacactgacttgggcttttttttttaaatgaaaaattaaacaaatatggactacaaatcatgatggtaggtaaaaaatgtatatatatatctttggctaaaaattctggtaatttaattcgctttttccccaaattttaacctctctctattcgtggtggtcttcgaacaccaactctaacatcactttcagtcctccgtaatatttcattcatcccatttgtttgaaaaatcttcggattcgccccaagattcgtcaaatcctgcatgattttatcaaaaattaaaattgaattccaactgccggtttagatggtaccgggttcaatttgacttaccatatcttcttctgttttcttgtgattcacgccagagaacaacaacacatcagaggggtccagagaaacgtgcggcctaagaaacggtttgtcttcgtttatcgttaacccgaaagtgttcttagcaaaagccatgctcataccactcacgtggctcgcagatcctggctggttataagtcagcgttgaagctacgtcattttctttcctcttctttgtccctgcccacgcgaacccgctcgctggtgccgtggtttgagacaaactgttatacggaaactcgcttcgtgtcgtcgcctgagacgtctctgacggcgtctggacaacaatttctgtttcggcttccttctttgtttcctgctgaaataatgaacaaaaattacaaatatcgaaccgggaaatagactcatcggtttattccggtacatgaaacaccat

SEQ ID NO: 6884 - DNA, 3254 bp, Arabidopsis thaliana landsberg
gtgcgttgttggataaaatgcaaagcaactaatttttaactttttaaacccaagccaaaaaggaccaggtgtgcatttatatcgaattgtaaactcatagagtcaaatcaggactcatcaatggcgaaacctgttgccgccagtttcttgacgcaggccaatgcattgttcaagaaaaacttaacttatcaggtttggccaaataatatacatgcgttatctatatatacgtggaaaaaatgtaattatatcttgttaccattgatgtagaaacggaacatatggagcaacgtaaggctgatcgtgatccccttgtacctctgtgtggttctagtatgcattcaagctgtgttcgattcactggttaacaactctgttgataatcaatgtggttgtcgatgcgccgacgacgacaaaaatggagatggcaaatgcgaaataaaaagttgtggtttacaatattcatctcaaaaccaagccgtcttttgtgctttccctaaccctccaccgttgcttcctttgttacatattcctccttctgttaatcgtgactcgtgccaacgaaccggatcttgtccagtaaccatacttgttactggaaataaccaatcccttggaacaagtatacatactttccctctttaatttccatgttttttttggatatatatatctatgactatagaataaattcttgttgccttcctaactaatcttcactattgttagctttatctgagaatctgcttagtacttctttcacggtcaactcctcttctgaccttttcttgcgtaatctcgcctataatgtcttggcaagtccttctctgtttgaactctgattgtttccattattatcaaagtctctatgtctctcgggacttatctcatgaatatatatgtatttgcagagcacaatatcagagacagactacaccaattatcttgatccagggattcactcagatcttcccattttccaaatccaaccttattgcaccccaacaaccaacttgtcattctcatttcgacaaccacctatcacgtttcataaaggtactaagttcacaaaattatgttaggtgattatttttaaggtaccaatttgttttgtaaattaattacaacgtgtcactaaaaagcctagtggtaatatagtgaacataattaagatatgttgactttacttgagcaaattttctgtttaagtttaaatgcaatctgagtgcattccatgttgcaagttttattaaaaataatatttcttgggcatcactcaaagctagcttctggaaaacagtcttggagctgattaacttagttaatttgtcaaaccagaggtgagatgcgttcaaggattgaatctctggagaaataactcagtagaggtcaatgatgagatctttaagggctatcgtcaaggaaatcatgaagagatcatcaatgaggtcgctgcaggttattacacttctcttatcaattatcatttttctctgtgtttacaatgcaacttctaactactattagtttattgtgtgtggttctttagcatatgatctcatggataccgatataaacaacttcaatgtgaccatttggtacaactctacatacaagggagatttacgagataggcgtgtaaagtatgtccgagttccgcgctcagtaaatttggtgagaaactaagtcattcaagacattctcaattgttttatacctagttaagactggtctcttgatcataaaactcttgaaaaaatatgcaggtttcgaatgcttatcttcagtttttgcgaggcccagggacaaagatattattcgactttgttaaagaaatgcctaaacaagaaactaggcttcgcatggacatggcgtctctcattggccccattttcttcacttgggttattcttcttctgttccctgtaagttcctttaatgtggagtgtggactacttcattctcttacaagtatacgatgattcctaaaacttggaagccgtttggtcattatatgattaaaaccctatcatgggaactaatttaccctgcaatggtctgcgaactcgaagagtgtatggacctaatccttgattaataggccttttcaatagttacacccatttttatatgtaggtgattttgacctcattggtctatgagaagcagcagcgtctaagaattataatgaaaatgcatggcctaggagatgctccatattggatgatttcctacgcatattttctagccatatctactttatacattgtatgcttgatgatatttggatcagcaataggtaatcattgccgtatcttatgttattattttcttatgtatatatagaacaagttacaaagctatatagtttgttacaggactgaagttcttccggttcaatgactacaccatccagttcattttctattttctctgcataaatctgcaaatctccatagcctttctagttgcctcagcattttcaaaggttggtgcagcaccaggtactaacttaagtctcacgttaactacatgtagctcaagaacatgaaggtgttaattaaaaggaacactcgttctgttttatggctcaactgtagttgcggctcactaaaacgtgtttggatctgggctcttgggcgcattcctcttccagtttctgatagaaagtttatcgtttcctagtaagctatcaagaacaagttgaagataacatattctcaaaacagacaacaatgctactatatataatcctttactttttaccaggacgtttgatttttgtcatggaattgtatcccggcttctcattataccgcgggctgtatgaattctcccaatatgctttccaaagaaacttgaatgggagggatgggatgaagtggaaagatttcagaggtagtgcaatggatgaagttttcaccatcattatcgttgagtgggttgtcgcactcgttgcaacatactatatagaccgagtttcttcatcgtcaaaagacacttttgcattcttgaaaaaccctttcaagttatctcctactccacaaatgtttagctttcaaaaagagagatctgatgtttccgtagaaatggagaaacttgatgtcattcaggaggtattgaagaagaactcaccacccattccatgttctttgcgtttttcgagttgttttgataaataaattttgttcaaatcagaaagaaacggtcaagcagttgatatttgagcggagcaaaaatcatgggattgtatg

SEQ ID NO: 6885 - DNA, 970 bp, Arabidopsis thaliana landsberg
taatttcgggcaagttatatgctggccctgaagtagatgtctggagctgtggtgtgatactctacgctcttctctgtgggacgcttccatttgatgatgaaaacattcccaacctttttaagaagataaaggtacattctattactcctcctctttcgtctatttgaactaatgcttgaattttttattttatttttcgtatcacccttcgactgtaaccttttttttttctcttttcgtcctatagggagggatatacacattacctagccatttatctcctggtgctagagatttgatcccccggatgcttgtagttgaccccatgaaacgagtaaccatccctgagatccggcaacacccttggttccaagctcatcttccgaggtatttagctgttcctcctccagatactgtgcaacaggcaaaaaaggtaagcctaacgtatctactcttattttcattagagaaatctctattcccatttttcgataaaggcgtaaaagcgctgtcttcatttgtagattgacgaggagattctccaagaagttatcaatatgggatttgacagaaaccacctcatcgaatcgctccgcaaccgaacccagaatgatgtatgtgtttcccacccacttgttcttttgctgtttctttcatttcaaagattaaaaaaaattccatcaaaagatcttaaatactgtattcttaccgactgtcttccagggcactgtgacgtactatctgatactggacaatcgtttccgtgcctctagtggttatctcggggctgagtttcaagagaccatggttagtcttttttgtccttttcgactttagcaaaagatctttgacgtaatgcttcattgtttgatttaatcaggaaggtactccccgtatgcctccagcagaaagcgttgcttcacctgtaaaccaacggcttccaggactgatggaatctcaaggagttggc

SEQ ID NO: 6886 - DNA, 2491 bp, Arabidopsis thaliana landsberg
caactccagcatcaaacaatttcttgaggactaacccattctacacaagtttagaagacatgaagttttttggggtcactaaaggattcacattgtcaagtaaccacaataatatatagagagaggttagcctctaattgctaaattcaaaacaacacagaacatatcaatagaacaacagtcttaagcaatcacattgtgatacaaaacacaacgcataagcaagaacataactttttactttaagtcccaataaaaatcaagtagcatgacagaagtatcaaaattgaacttaagaacaacactttccttgaatcaattcagcttaacgtacaaaaacttatacaaagaccagaaccacaatctcaaaagatgagtttttggattacctctttttcattgccatagatttgagcacaatcaatgtgacgataaccaatctgcattaagtagtagaatagaatcaatttagctatacgtcactaacaagttacaataaatcgcaaatcaaaagacggaaccttcacagcagcgtcgacagcgtttccgacgagaccaggatcggcctgccacgttcctagaccgacggatggtatcttcgctccggtgttgagttcaaagaatctaatttcctctgccattgtcaaagcaaagagatttatcacctgaaatcaacactgagactgatcctctgattagccgacactgagacttcactgaggcttaacgtgatgttgtggtatatacgagtttgggtgataatggactttggttaagcccatatttgggccttaaataggctttcacaacatttacggtaacacattcataacagaggactagcttagtttataaaaaagttgcatttatatttcattaaatatttaatttaacactatatggtaatactagttgaaaacttgaagacacgtccgaattgaaaaaccagtcatgaagaacatatcaactctaaattcatgtataatatcaacaatttgtaacagaaaatttatatcacaagtgacatattcttccctatgatcattcaactccaacaaagtcaactaaaataataactatttgtatcaattttattgcatattttggatacacttcctttgataagagaatcaagataaaaaaaccttttggcttccccacaaaccaacctcaaggatgtcaataccgcaaacgattcaacatttcacgcataatcatctcttaactcaagtcaacggtattggcacatacacttgtgatggttgcaaattgtacggtgaaggcaggacctaccggtgcagcgactgcgactatgatctccatgaatattgcgccacgtgtccttcaattctcttaaactcatgtcacggtcctgatcatgagcttagcctgttcaacggtcacatgaccgaacgctcgtgctatgtttgccgagtttctatccaagggatgttctacaaatgtaggcaatgcagttttgaagctcacccgctttgcacatacgctccaatgcatgcctcgtctccggatatattcgttacgaagcagagaagcctgcatggccatgcgggacagccatcgccaccacaccagtatggtcaaggaatcccatatggctatccacatatgggtcagcctgagccataccctcctcaaggtggtggttatcaacctcagaatcagaattattatccatacatgaattcgggttctccaaaaacagagtctatgggtcaccctgagacataccctcctcaaggtggtggtcatcaacatcaacatcaacatcagaatcatcagcctgggccatacactcctcaaggtgatggtcatcaacatcaacaacaaaatcatcatccatacatgaactccggttctccaaaatcggagtccagtgcagtttcaactacgactaaaacgaaaaagaaaaagccaggtttctttggagccatgaaggctgcagcaactgctactgttacgatagcggcccaggtggccgttgcagcaatgaccgatggcgagacaacgtatgaataataatttctttgagatggtttttttacttgttgatggcttatggtgttttttttttttttttttttgatgttgtttcatgttacatgcatacatgatttgttatgtatgtgtctcattctcatatatataatcgcataacttcaagttaattgcttactcattgatgtaaatgttgatttaaacccaccaaaagtgtttataaattgatatgcttatctgatcatcgtttcatctcaaactcggttagacaaagagattaattatgatcctttttgaaaataccttcttttccccaatgtgagatttagaatatgttacaacttactgacaaattcaggaaatatattctttcttttttttcaggaaatatttcccaaaagaaaaacttaatgacacattcaatttcggttaaaccttattatattgattttatacattatttaggatttgaata

SEQ ID NO: 6887 - DNA, 3428 bp, Arabidopsis thaliana landsberg
tacatgacttcaaagcgtgtactatgcaaaggcaatacatttttcgaagatagctatcaatgttcgtgtcacaatggttacgaaggaaatccctacatacctggcggatgccaaggtacctattaacttctttgaatagagggcttgagtgtactatataaccttatgtgaagtttggaatttttgtgtccgtagacattgatgaatgcagagatccacatctaaataaatgtggaaagagaaagtgtgtgaatgttctcggatcatatagatgtgagaaaacttggccagccattttaagtaagttatataatgtttctgcataagcctttttagattgaaagtgaaaagatcaacttacaatgcaggtggaactctaagctctggattgttgctcctgatctttggtatgtggttgctatgcaaggctaatagaaagcggaaagtagccaagcagaagaggaagttcttccaaagaaatggaggtttgttgttgcagcaacaaacatccttccttcacggaagtgtaaatagaaccaaagttttcagctccaatgacctggagaatgcaacagatagattcaatgcgagcagaatactggggcaaggcgggcagggtacagtttataaaggaatgttggaagatgggatgatcgtcgctgtcaagaagtccaaagcattgaaagaagagaatcttgaggaattcatcaatgagatcatccttttgtcacagattaaccaccgaaatgttgtcaagatcttaggatgttgtcttgagacagaagtacctatattggtgtatgagttcattccaaaccgtaaccttttcgatcatcttcacaacccatcagaggatttcccaatgagttgggaagtccgtctctgcatcgcctgtgaagtcgccgatgccctctcctacctgcattcagccgtctctatccccatttatcacagagatgtcaagtcaacaaatatcttattggatgaaaagcaccgtgcaaaagtgtcagattttggaatctcgagatctgttgctatagatgatactcacttgacaacaattgtacaaggaacaattggatatgtagacccagagtaccttcagtcaaaccacttcacagggaagagtgacgtctacagctttggggttttgctcattgagctcttaaccggagagaaacctgtctcccttctgagacggcaagaagtccgaatgttgggtgcttacttcctcgaagccatgagaaatgacagacttcatgaaattctcgatgctcgcatcaaggaggaatgtgatcgagaagaggtccttgcagtagccaaacttgcaagaaggtgtttgagcttgaactcagaacatcgccctaccatgagagacgtatttattgaactagataggatgcaatctaagagaaaaggtactcaaagccaagcacagaatggtgaagagcatgcacacatccagatcgcaatgccggagtctatgtcacttagttactcttctccgaacatagtcgttgaaaacagctcattctcattggacacaaaaccactaatgcctcacaagacacagtgactggaaaagtaatactcttcaccttccaatatataatacttcaatatagaatgatatccaatcaaacttgaaagtcttattgctcgtgtgattgtactccgtaatttcatctaatagttcctctatacgaaatttataagactttaattatatgtagcaaatcaaggacaaaaacgagactaaaaaagaagcaaactatttgtatcactcttaatttatcattcaagtgtttggtctatacacatgatacaccttggtgtaggtcaaatgaacacataacaatcactaacactcaaatacacctgagatataacatgaatcttattatgtacaagtttaattccaaatatgagtgacagtaatggcctgaccacggccggtaaccttcttgcagtaatcatatcataggatgacaaactgaactcattcacataaaagtggaagcctttacctggaagataaatgcatcataggttgacttcttcggcaactacttccctttaaaacaactgttttcaccctcacggtttccagttagcctcaagtgtccagatgtctgtgcagtgagtattacagcaaaagctttcactttcacagtgggaccaaggtcttactcagagaaggaacacactgattccatgaatattattggacaataatttaaagagtgtcagaaacccttattggaaaatacgcaaccataatcaactgcaaactaacacacagctaagtttatggctataattggagtttccatgcaagcatgaaaaaaaaaagatatgctaaatttcagtctatcttatttttgtacataagccaaacgacacttctgtaaaagaaatgatcatataacaacgtgaacttacttgtttgtaaaaagacaacagaagatatcaatgacaaccaagtgctttccatggttccttttaactacttttacatctcacgatgcaacaatcaaagaattgaacataccaattttatacatcaagaaagattctatcaccttggttaagggggagaagattcttccaaggatacacaaccaatgatcgacccaccggctggaatgcacattggtttggtctctctccaattcagaggtctatccaaagggttacataccctcacaacaggcaatctcacaatgtcaaatctccctgcccctgattcttcccatttaaggaccttacctcctataacatagagttcattccttagagctgcaaacccataaccgaaggcttctaactctctcggatgattaggaagaacaacagaaggaactgaaccaacattgtaccattccccttcatctgtatccctagtcttgatcaagctttctccccaatctacaatagtatacacccgatcatttttcatcacctgaacagcaaactgcatggctctagagaaaggccagacatcctccacagtggaccaagtcatgtctcgtggattaaaaacttcagatgaattttgctctgcaaatcccacctggtcacttaaaacatgaaagcagcctctgtacgataaccccgagcagtccatctgtggtctaggcattgctggtaattcctcccacctgcaatactactatgtcatactccagtttgatagcttttcaggtgaaacatgagaaaacttttaaaactatatcttgacccatcatagaaaaaaacaaaaagagtacattgtggggttaaatatgccagttctatcctacacgagaatataaaccacattagtgtgggaaaaaaatcctattaccgacaggatcataaacctcagcagatgggattccccctggaatgagttaaaataccacctccagcaacataaaccttgccag

SEQ ID NO: 6888 - DNA, 1948 bp, Arabidopsis thaliana landsberg
ctaccagtggtgtctcatcatcagtgagttgcgttttaaaacgaagagatagctaataattggtagccagaaaactgagaagttgaatattgactcaccagtctaccaggatgaaatggaatctctggtcctccagtgatctcaacagcaacaactccagctagctacagtaaccaagaaacacagatgaatcaagcccttaaagccatgcgaaatacaaagtaagcttttagattcagtatcaatctaacatgtgtgaatctagttcactgcagacaaaccagagggccaatagccgacggctcaagctagagaagaacccattttaagtcataacttagctgtaccaaccaacaaaatcccttccaaatgtttcccctctcggtataatcactgatgcatcaaaaaacccttgattctatggttctacctcaagttcctaattactacagcttgatgcatcccttgcttcacaattagaggtcaaaaaactcagtacattgttgaaaatttacctggtagaagtcagcatatgacagaatagggaacagctccttgatagggtcaagaagcctaacggcaatatcaagaccattgttggcatcatgggctagctcttggggatgccttatcgtcccaaacggtcctcctgtcttcgtcttcacatcaaatgtcccagccgagtgccatctgcaaatttccgccaacaaaatatgctctgagaagccatcaatcgaacaactcagtactcacagtaacagaaaagactggaaccagagagaggatcttacgcaagacggaggacgatgggagcacagtgcttctcggcaataagaccacggagcttcctcttgcatctctgaacagctttcttgtactcttctttcacttccgggtaactcttcttcaccatttttttcaaattcgcttccttctggaaatcgttgaaggctttaaaacctaaagagaatggagaacctatcgagatcaataagattacaagaacatacaaacctttagtttaaacacaatgatcgatcacagaagaaagtgctagtagttgttactttagtatacggatcaatttataaaactggctgatgatcaaaatgaagcttctagtttcactgtttcagtcttcttttggagatggacggtcatgatttgtagatggaaaaagaaggactcttggcgcgccttccagaaaccatccatagtaaagaagaataatacaaatttatccaacagatacacaccacgtgtcattctgtattcctcgagtatgttgtaccaactaatcaaagcttcaaatgatctgtgtgattgtaggaagaagcgacgttctttttatactcatgctttactatcgagcacaaaaacgttagggttgatcgacatttgaattgggtttgagcttcactatccaccaaaaagacttaagggttgatagacacactatgcctttaaacagtaaatcaatcgacatattgatcaattgaacttgattaatgtttctgctggggtaaaccaaagaaagcttcagcttgtttttaagtaggttcataacataacaagcatcatcataggaaacgaaggagcaagagataaataaatgaaactgataaaggcgaagtaagaaatggagatgtaaaaaagtgaaacttgttcataattcaacttgatatccagacacccaaagacaaaacagattaaaaaaaccaaaatcttttgactaaaatatggaaagtgttccaaagcagacgagattattactggctagcaccgagccatttggtgaagttatcaaactcggtgtaatcactgtcggagatcatagtcttgtaccacgacttgcctgctgctttgattgccaacgcctcctcctgatgtaagaaaaatagaaatttaaaagtggagttagaaaagaggacatataagaacaatgttc

SEQ ID NO: 6889 - DNA, 1130 bp, Arabidopsis thaliana landsberg
gttctcctctatgaaactgatagtggagttaatcacaagcagagtaataataccaacaaagtcttgccaatcaggtggcttcccctggtaaacaaagcatcatcaagaacacagaccaaatgaagattattaataaaagaggtaactttaaaacaatgaaaatatgtaagagagtatgctcactcctccattagcaagagcaatagccatgatagcagcagcttccataacccaagaaagagggttccacatgaaaccaagaaatttcaggaatttgctttcctgcaacaaaaaaaaaaaaaaggaactttgcttcaggacataaaaattataatcgtttggagctatagaccaaaacccaaaattccagaaaaacacatgaatacaacatagagaaaggaacaaaaccttcttctcttcgagcttgttatgcccaaaaagagccagcctttcatcagcagcttctgtagtgagaccttctctgctacatctcagactctcaaaaacttcttcaataggtacattctcctgaaaaaacccaagaaaacaaatttcttcagattctttctctccaacatcagagaaacaaataaaaattaaaactttagagtagatctgttaccagatccacagtttctttcaaaacagcctcaaggacttcttccttgtcccccatattctcctgctacctcctagtacaattaaaaaccatacaaattatcagaaaaaattctccattaaaacaccaccagaaagctcaacaacttaaaaaaaacagagaaaatgttgaaacacagagatgtagaaacctgtttctcaagatgatttcctaatcttcttcttcgtttttgtcttttgggtttctcagaaaagagaaagaagagtagagaagatgagaaaaccgctaaaggttagtggcagtatgggaagctaacacactccgacctctctctctcgcaccacaattatatccttcatttatttattaatttcctttatatatttaatctattaaattctcagtcttgtttaggcatctttttcttactgcctttttcaacattttttcttcatgcgtcaagcaagattcatgacacctcatcatctatatctttaactacaagagggaa

SEQ ID NO: 6890 - DNA, 858 bp, Arabidopsis thaliana landsberg
aaatgaacactaaccacgaatttcacgacatatgtccatggcatcttagatctctcacgaataagaagaaattgaagagtagagtaatagagaacttaccaaggggcgtagaactcgacgacgatgaaatcgtgcttggagatggtttcggtgaagttagagtgatcgagagtcaagacaaattccttcgtctcctcgcttcgtatagaggaaacgaatagagacaacaacaaaagaatcgaaaaacacgcgaaacccttaaacgccattattatcgctctctcttctctgtgaatattcttcttgtgaattcttcttcttcttctcaatagagaagatgatatttatgagcgcatttcttacactggaaattacgaaatcgctggatgattactggtcatacatacacgtggagagttttcattggataaacctcgtcattggtttttcattaacttttgggcaagtaataattgtcattgactctttgacccacagcggttattgatattccaatatttacttccataatcaaccattgaaaagaaaatcacaattaggagaaagctatttcttaatttttctctattttaaatagcattagattttctcattattatatcctgctgagtcaacataataatttaatgtgcattttaaaaacaataactgaccaaaaaaaaatgaaagccatggtggttcgactttgatacataattagccagtattgataaccctaaaccatagatcatgcctaaccatagtatctctcccgttttgacattgtgaagccatatggcaacatagcccatttctgcactttgcaaaatgagtgttaagctctagactattgccttt

SEQ ID NO: 6891 - DNA, 555 bp, Arabidopsis thaliana landsberg
gatttagggaacactccaacctaagacaacagagctagacattagtgcctgcaatactaatggaaaagaaaccaagaaaaaatgatccattagagacacttacagcaacaacattcttttcaccaacaacctcagtggcagaatcagctgacttaatttcaacagaagcaggaccactttgcttcttcaaataagtgacaataccctcagcttcacgaggtccgttgtaatcttgaaccgacttccctccatttctcaaaatcttaagagtggggaaaccctgaatcttgtactcattagcaaattctttgtttgcttcttcactagcatcgatcttggcgagagcaagaggagggttatgactactcaactctgatgcagccttctcgtactgtaaacaatcaaatataaaccattttagctaaaatagattggtttcacacacaaatcctaagaaagtgatttcaaagccgatttctcacctcaggagcaagcttctggcagtgaccacacctgaaacaaagcaaaaacacatagatatcacgaatcaattac

SEQ ID NO: 6892 - DNA, 648 bp, Arabidopsis thaliana landsberg
agccttcaatttactttcttctgcattcgtcttcttagtaccgtttgcctcaaaatttagtaaattttcaaatttcagattctctcaattactgtagaatgggtattctctttctcgataccctttgatccgtgtgtaaataaagtctctcaatggctagacatgaaagtaagttatactcacaacctcgagaagaatcttgtggctctcgagacaaccatggaagagctcaaggccaagcgggatgatttattaagaaagctcaaaagagaggaggatagaggtctacaaacgcttggcgaaatcaaggtatggcttaatagagttgagactatcgaaagcagagtcaatgatcttcttaatgctagaaatgctgaacttcaaaggctgtgcctttgtgggttttgctctaagagtttaacgacgagctatcgttatgggaaaagtgttttcttgaaattgagggaggttgagaaactcgaaaggagagtttttgaagtgatttctgatcaagcttcaacatctgaggtggaggaacaacaacttcaaccgacaattgttggtcaagaaacaatggcttgataacgcttggaatcatctaatggaatatggagttggtattatgggattgtatggatagggaggtgt

SEQ ID NO: 6893 - DNA, 3917 bp, Arabidopsis thaliana landsberg
aacttttggaagatggaaatctatttttatgcatcctatccagaataattcgatatgtctttttagactaccaacttcatgcgcctaaaaaatgaatgaaatttatgctgagaatcgtcttgttataattacatttttaagaaaagatgctcatgtaaaatatattctcccatatcttgggtagaacaaaatataatttttacagatgcaaattcactttgattgggcattgagatattaataatgtaatattattgtttaatatattgcggttcaagtgtatccgaaagtacccaatcaattttagttttgacaaacgcgagttcatttttgactaggcaatgacattaaattattaacaattaatatataatctttctgtattaaaaaaatataatttgtttttcttacatatattaaaaaagaaaattgtgtttggaaaaatcattttattatctgttttaacacaattcaatcaataatagtgtaataaactgtataataaaacaagttattgtacgttgaaaatgtaaaacatcatttaaaatgaaaacaaaaattaaattaaaacatcattttattaatacggatgaagtatactttatatcattttttggaactatcaatgtggttgtgttaatttctagtctcaactctcaagttcaaaaaaactaaacctttcctcaaaacatttgtcaacgttaaatccaataataaatataggaacatctcatataaaactttaaatatttttttatgctaatatatatgcatggtttaacaggatcagttagggtttaaaatatgagttaatggtactataatcgacttccgtgcgatcatactatttttgtgaacaaactcttttctaatgtttttacaaatgaagaagaataacgacaaggtctaatcaagtgggataatatatacttcttataaagtatttattattgaaataagaattttggacttttgcaattatggccattggataattaaaaattgcgcactcctatccattttgagaataatcaaaagaaaaggcgttgccttatatcaatactcatccctatcttgcacctgaagactttggaggaatgtagagatttcagaaaatcccaaaaacaaaacactttagatttcatttcgatcgctattcctcccatgcatttttttgattaatcgaatctttgttttctttttcaacttcgaacttttgatttccctccgttcaatatatcattgaacttaacaatcatatgtttctgtggcaatttgtgtctttcttgcttgttatatgatggataacatcaactttgaattctcaaacgcttcacaaggaagccggctacagttgcagcaacaaccgccccagccgtttaatttacaagacttgaatatgattcaatacaatcaaccatcatctccttggactacggagaccttctctggtctaactccgtacgattgcacagccaatcaatcttttcccgtacaatgttcatcttcaaaaccctacccttcctcgtttcatccgtaccatcatcaatcttctgattctccatcattagaccaatctgtatcgatgattcctatgcagcctcttccggatcaatatatgaagccattatatcaaagatcttgctcgaacgattttgccgcaacaaatgcttcatcagcctcttactcgctttcttttgaagcaagtcatgatccacaagtatgccaaaaaaaaatccatctaattttttttcttacattttttttaagacaaatatgatcctatttgatgtttttaatgttctcgtcaggaactatgcagaaggacccatagtaattctaatgtaacacatcttaatttcacatcatcacaacatcaacctaaacagagtcatccaagattttcttctcctccttcattctcaatccatggagggtctatggctcctaactgtgtgaacaagacacggataagatggactcaagatcttcatgagaagtttgtggagtgcgttaatcgtcttggtggcgctgatagtaagtcaataaccattacaagattttctcaacgatttgattgagctagtcactttgtatatataaagtcatattacctagtacatgctacaaaggggaccaatttaacttgctttggtcttcggtctgaagaactcactaaaacttagaacttcttggttacccaaaaaaagttgttagatatgcatatgaatcatgattggtcatgaataataggtgaatagaatataattgcatgagatcaaaagtcatcttacgcacatgtggattaataatttcctcttttgagaaaattatgttgcattatttaatttggatagatgtatacatctttcagtaaaagtaattacgtaattgttgtaaggatatagtaacttgtttctttggtgggtcactgataaatgtaagtggtcgaaaactatgcagaggcaacgcccaaggcgatattgaagcggatggattctgatggactcacaatatttcacgttaaaagccacttacaggttacggttacttcttctctcttttcatttttttttccaaagaagattttattaaataaaatttggcttttaaatctcatcagaagtatagaattgcgaaatacatgcctgagtctcaagaaggtacactaataaatctctgcactaactttttttggacaaaaataaaaattgataatttgggaataacacaattctaaagagttttgtgttgcaggcaagtttgagaaaagagcttgtgcaaaagagctgtctcagcttgacacaagaacgtatgtttctcttcatttttttggtgtgtcaggaataattttttctttattatactaactaagcctctatttttccttcatataaatccaaagttattgaccaaatggcttagcgtagcaatagcaacacgatacgattaagaattattcgaaaataataaataatggcttgttaataatgattttctttttgtaatgttgtggaggcagtggagtgcaaattaaagaggcacttcagcttcaactagatgttcagaggcatcttcatgaacaactagaggtaagttacaaaatgtaactatataaatatattagcttgctttattatataattaagtttctttataccaagtaaatataacccaatgttacattatggcatttagtgcttccaaccaaaacaaaatgaaggctttctagcttagagattgtatatttgcatgtgtgaacattctgtggctctcctcactttttatgaactattcactgataattatttacatagatatgttttttaatacaactctcatgattgatgtgcctttctttttttagattcaacgaaacctacaactaagaatcgaagaacaagggtaccaactgaaaatgatgatggaacatcaacagaaaatcaaagagagtcttctgaagaagctaccagacgctgaagcatcattgtctcttctcgatccccatattcactctcctccttcgcctttcttggtacacgacgctgaagccctgatgctaacaagttatgaagacactcaactccagtccaccaaaagttgaaaaatgagatactctggctaaattagaaaaggcctaaagcatgcttctactctattcaaagtggtatatagttataagagtcgcgacaagaatgtccaaagtgctacacacactaacacttggaaacagaatcaggtactaaatgtgagcaagtggtgtgtgatggggtcgatctctgtcatagactaatagatgtgtgagattattcttaatgaactattttgaagttagagagcaaaactcatacaaagagatagcttctttaattagtcacgctgctttttaacattgtgaatgaggaacggacccccgc

SEQ ID NO: 6894 - DNA, 575 bp, Arabidopsis thaliana landsberg
cttttccttggatattactggatttaacgtctacaaatattttaagaaactaatacaaccacattgatacttagtatacttcgtccgtattatataaagttatgttttagtttaaaaaatggtttcattttaaatgatgttggtagaggaacaaacccacaatgtgttttacatttttaacgtaaaataattgttttattgtttcgagacttgttctattattgactgaattgtggattaaatatataattaatgatgttctagattaaatattaacagctttttaatatatacacaaatttttaaaatatttataatttaataaaaaagattacatatcaaactgttaataaataactcaacagtcaaatgaactcgcgtttgtcaaaattaaaggttaaacgggtttgggataaactttttttttatgctgagaatcgtcttgttataattactttttcttaataaaagatgctcatgtaaaatatattctcccatatcttggggagaacaaaatacagtataatttttacaaactcaagctcattttgagggggcattgaaatattaagttt

SEQ ID NO: 6895 - DNA, 1374 bp, Arabidopsis thaliana landsberg
acaaaaaccaccaaaacgcaccaacatcccaaaacgcaaacgctaaaaacacgtagctgtcgtggactagtgtcaatcactcttgagtgtctcttcttttgtcagcttctctttctttctttctctctcttctcttctctctgattctttaaaagatagcaacatctaaaatctgcaaaaccacattttctttcctctattctcctccgtccttactatttccagagttcagtacttagaaagaaagagagtgatgagcagaagcatctctttctctgtctgagtaagaggaagccaaaaccataatggagttgttaatgtgttcgggtcaggccgagtcaggtggttcttcttccaccgagtcttcttcactcagtggtggactcaggtttggtcagaagatctacttcgaggatggatccggatccagaagcaagaaccgggtcaataccgttcgtaagtcgtctaccacggcgaggtgccaagtggaaggttgtagaatggatctaagcaatgttaaagcttattactcgagacacaaagtttgttgcattcactctaaatcatctaaagtcattgtctctggtcttcatcaaaggttttgtcaacaatgtagcaggtttcccccttttttcttcttccttttatttactcattttgccatttccggtgatcggaatagttctaagggaaccatagctttacgcttttttcaggttttatgttccttttgagctttttgagttttggctcttaacgtcattgaagagtcttatcaaaacttaaactttacagctagttattatgtggtcttgtctcttgtcttatgcattatttaggttgcttttctttgaagctttcttttctttatatcaaatcaggtttcaccagctttctgagtttgacttggagaaaagaagttgtcgcagaagactcgcttgtcataacgaacgacgaagaaaaccacaacccacaacggctcttttcacttctcattactctcgaatcgctccatctctttacggttagatcccaatatacacagcccttttcagctcaatgagtctcaaaaacaagttattgaatttcctgtgtgtcaggaaaccccaatgctgcaatgattaaaagcgttttgggagatcctactgcgtggtcaaccgcaagatcagtgatgcagcggcctggaccgtggcagattaatccagttagggaaacccatccacacatgaatgttttatcacatggaagctcaagctctactacatgtccagagatgataaacaacaatagcacagattcaagctgtgctctctctcttgtgtcaaactcatacccaattcatcagcagcaacttcagacaccaacatatacatg

SEQ ID NO: 6896 - DNA, 1918 bp, Arabidopsis thaliana landsberg
  unsure (1)..(1918): unsure at all n locations
gagattgtcttaaactcaaactccacatcttcaagctctacattgagatcttttgcacatgactccatctgacatatctttttccaggctgcatctttctgttctttttctgcttccttttgttcttttagagcagcttcttgcctctgcagctcgataatcttgtgtttcacctcaagaatcttttgttccatatcatcaaactcttgtttagccttgctaaattcatttgtcatctccttgtcaaaaccttttagttcctccattatatatagttgtctatctttgagtgctaacagcttgtcgatccgtgataatggagttgtaacattgaagccatgtttctcgagctccgaaaatgaatcttttaggctatttagttggcttacaggaacgtcggcttcaagatctttaaatttctccagtaacccaaaataagtcaccatcatacctattgcatacccttcacggaaatcttgcttagtctcaaacaatgggctgaaatgaagactgtgtgatacacttttgaagacctccagtgattcataagtcttccagaccnnnnnnnnnnnnnnnnnnnnnnnnnccattattgtgtgttttgcatggttttcctcagcattagaagcagaattcttcaccacattgggggtccgatccgaggataacactggacagatgaaagcatacacaacacaatgagaaaataaaggcttatctaccagtaatagtacaatgagaccattgcaagcgggtcctacattccagaatgtgcaatgagagttaagacataccagtcttattgatgtatgaattgagctttagacctcctcttttcctctttcgagtataatatttgatcttaggctcctcaggcatctgtgcatagaagtgttaaaccaaaaggagagccatctcaaagataaataacaatcataaacaataccttctctcgagttgactcatttccaaagccattcttcattggcacaggggatacctttccttgggttttgttctttgttgcagttacccccagggttataggtaaaccagattcttttttctggaaaacaaagaccatagaacaatttcagggcgtagaaaacaaacaaggttataaaagaatccactagcagggttatgaccatataccacatcatcagccatctcatttcccggtggttcctttgtctgcacatttctgttgccgtctaaagaagtttctttctggcgttttggctgaaaatggaaataacataacaacacttcaattaatcctcaaagatgtcacactaattaaaccaaaccaacacaatgttgcctgcaactagtgatacaatttacctttgttcttttatgccaaactccatcttcccactccattggaggcctaatatcagagtgattaaattgcgatgcctcctttgttgccccgaaacttaccatgtaccttccctcaaagacaattcccctgaccacaccttgacgccattcaaaaccactaaacgcctctacatgatccagcaattcatactttccaacagataaaggaggctgcataggccttagtcttagggaatcaacaattaaatttttcgattcccggcagctataggacttattccagtacttgacaagaaacctcttgtccttctccaactccttaatgacaattaccggaatccaagcacaatcaaatctcaattccaccattgtcccgcaactaaaaacagacttgaccaattccttcaaagacaaaaaacaaacatacaacaacggataaagttaacaactttttcatgcaaaggcgaaacgatttcaaaaaaaactcatcataccttattatcaagtcggatccatttgaagccaggccaatcaagatgaaccctccatttctttttttcaaactgaataa

SEQ ID NO: 6897 - DNA, 362 bp, Arabidopsis thaliana landsberg
aaggtctgtatctacaggttagcatcataagccaggctctatccttttcaccagatcccgtagctggtcctacgccgaatgccctggccttctcttacttggtgcatttgtcatagctcagctggtatgcacctactcctccttgaactctgttcaaaaagttcatgaaaacagaacaagaagttaatagcggtctatgcaatctcaggtggcgacatttatagcagtttatgcaaactggagttttgcccggatagaaggagccggctggggatgggctggagtgatctggctatacagtttcctaacgtacatccctcttgacttactcaagtttggaatccgctatgttttgagtggaa

SEQ ID NO: 6898 - DNA, 2857 bp, Arabidopsis thaliana landsberg
gacttgcaaaagtaggctagtacttcttcagagggccactgacctggaaaacaacgacagtatgaattcagagaatcacaatttagatagcattagagttccctaagcaactaaatcttttttattcttaacttgtttgaatcatggttaatgccacgttgtatattgacagactaaaagtttaagcagatatagtttggttagcgattgtatcagccgcaaacaagccaaatacacagagcagagcagcaacattgtactactaagtttcaaaaccaacaaagacactaatttatgtgacaagtagagagatacagtgagattgagaacttacagacaagtccagtattatcaatgttgtatcgattagatatctcgaagtcattgagatcactacaattatccactctttgtctgcatatattttaaagaagctcttatgagtggcaaatctatcgaacaaaacataacattgtttcatttgatgaaaacttcagatcaaaatcctaacgttagatagagtttgggagagccagtgatgggaagtgtgtagcaaacggatgcttcacgagacttatccgattgaggagaagagtccaccacttgacaaggaatcaagttgaatccttgagttgctttccttgaaatccgtttggtctcagtttgagattgagaatctgaggaaaattgaaagatgatccattagctatgcgaatgtgtgaaatcgaaaagtggatgcaggaaggagaaggagtaggggagtatcaaccagatctactgagaagcgcttggcgaagaattttccatctaagagcagaggaagaagaagaagtgggatccattgaagaatcgttatagctttctccgccggaatctgaaatttctcttgcagactaaacagcaaaacagggaagatgacgatttcgcttcccggcgaactttagtttggtttttttgcctttttaacacagtactttttgggggtcaaacaaagtacagtgaaaattaaattgtcaactgtaaagtacagtaacatttagattctgatctcactgatgttaattattttaaaattgaggacttgttttgtaatttaatattaaaagtgacacaagatgacaacacaactgctataactcaaaagtcaaatgacaattgccaagggataaaagctgtatgttagaaataaatcttattcactctttagatttggtgcacaaatctttttaaaatctatagattttcttaatcttacttatttatacagttttaattactctaaaaactctattgattttttttttgacatctaaaactctattatttaattttcaaataattgtacttcatagagtgatatgagattatgcaattgatttcttcttaaacaaaatagaaaataacatgtgacagaatattatgtttttagtagacatatatttttatacaaaaaatagtataagtgttatatccctttaaatcttatccttatttttatacaagaaaaaattttcatcatcataattgattataccttttaatcattttttttgccttttatgttttctaatagaaaaaaaaaacccaaagttttcctccatggtttaggtaagatcctactgttaaatagaatttcatttggcaaaacaaagtgaatacagattaccattatcatagtcaattacacatcttaattacttgaataattcttgtttagtgtgacactaaaaaaggtggcaaaacaataaacaaatgtacaatatacactcaacaaaaagaaattttggatataaacaaatttaatatttggataaagcgcgggaaaatctcctaaaatagttaaaaaaaaaggttaaaccggcccggttcatagtcaaaaagtatgctcctcttgaaacacgcaacgcccacgtcttcctatctccgagactccgacagcaaggttacttaacagttaatcaaactagattcgctttcttccatcactaatcttctgactttttctatttctgccccaaatctttttcaaattcatataaataaccaaacacttgttcttcttcattcccccttcgtcttcctcctcctaaatcaccggcgataatggaatgctctgcaactcctcccaagctttatccaaccgtcgacacttcaaccaccgttgctcctctccctaagtcctcttcctcctcctcttctactaataataataatctctatccttcaatcaatgtcaatgatcttgtcaacaatatcttccccgatcccaccgcctctgactcagcttcagcgcctcctctcgcgacggaggaagtgattctcacaatccacggcgcgatggtccacctcattgacaaatcctacagcgtagagctcgcttgcggcgatctcgagattctccgtcttgttcaaggagatatcaccgtcgcggttttcgctcgcgtcggtgacgagatccaatggccgttgactaaagacgaacccgccgttaaagtcgatgagtctcattacttcttctcgctccgacccgttaaagaatccgagtcatcggatcattcagtcaacgaaacagagaacgagatgttgaactacggattaacaatggcttcgaaaggtcaagaaccgatgcttgagaagctagacaagatcttagctgattacagtagtttcacagcggaggagaaacagaaagaagagaacgttttggatttgacggcggcgaaggagacttcaccggaggagctgaagggaaagaggaaaaagatggtggagaagcagtgtacggcttattggacgactctggctccgaatgttgaggattacagtggcgttgcagcgaaactgatcgctgctggtt

SEQ ID NO: 6899 - DNA, 1364 bp, Arabidopsis thaliana landsberg
agatattccatgttattctgactcctgatctattaagcaaaacattcggggaaaattatgatgatgcaatcgaggatcatgtatgtgagaataatgagatcatcaagcgagtaagaagaagtggaagaacctgagtggtacgcgccaagcgtcggagactgttgataacgaccattttctcctacaacggatcgaagaaaacagagagagagagattgttaaagagaggatcaaaggagaggaatctgaagaatcctggattgtttgagagggagagctgagattggttacaaaacagaggatgatgaattgatgatgatgatgccttatatctttttatttatttaatcttttcgagttccatttgattttttccagtgacgtgtcattgagtcattttcttaatattatttttgttttattttattttaaagggaaacaaatcattttgctgatcgctcacagagataataataataggttgtaactggtgcagtagtagcaagggaaagaaaaaacaaataagaggctagttgtatatagcagccataccataaaaatatcaattaaaattttattatattttctgctgaaataaataaaatggagaaatatagtaaaaaaaatcactccaatttgaagaaaaaaaaattatgtctcgatgtggaacacattttaatacacttcttccctcgcgtttagaaatggacatctgaaacgttaaggttatgggactggacatctatatatggttcacaatcgagacacattaaaactttaggttcgatagcatattagtatgagcctaactcatacttaaaaattactttaaaagtggaaattttaccatatatttatatattattcgataaataaataaaattttatgtaggacatattctaataatttttctttgtgtgtttgtttttatctttttatttttcatttactaaataaaaacaccaactaggccaacccaactaacagaaaaagtagccaaatttgatcgcatatttcaatttctaaggagggatagtaggaaaaactggagtaaaaattattttaatatacgagtttccataagattattacataaccatgtgatagttgttacgtctaacaaaagtaaacgaaaaaataataattatctttaatttagattagaaaagatactaataatgatccaacattacaaaaactagtgacatcatataattaggtgacacgtcaacttatttttgtcttctccattcaaaatatcagactgcaaacaagacttacacacataaatgcatgcattaattaaaaaagagaatcaaacataattcaaactaaaactgcgtgccgtttcgaggtcaaaaaa

SEQ ID NO: 6900 - DNA, 1978 bp, Arabidopsis thaliana landsberg
acctctctatttccttaaccggcattgcaccaatctctttcttgattcatcaagccatactttcctaggaatagcctaaatcaacaccaaaatcggttaacgacatctaaatctgtgtaattaggcaaaatgttaaactctcaaccggtgtagttacctgtaaaccggcccaacccttcttgatgttatctttctccggtgacgactcgttaacccaaccccacaaaatcctgcgctgattaacagagtcgtaaaatgttttcgacgcataaaatttgccgtaatcatatctcggagccgtttcgtcctgaacaaaacccttgtccggtacgtagacatctctcacttcgtcgtacgtaccaatcgtgtagtaatcattaaacgtatctgttaagctcactttaaggacgtgtttaaccatcggcccacttgaaaaagacgtatctaggccccgtgaatcagttctagccaccgggaaaaaatcagggcactcccacattccggtaccgtcgtggtaatgaagaggctttggagattgcttccatcttacgaaatctttgctcgtgtgtagaatcgctaatccacgtcgaccttcttggcttccggtggttatgcgccaactcccgtcacggccaaaccacgcggtggttggatcacgaaacgcgctggagttgatgtggttgacggggctaggtgtcacgaggggattttccggcgatttggtccagtgccgtagatatggatcggtgaggtttttaggtttaactaagttttggacctggcggttataacggtcgttgccggtgtaaagaattacaggtttgccattagggagaatcgtgacggagccggaccagcatccgttaatatcggacggtcgagatggtctgattgctggagaaagtgtgatccagttgattagatccgttgatgttgcatggccccatacggttttgttaacgtccatgacggcgccgttttggttccattgatagaatagatgatagattcctttgtatatcataggccctgtccaattttatgtacataaacatacatattacttatatgttatatccatgcttacttatacgtaatttataaaacaaacgagagagcaataataacttaccgttaggatcttgtagcattgaaacgaagccccaacataaacaaacaaacaaaatgagtgaaaagatttgacaatgtgcacaaattatagagaaaggaataaaaagataaccaagtgaaactgaattaatgaatccggtataacgtcatcataccgttcatccaatttttgggaggctggaaatgataaccggttcggtaaggttggttcttgatattggaaacgttgtccaaggcatcaagaacaacaacagcatcgtcagtgagaaacaacgagaccaacaagaacatggcaatgttacaccaaactatattagccattgcaatcctttttttcgtgtttatgtttgagttttacttatgaaaaattggtcaaatttatagacagtgggggtctttggtgcgttcttgaggtggtggtggtccatattttgtgaaaattagatgctataatctcgatccaaatgccttttcatgttagttgagacttgagaatcttgagatccaaatttttttatttttttttggaaagatatatatattttgtcaaggtataagatattctcataaattataactagcatcatgatgaaattgggatggttacatttctaaacgattgtttcaccaatttcggttgacattggatatgtatgaaaatacaaattttaaataaacaaacataatgcttaataacgtattcccgacagttaggaatgttcaagatctcatagacttttgtcgtctcataattgcaaatattttccactcagtaatagtattgagtacttttatggaatgtcagtgtctcatcattgctgcggtgtaaaataaacaacactattga

SEQ ID NO: 6901 - DNA, 1014 bp, Arabidopsis thaliana landsberg
ggccaaagcaaaagaagagagaaacgcacgcactttgctttttttatttaagcaacagggagagaatcttcctgctcctccaaggaagtagttggagtgccacttccaccatttagcaccgtgacgttaccttcagcgtcaacgtccacaatcaccgagtctccttctttgatctctctcgcaagcatcttctctgccatactatcctctaaaagcctcatgatggctcttctcaacggtcttgctccatagctcgggttataaccttcgtctactactctctctttgaatctttcggtcacctgaagctcaatctctttcttcttcaacctctcgaacacttccttcaacagtatgtcagcaatttctttcacttccagctttgttagctgtctgaacacaatcatctcgtctagcctgtttaggaactcgggtctgaagtattgtttcagctcctctgttacaaggctcttgattctgttgtaactgctgtctttctcgtcgtagtctaagtcgaatccgatacgtcttcctcctttctcaatcacgctgcttccgacgtttgatgtcatgatgagaagtgtgtttttgaagtcaactgttcttcctttgctgtctgttaatctaccatcttcaaggatttgaagcatcatgttgaaaacatctggatgggctttttcaatctcatcgaatagaacgacggtgtaagggcgacgtctaaccgcttctgttaactgacctccttcggtgtatccgacatatccaggaggtgaaccgatgagtttggagacagtgtgcctctccatgaactcactcatatctagacgaatcatggcttcttcggaaccgaagtagtaagctgctaaagctttggcaagctcagatttcccaacaccggttggacccgagaatatgaaactagcgattggacggttaggattcttgagtccaacacgtgcacggcgaatggctcggtttatggctttcacagcttcgtcttggcctatgatacgt

SEQ ID NO: 6902 - DNA, 342 bp, Arabidopsis thaliana landsberg
aatttacgctttccttatacttatttttaaatttataatttcttacaattatccttttatagcctttaaattaataaaaaaagctttctgtatacgtgtcaaataagatcaataaaattgacatgttgcataatcctattagttattttgaaaatcatactttatataataagatatatatatatatatataatattatttttattatgttagaaatcctcatataaatttttctatttgttaaattattaatggtaattaacgttaatacaataacattaaattagtattagtattgcttaaattcatactttcatttttaggaatctcatattgagattt

SEQ ID NO: 6903 - DNA, 808 bp, Arabidopsis thaliana landsberg
tatcagctattaaacctgaaataaatggactaatcaatacaacaaagagtacgttcagcaagctcatgtattactttcatttgcaaataactttctgaactctggacatagcaaaaagaagtagaatttactggcataccccaagcaagcatcaagacactgaagaatttggtattcccttgtgcaattgtagcaacatctacagaacgtttatgacctgacagaattaatgtgctacggaactgattactgaggaaaaaggaaaatgtactgaatgatgttttttttatggcatggaggatagagcataacctcggataatagaaatggtagcactatttgcacagcatcgaagcccaactgtgtccaacaatgactttatcatgccattaccagttcctgccgtcaagtaaaatgatttctatacaagtttctaatccacatgatatcaatttttgtatgaaaatctagaatatcgtcattgttactaaaacgaaaaccatcgcatttaaagtttcacaaacctgcagggaccattccaataggcaattttaaggcatttctccagtctgctctttcgagcagtccatttacaacctactaaattaggaaccaagtgtaagaatcagcaacaataaaatgattgtttaaccccagagtcaaacctaagcaaaagagtaagcatataatttaacaagagattgcttcctctagcagatacttcaaaagctctaacttcgttttagacatgaaatctagattcctttagttgacatcaggtgagaagagcacggaagacagacatcat

SEQ ID NO: 6904 - DNA, 521 bp, Arabidopsis thaliana landsberg
  unsure (1)..(521): unsure at all n locations
tgagggttagggcttgtattttttttaacggactcgggccagccctgaattataagcccatattaacatccctagggctaatagagaatatgatctgtcatatcgccatgattccgtgttttgtcttttgaggttttggtgaaccgatgagtacgaaggtaattgttttttggaaaacatgttttttttataaatctaacatatttaatatattatatgttcatagagatcgataattttttaacaaatgatgtatcatgaaaatattttaaggtaaaccatgtcacatgaattggggtggatgtcctagattttactttgacctgtattttacgatctcgaagagattcaggaacgataattctttcaaagttatatattaactggtacattntttttttttttcagttataacataacangttttacttgcttagcacattgttgactgcttttgcttgggccgcanggaatgtanggcatgcacgatattttgaatcatctgggttgagtttatcgat

SEQ ID NO: 6905 - DNA, 462 bp, Arabidopsis thaliana landsberg
aggacctgaaactaaatttgaagatctagaatggagggaaatgaaaggcccatttgttacgatatggcttcacaatgttccctggggtgctgagaacactttgactgctcctgctgcaaaggtcagttacacatttctaactaaaatattggatattcttttgttgtgcaccatcaaagaggccttcataaggttcttttacttgcaaaaaaacgttaaagcttcttttgtatatggtctgatgaaacagttttctgatggctacctggacttgattgtcttgaaaaactgccctaagcttgtcctgctctcacttatgagacagacgagtagtggaacacatgttgagtcaccattatagtgtatataaggtttgtcatccaaaacccatatggctgaattctttcattgacggcttcatgtaccttgtgactatgcattgtgattgactaaaagcttact

SEQ ID NO: 6906 - DNA, 913 bp, Arabidopsis thaliana landsberg
tgacttaaatgatgttggttacaaaaatcagaagaggtggagaaatatcacaagacaaaatatcgggtgattgtagagtttatactttaaaatatatagagtgacttgcattagacgtagatatgaagattggggtatgtgatgcaaacatcaaggatattcgaaaaaagttggcacgcgatatgttcatggaaggtaaccattggacggatctctagttgattttcttttgttttgaatttggttttgaggtttaattttctttttatgatcttctattaagcagctttctttacttatgatatgttacgttacaatacacgttactctaatactttatgatattgttctttgttatacgtagataatagagaaaagaaagataccttcttattacaaaaataataatattttttgtggaatttgttagctttattccacttcactagttgctgctgttaacatatctttaatgctatgagtgccacggatcaatagcaggatatattttgaaattggtattttgtataatcgtgaatgcaagctgcataatctgcacggttcccaaattcaattgtttatggttttggatataaacaaaaacaaaacagagctcaaaagtataaaatattcaaccaccgagctctaattaagcgtcctaaccgtatcctaatcaatctaaccacagtctcgtatcaacagtatgataaccattttatcaaatttacaattcaactgataaaactctttgtaacaaattatgtccaatctttaatacatgaacaacaattggtatcaatcattattgggatatatatctacaattattcaaatatctatgtgagacaaactctttctagccttccaaaacatatgttcataagagaagctatccaaaaagtaagaatatata

SEQ ID NO: 6907 - DNA, 1490 bp, Arabidopsis thaliana landsberg
tacccagaaatattgttttatttatccctcattctaacctttttacacaaaaaaaaaaaaaagagttttgctagtctattgcgaatatatcactatatcagaagttcataacacatgactgaataatcacaaatatatattttgaataatgtaaaatagattaaaaaacaaatatcattttaagaatttaaaatttaacaaataacaaatgctattaactagtttgagtcttctaagtccggattacgtcaaattttatgttaagtaattgatattctttcttttcaaatgtttcaattttttttttcactttttttttttttgtcaaagatgtttcaattttctttctttcgtttaatttgattaatttaccttttcggaagtcgtccattctggggaagtagcttagtgttaagagtatctcctaatttctctgtgacaacccattcattgactcttcctccttcaaataagccaatcaaagttcccttggtccggtgcatagccattacattttcgaataagacccaaaaaatcacgaggtagaatgatctgccaataatagtaaaaatgtaagtaaggtaatatatagagtgaataaatgaggtcgttataggatgtatagtactaaccttggagtggcaatggcactcaagagggtgatgacagaaggaacatatatagttgaccagttcggtatatttacttcgggaaggaagacacttgtaggaagaataacacagtaaaagaaataagtgaagaagtggactacgatcttccgtaggaaaaagaagctgtagatcacgtaaaacttcttccaaatcttcactctctgcttatcataagtttttaattagtttatggttactatatatatatcatacgcatcttatgtgcgtttagatataaaataaaatttcaatgtcacttggttcaaccaacctgaattctggattaatatgagttaattataagtgatttataagatttttttcaaggtagttattgataaatgagccaaaaacaaatgtcgttatgtattttgtttggttgccaatggttagaaaacttgcccctcttaaaattgtcgctaaggatgagccaaacaaaaatgtagttggcacgtgggaaatgtgtgtctgaaaatgaaatatagtaaatggtaaaaagaccttattgtgaataatttccatcgtcattttcctaataagattggctggaccacaagaccaccgatgctgttggaatcgaaaggccttaaattggcttggtagctcgcttttaacctacaaccacaattattcttgttttacaatgattataagcatttgtatttagatagccacatgcaaatgcacataatatatggttgtggttagcctttgccgttacattttaccaaaaaagaaacactagaaatcgaaactaatttgtttataatatgttaccttaatcaccaggaattccatataaattacaatttaaaggca

SEQ ID NO: 6908 - DNA, 1119 bp, Arabidopsis thaliana landsberg
ccatttacgttccctctttgatcagtatcttccacaccctggcaactccaaggtacgtcttaatcactcatcaagattaatatgtcttctaactttaaattaatgcatgtttatatttgaatcaaccagatccttctacctcgtgatattttgggtcttgttcgagaatgtaatggctatgcatcgaaccaaaggtacgtgcattggcctacttgaaggaggaagagtaaacgaatgggttgtgaccgaaaaactaggagatgctttgaagagtaagctactctctcgggtagtccaaagaaaatcttgttatcaaaggttaggaaaaaaaaagacgtatatatatttttccctttttgttagattaatcaagaagttgtaaatatataatgtttccgttgatgttatgatgttttgtaacgaatacacattgttataacaaaataaaagtgtgctattttgttgcagagtgaattccaaggaagtgatggtgggggtatacatattaggatgtgcactctatggcctgatctatgggcacacatggttacatttctatctttttcttcaggccacagcctttttcgtctccggttttggttttgtcggaacctaagaaccttccctgcccattatttttagtcaccaaataaattctccatgttttagttcttatttacacttttatttattttgacaccattgtacggtttggaccccatatcatcatgttgtataagtataacgaataatgattttttgtttgtttgaatgtatgcgtcactcggtaatttccccattattatttatcatcctttatttgaaaatcgatataataaacctatctgacgaattttacctaaagaaaatttttaaaaaagaattcgaaaggcaatgtattaaatattttatttttcaatgattaagataaacaaaccctcaatataactataatttctatctcatatcttcacatctcttttcaagtcaagcgattgtgttaacgagctagtgcatatattatatatgctcaacgaccattcgttttctaatccctaattttgtttgatttcgctctacggttacccaatttaatgacttgttttttggtaaaaaaaa

SEQ ID NO: 6909 - DNA, 714 bp, Arabidopsis thaliana landsberg
  unsure (1)..(714): unsure at all n locations
caaaaaattgaagatattaatgcataagaattgtattaaataaaataattcacctacttattctgaaatttgaaaaagaaaagaacgagaatactaacggatatataaattactaattacacttatcaagttcctataaaaccaattccggcaataatacaagcaagagcctgcatgtaaagatagatatataacactggcttcccaaagacaaggttatatgatgcacagcacaatatgtatatccccaccatcatctgttttgagtttatcctgcaacaaagtttgaagatgaatcatatgaagaaaaaatcctaaactgattattatttgcttgattgattacctttcgagaaacccgttgcgaggttttcttacttggggaagtaacttagtctcaagagcatcacctaatttctcggtgacaacccattcgttaactctccctccttcaagtaaaccgatgaaagtgcctttggtccgatgcatagccattacattctcgaataagacccaaaaaatcacgaggtagaaagatctacatgcataccaaatgtacttcataataaattcattgttgtatactataatcntgctagttactactacgatgtgaataaatgaacatagaactaaccttggtgtggcaatggcatttgatagagtgatcataaaaagaaaataaaccgctgaccaagtcgaatgttgacttcg

SEQ ID NO: 6910 - DNA, 1374 bp, Arabidopsis thaliana landsberg
atacgtgtgggccgacatcgtaaaagtaatatattcaattcgtaattgattaagagtcacacacacatggcaagtaagacgtcggtgtagtagtggttagcgaccgacgtaattttaacttatatgggcctgtgggcctttagatatgaaaggcccaataatgcatatcttttactaaactaaaaacggtgtcgtttggtatgtttcttccacctttgttgttcatcttttgattttttgaaattgttagtaaagaaagaaaaaaagctttgatttcgatttctcaagctgtgtttttttatttttcttcttcgcatcaggaaggaattgaaaaaggtatgattttgaagctttagctctcatttatctctgaatcctaatgcttttttcatgctgttgtttcagatttttggtgttaaaagatggatccagatgcagtcaaatcgactctctcgaatctagcatttggaaatgtaatggcggctgctgcaagaaattatcaaaaggtaaagaatgtttctcaatttgtttttgaaatagtgatagactttatgagtttttttgatgtttctttgtctgagtagattacctgtgaggacttacttgtatggttttgatgagttctttatatgggttttgtaggaagttcttgcaaatgagaaggcgcaaggatcaaatcctgttaatgaagaggttgatcttgatgaacttatggatgtaagtgcaatgttgcttgttgtgactgttaagcgtaggtctctatggtagacttatttgtctatgttctgtaggatccagagctagaaagattgcacgcagataggattgcagcactaaaggttataactttggcattgtattgtggcctatatagttatgcagcttttggtatgaactaaaatcttcaagattttatcttgacagagagaggttgagaagagagaatcgtttaaaagacaagggcatggtgaatatcgagaggtgagtgaaggagatttcttgggtgaagtcaccaggagtgagaaagtgatatgtcatttctaccataaggaattttaccggtgcaagtaagatctctcatcagcttattttttgttcgtcttctgatatgtatatgagctcataaccaaacatatttactgcattactgtaggattatggacaagcatctgaaaactcttgcacctagacatgtggacacaaagttcattaaagtggacgcagaggttagtgaaccatttgatgaaagttttataaaaggaaatggcttttcaacaatcctttgctgaagctaatgcttggctgaaataaatgcagaatgctcctttctttgtcacgaagcttgcaataaagactttgccttgcgttgtgctt

SEQ ID NO: 6911 - DNA, 1937 bp, Arabidopsis thaliana landsberg
agggttagattcatggtcaagccctttccttgatttttgccataactgtgactctatgttcagcttccgcagctgcataagccctctttcaactgcatttcacacccattatataccaagccgtttcataagataaaaatacataattaaaactcttttttcttggatacatctcgttaacaatgagagtgagtttagagcgtaccatcgacagcatcttgtgatgtggcagatcgagtcccttggtttatccaatactggagtcgctcatctactagatcagattcgatttcatggtttttagctcttctccagaaatatgaaagccaggcctatatccaaagctacagtgagatgaccacatgacagctaatggaaatagagaattgatctgtttttctttacctgtttaaaattcacatcttcaacttcctcgtcgctcaactctgaaaaggaaaaaccaaaatgcagaaagaatgttttgagggcagaatttcaggggtttccttatcatgtaatgaatgaccttgagtagggtctcatcacatcacatcagtacttggtgtgataatgacaacgagaacagatcataatgtacaaattattgacttaccaaaggcttcaaattgtccatccattggcattttcacttcgtctatgaattgttcaagaaaagaaaacatgaattaggaaaatattcaaatttaagcatggcttaagcttagatatttggttatcacctgaaacaaaaaactttgatgatgtgttccgtctattttgagccatgacaaatgcaattgcctcctgaacctttagacaacgcaaagaatcatacttcaaatctgtctcttgaataacagaactctgattctaaaaaaggatagagaagagttcacatgagaatgttaagattattcacctttagtgaagccagctcccgcaaacctttctcgacccatatcatgttttcgagatttccttccccagaagtttcttgcaagttttgcaatgatttttctctttcgccataagtgttattagctgcttggtgaggagaccagagggtaagaacaagtgaagtcagaacaattccaaacagttctagtgaaatttctgcagcaagatgaaaaatattacattgtgaaactccgtcccttgctctttgtcctgcagaaagaacaatctctagaggaagaggtgcaaatgatgaccagtattcgtgttttgctcctgcaatgtccgcttgaatgcctgccacaatatttcacccaattttagctcattatgtacgatatttagagaagctttaacaatattgttagtgtaactttctgttttacgtcactcgatcttattcgtttataaatttatagattataatgtgtaggaaagcaatgtaataccatgtctaacgcataagtcccaatatcgtgaaagccagcacctcttcagaacaacctcttcctaagataaagagctacaaatgagaaggtatcgacttaagaaaatactagatagaaacgaaaagtatgaatctttagcaatcatagcgtaccatctcctcctgagtcaatatcaatctcttggtcacggtcttaagagagttaagctctaattcaacttcatgaagctggtccaatgaagatgctgcctcctccctagcaatctaaatccaatccaagatctaaaatgttagtacaaatacaagttagaacaccaaaataccaaaacttgaagtacctcagcttctgtgtgaagagccgaaacatcttccctctttcctccatgattttgtgatgcaattctcaaagcagcctgagaaaaaattggttatgtttattattcttactttttcatatgtcaagatctaaactagaatcataaagtacatgagtcagctgtcaaaacaatctaccctggaaaagtgccttcacatg

SEQ ID NO: 6912 - DNA, 633 bp, Arabidopsis thaliana landsberg
taaagaaggcagagagagatgcagagagggctgagagagcctctcagaagaaagcagagaagtttaagagtaagctccaggatgagaaaaagaaggattgaaactagatcagataattgatgtgtttctttttatcatgtaatgaatgacttagagtaatgtagagattattgttcttaaaaggtttgcgggagctgtcttcgctaaaggtaaaaaaatcttaacatgtgaactctttttgtcgactctatccttttttagaagcagaggtctgttattagatgattatttaagagacatttttgaagtatttgctctgtataaaggatcatgaggcatttttttgtcatgtctcaaaaatagacggaatacattatcaaagtttatatatttatagattataatttgtaagaaagcaatgtacaaccatgtctaacgcataagccccaataacgtaaaagccagcacctcttcagaacaatctcttcctaaagagagctccagatgagaaactatcgatttaaaaaatacactagatggaaacaaaaagtatgaacctttaaaaatactcctctcgagtcaatatcaatctattggtcacggtcttaagagagttaagctcgaaaacaactt

SEQ ID NO: 6913 - DNA, 321 bp, Arabidopsis thaliana landsberg
ccgcaaaacaaaaagccccccccgaaggaacaaaaacagcgcaccaaaaaacgaagaaaaaccaatccgggggccagaacgacgacacctacgcccaaaaacacagggaagggacagcaccgactggaggcacacagaccagtaaccggagcacaaacccagccgaaaccaaaggcgccacaaccggagggagatacgctgagacggccaacacaacaaacccagcaacgccgggaaacacggccgaaagcgccaccccccaccccacagacacaaccgaagaaccccccacccccggcggcagaagcagagccaagaagg

SEQ ID NO: 6914 - DNA, 1097 bp, Arabidopsis thaliana landsberg
ctcaccttccttcccctcagaaatccctttttggattgaactgcagggccttccaatgcactactggataaaagaaatgctttatgccataggcaaggaagctggggaggtagtggaccatgaaatttcaccagctgcagcaaagataaaagtcctcattaacgggctccaacctattacaaaagaaacagtggtggaattccctgatggtagtgaagcattggtttacctggaatacaaaaatctgaagagccattgtcatcattgtcaacgcctctctcatgctgaagctgattgtcctggcctaaagaaagtagaggcggtaagcaaaacatcaaagctcacttcccctgagcagcctccccaaaattatgcagagagaaacaaaggtagtaaacaaaatcccagggcatcccacgacaagttactttcctctcactcgggtttatctagacccctcggtgattacaatccctacaagagaaaatcagatggcaggaatgggagaagtgattacaggctaagaccaggagtacaaggctatgtttccccaaatagcagagcatcctctcctagacacactccttccctcagaagagaaccatcaagaagttacagtagggaccattataacaggcccaacccaaactttcaatggcgagaaaaacaagttccacgagaacttacctggtaggagatgtctgaaacttcgagaacaagacgccctccactggagagagaagtggttactgaatcctcaaaccccctgccagtacctatccctacaaaagaagcaatcatgggtgaactgcgagaagtaactgttcagtacacaagctgcgcagaccccactgaaagtatggccaggaaacagagagtgttacaaggtgaagccagaggtttgatgttggagactgccgatcagatactcaccgcggctacttctgctaatcaactactcctccaaaacaccactgcaaatgatcctgttccatcactcaacccctccctgaatttacaacacccccccaggtgagctccctcctgcgcctgaaacaaaacagataaagaaaagaagaagatccccaattaacaaa

SEQ ID NO: 6915 - DNA, 1539 bp, Arabidopsis thaliana landsberg
  unsure (1)..(1539): unsure at all n locations
tccagttggaacatatcattatcatacactaacaaaggcatatataccatggccattcttccatacaaggaatttgaaacaggtggtttttgctgtggagtggcaccgggtttcagactttgttggatcatgaacaacaaggttgaagtattggacaaccaatatgccaagtgctcgttgtcaccttcatcctgatagtaatgatcgtaacagctcaattgtgattatcatatatataatctacctccacgacaaaaaagaggacaatattccatccttgggtaccaatgtctaattataacgacatgacatgtaattcagtaccttgatagcagaaccaatcatttgaacaagacgatcaaacacactagtcctttcagcttcaaaggatttccaatgaaggaggcatttgtatattgtaaatgcagctacaggctnnnnnnnnnnnnnnnnnnnnnnnnttaccacgcagttgataagagcaccaatattctcctatagcaagaaaaatatctctcttcaataaataaaaaaaggcacatccgacagatcagaaaaagctagaagggagtaattcaactaaaaaccatacacgttgacgatccagatgatatctccgagtctttgcatcagattcttgttcttgagttcttgccagtgtttcaacctcagatccctgcagagatgtatttaaaagacatacaaacagatggaacataatttagggaaaaagagatggaaaagcaagacaggacttacattgaacggactttctttgctggaaaagtgaccattttgtgagccctacaagaaggagagtaacactttaattatcatgattgtgtagccatccaagaaatgattttgctcagatataccttaactggagtcggagggagatgtcctgatgcctggatgagggatttctgcctcaatattttgttttcagattccacatctaagattttttcttgaagtctgcaagtgaaaaagtgaaaaatacgcttaatgttgagtgccaaagggatctttggtgaattcattaagagaccaagagatgtatggtgggtactcgtgcacagcagttttcaaattaacaatggtagtttcagcctctatagcctgcttcagtctctcctcatttattttgcttctctcctcgaattttttctctgtttcatcaatcttctggtccaatgaacttaccagggactgaaaccaaatgagaaataaaggaaatgtgaacccttccttcagatgtcacagctttgacatccttaatagacgcagagaaagaaaaaaaaaagaaaagaagagagctaagttcctaccttgagcttttcattttcactagttagcttctccactagctctgtgtcaactacaggaacctcctgcaacacaggaacagtttctgccatctttttagcagcttccacttcctgtaagtgcaaggctttggtttcctccaattgaagttgcatttcctccaataaaaaaagtagttttgcattttcttgtgttttactttcttccatg

SEQ ID NO: 6916 - DNA, 2454 bp, Arabidopsis thaliana landsberg
tgaacgaactgttccgtttctggccaaagaaagacgaggaagaaccgcccaagtggacatctcgacttttctacacagtagtggctattgttgttgtcatgctgcttaggcgtcatgcccctgatgaagctgctcgggccaggtatacactgccttctcgtccacctttaaatatcgcttaaactaattgtactctactcatttgaatttagtgcagtagaggttgaattgtgatgagttttgttcatacaggtaccaaagaaggatgtccaacatcattgatgatgtccttgagtggtcaccaaagctagcactttctggtttgatggagaatcagcaacctgtaaacatcacagatgcggcaaacaactcctcagattcagcaggaggtcccgaccagactgaagaggtcgacctagatgaaactcaaggcgaggacctagaggaaacgcaaggcaaggaggaagctgaaggttggactgactctgatcttaaaacataaaaaaaccaaaatatagaaacgaaagttcattgtaacaataagtcaacttaagtgaccaagacgaggtgagttctttataagaaagtcttgaaagattttgtggtactccattactcctttacattttgacacaatctggaatttagctctcaatcacagttttgtattccaaacttcaattcaagctaagaaatgtttggttaagatagaattgaaaaagaaaagtggcaacatctgaagtattccaaactgaaagggaaaaagtcacaaaaagctacaaaaagtatttgtacaaaatcagaagaaaaaaaaaacgagagaaaatactctttcatggctgctaccgaataagccaacaaagagaaagccaagaatgaattgccgccttgtgaggtcatttaatggctagacgagcttgagaaggatggtttgaggaaaggctgttccattgctgccctgaacactctccttcttcccttctcttataagctgagctctgcatctcatctccctgaggtgttctatagtcaccattccaagcttcaccttgatcagaattagatgatgacggggactgagtaacatgaccattgctcttttcttcagctttacgctttgaagcttcggtgttggttttctttgcaaaccgtcctccagtaccccttggcctcctcatagcatgttgatgccgagattcatgtagataaggctgtggaccatgcaaacaaagaaagagatgcattaagcagtgtgatgcgttcacagttagatcagacctctcaagaaactaatatacatggtaacacgcaatgcacctttctggattttattagcttcttctctagctctgccttggcgcgtgcctgccttcgcctcagaatcgcctggtactgtttagcattcacgaaaactggttcttgtgccatctcaggcggcagtggcattcttgaatgaggcatcccaccatatggaacaaacccctgataggttaaatgtgttatttattataaagtcacatagatgctaaatagataagaagagcctaaaaattcctgtcgtgaactaaatacatcttctcaatatcttcaataaactgctgctataaatcataattcatctatctatcaggaacactgttagacaattataatcatgctagacttcataaagcacctacagctaatagaatatttaaaaatgcaatctcatgtttcgcaacccaatagcaatcatgaatcatggtagacatgtcacatggttaaatcgtcttaacagagataatcagttgaggctttaggaaaacttgtaaatagtttggaaatagtcatataccaggggatgatgtccataggctcccatcactcctgcataatatggatcctggtatggatttgaggatgcccatccctgcatgattcataaccgggaaaaaactaaattgtaagcaaccatagctaaaattttcccaaaggaaatgataagaacaatgtatctatattgggaagttacaactgtgtggccaacaagttgagggtgaggaggaggttgtgtgatgccatgatgcagagattcttggtttttatcactataatctccagctgcatatcgaaataaaccaacaacacttggttaagagtattaaacacaacagtaagcaaatccgcaagcgtaatgcacctgattgtggagacgttgtgacttgtgattccttgttaacagtattatctctattggatggtgatttggaaccgtttgattccaatgctaatgctattgacttagaagatttatctccagcttccacactagaatttgcattgcaagcagcagcagcacgatgccaagggtttaaactatttatcgacgacgatactgtaccatgaacctctgaatcaaccttgttcccaccactgtcagattttgaatgcatgtcttcaattccctattgaaaa

SEQ ID NO: 6917 - DNA, 3513 bp, Arabidopsis thaliana landsberg
ctacaccgaatactttggattggaaactgatgtggatgctgtgttttatctcatgctggttaatgatatgattcatgggctctaccctgaagcgattaccgttggtgaagatgtaagttttctgattggctaaataaaaaagtgctctacagaaccataagggatacatattgtgtatcatattaaagatagtccaaaaccaaattagtgtgaactgacaagagaaagttagtatatattttttggtgatctatgctaataaaatcgtttcatttcaggttagtggtatgccaacattctgtattcctgtccaagatggtggcgttggatttgactaccgtttacacatggccatagctgataagtggatagaaatgctcaagtgagtgttttctgcattttcttttaagttccatctgctttaatatttggtgaaataagtgtcttactctcctccatgttatgctgggaaggaagagagatgaagactggcaaatgggcgacatcatttacacacttaccaacagaaggtggtcagagaagtgtatctcttatgctgaaagtcacgatcaagctcttgttggtgataaaacaattgccttctggttaatggacaaggtatagatagattagacaccgttttacattaaactcattattaaaagttatgtgagcggtgttgttcgggttccaggatatgtatgatttcatggcagtagacagaccatcaactcctcttatcgatagaggaatagctttgcacaaaatgattaggcttataactatgggattaggcggtgaaggttacttaaattttatgggaaacgaattcggacatccaggtactaaatcgatttaagcttgtttcatttactttctgtgcaaaaattttgagtgtacaatttcttcatctactcctgcaatattcagaatggattgattttcccagaggcgagcagcgtctttctgatggtagcgtgattcctggcaacaatttcagttatgacaaatgccgccgcagatttgatcttgtaagttcttacaatttggctgagtacaacattactcaagatatttttctgtgtattctgattcagaatagttcatatatagggggatgcagattatctcagataccgcggactacaagaatttgatcaggcaatgcaacatcttgaagagaattacgctgtaagtctccaagttaaaacctttgtagatgatctcagttacccattagctttattcttattttacatttgagcagtttatgacttcggagcaccaattcatatcacgaaaagacgaagcagatagagtaatcgtattcgaaagaggtgatctcgtctttgtctttaactttcactggaccagcagctactttgattaccgcattggttgctccaagcctggaaaatataacgtataatacacatctaactcttccttttcaaacactggagactttggtattgcttgtgaagatagaatccgatatctttctacatttcgacattccagatcgtattggactcggacgatcctctctttggtggattcaataggctcgatcgcaaggcagagtactttacttatgtaagaaaaataaaaccattctagtcaaagtttacattaattgtgactgttccaatctcttgaccaatcgtgccaatgcaggatggcttatacgacgaacgaccctgctccttcatggtctatgcaccgtgtagaaccgccgtggtttatgctttagcaaaccacgattagaactttcagactttggatccaatatcataatcaaggaagagtgtgtgaaaaaatgtttttccttcattagagtgaagtaaagaatctggtaacgaaaaaaatgtctgtgtatacaagatcaccgaaaatgtaaagaatctggtaatggaaaatatctaaaacattaaaccagaaatgtagcacttgattaaaaaccaattacaacaaccgaaataaaccgataataaacgccagctggccggtcttggaaatggataaacaaccgaaataaaccgatgtatgccaccaagcataattgcaacggtgtaatgcttcaaacaaataaatcaaactaaaaaggtatcacaacaacttttgattatgatcccactaataatagtattgttgtaaatctaaaatttcaaaggttttcaaaaagggatcatcttcataagataccggtttaatttgatttggttgcgatgaataaatccggttaagacaccagtcacgctcctttcgcttccattattaggaacaagaaatccaacggtcatcgtagagcgcatcagataaacggctaaaaagcaaattctctggaagaagaagaagacgaagatgcaaccgacagagacgtcgcagccggcgccgtcggatcaaggccgccggcttaaggatcagttatcggagagtatgagcttcagtagccaaatgaagaaggaagacgatgagttgtcgatgaaagctttgtcggcgttcaaggccaaagaagaggagatcgagaagaagaagatggagatcagagaaagagttcaagctcagcttggtcgtgttgaagatgagtccaagcgtctcgctatgattcgcgaggtttgatttcgaatacattatttcaattcgagttttggtgtgattcacttgctgctttaagttttgttgtagtgtatattaggtcaaattcctatggcttatagtgactaaaagggaaaaaaattcaacctcttttaagatttagtagttgagtgttctaaaattagaaagctggatttggtcttatttagggttttttaatatttaggttctagatttgtggaactttttagaaatttagagcatgatttgtgttctaagatgagctctgtgtcatgatctaaacccgattgggaaaagaagaagctatgaatcaagctctgaactgaatttgtggtgatgtatgtttggtgtattcaggaacttgaaggttttgctgatcccatgaggaaggaagttactatggtgaggaagaagattgattctctcgacaaagaattaaagccattggggaatacagttcagaaaaaggtttgtggtttgctattgagaattgtaatgcttcatatatgtaattaggcaccgcgttttgagataaattgctttactgtttatggatgatgaagatatatgtatagattggacccattttataccgacttgatactgaataattttcagaatgtgttcaggagtcttattattcaaagccgtttttttcaaaatgtgcaggaaacagagtacaaggatgctcttgaagcattcaatgaaaagaacaaggagaaggtggagctgatcaccaagctacaggaggtttgttcaatatgatctcacttctctctctacaatttccaagtagtatttcgtatttgaatgaacgttatggatggtctgcgtttggtcctacaaattggtgtgttgtctatcaaactaatcgtgtttaagctgtagggcata

SEQ ID NO: 6918 - DNA, 1369 bp, Arabidopsis thaliana landsberg
atcaatagaaaaaggggtgtcatgtgcggaaaattcgatgacctatgaaaagatcaaaatcttgatttttcaaaaaaatatatatcaatcaaatccgggcaggcttttgcagaacagccgagagaaaaacctcagcatcagttttctctccaacaacccatttcaacttcttatacccaaacctctctatcaaacgcgtaagaactctcttcttctcatcgttaccgcaatagaaattgtctaaccagaacaacccaccgggtttcaagatccgatcaagatcaaacatcaagaactccagcttctcgggtttattactaaccgctaaatccaatccgttagaagcatgtatgagatcgaaaacattgtcgtagaacggtaatctctgatccaaactcatgaacaacggaaaaatccctctcgcagctatgaattcgctgaaaggagcatctatattcaatgtattactgattatattcacattcttttcagccattctagcagcaaaagtgcctgatccgctgctaatatcgaatccaattcggattttcccatcgcctaaacccaaaacatcatctatcaggaaatcagtcttccctttaatcttaacaaacctatctttctcatgactagtagctagatcaaagcaaccaacacaatcccggctcagtttcttacctttcaagcattcaaaacttttgcagccaagaccgctccagttaacactactgttaccaactggtctccacaaagaatcaggaaacaaagcgagacctggtttatgtactgttttagccaaacatcgacggcgtggcaacggttcacaagcacggagaatcaacttctgagctaggctccaatcatcaggacatttgtcgaatacattatacgccatatactgagataacaaatctatagacatttcacaggaatgtccaacagatgcaaccatttgtgtgataccagtacgagaatctttaccaagaggaagctgatgttgttgaagaaacagtttaagctcttgtgggacttcttgttgcgagagatcgagagattcataaccaataatctgtttctccatctgagtgagtgtgtggtgggaggaatcgatttctctgaggatgagtgagagatgttgagaaaccaaagagacattgttggaatgaagaggatgtggcgtgtgagattgggaccgagacgagaaggcgtatagtgcaaagagattcgtagtgactatagagaaaagcataaggaggttgatgacggaagaaaaaagcgttgatcgcttgaatctcgcggttccatcgccaatctttagcgatacagatcccatacttcaatgtagcttatgttgcatcaattacaattg

SEQ ID NO: 6919 - DNA, 3006 bp, Arabidopsis thaliana landsberg
gaagagtatttcttaaagaactgatgagaatcttccaaagaaactatactaaacaaataacaataatacaaataatttaggtaacagctcatttacgcaatagatctagatctaaaataattaacacgcagcaaggagagagagagagggagatattaaaatcgaggttgtgcatgtcagcatgtagacttttgactgtgtttaatattcatttgatcacgttgcgaatacattgttttccattttattgtattattggtcacgtttttttccctcttaaatatcgggctccttgatcaaaagcctttcgttgaacagattaaaaaactaagttaagtgcattacgtccttaccacacacagtttagactcagacaagttgaacaaagcgtagtcaaatactccacctgattcatacatgtttaaaagcttttgtacgtattaaaataatgaaaatgtgtaatacatactactatgtaaccaaaaacaaaaaaaaaattgtacgtaagatatttagaagttcaactaggttatgtaatctagtgtgatagtacaattcaaattcgcatattgcattctattaaataaaaaaatatctaaaattagattaaaaatggtctattgtgattttatgatacatactcttaatggccagagttactatttatcttttgtccttgttttttagtaatttttagctttctttttagctaacattttcaagttctatttacccttgaaaatctcttagtcacactgttgaggttatctcacacgcaaaggctcaatttcagtacctgagagtaagtatggaaacttcggcagcaaacatagatgatctgttcagttgatcattcagttggttttgtttcatacttgtgtttgtgttgtttgaatttgctgatttcagaacttgacataacatgacagtttcttcttcagcatcatatcgtttgtcatatatttatatgaatgtcacatgaaccagattcatgtcttcagatcttgagataggatcctcaactacatggaaaaaaaaaagaaaccaaaagaaaaatgtgtacatataaatgtcttttgtctatgtcttttctatgaatattaatccgttacatttgcctttgttacctcctttacttttattacctccttcacctttacatttcacctttgttacctcatttacctttgttctttgtcctccttcttagggatgcatggatcgtctggtccagttaccatagtgagacaatagagtgagttcttcatctttagctcttagtcttggaagaggtacaaacgccaagggagatcggaatttttccaaggagaaagagatgatcagaatatcctcattatcatcagggactagaacaccgacatccaaaccactagctttgttgagcagagtgatgtcacaaacaatttcaatttcatttttattagcgaatctaccaaagctggtgagcggaagcaatttctctgtgattgacacatcaataggctgtgcaattaattgcgtacgtctattatcccagctttattttattgttacaaaatcttaaagtaaaagaagttgtaatatgttcttcaagtagaagaaagtaaggaacagatatatagaaattttctttatagtaaccaaaatttattataactatagagcattgatgattaaacgaagctttattacaataatattacatgagtaggaatgtaaactagcaagcatctcacgtatcgtagatcataattccttggataacatgaggtaaagtggtccgaccgatcagtgatgattatttggaagaatcagcagaagcgaatttgagagagacactgttaacgcagtgacgttgatcggttggagtagagtaaccttcgcctttgaaaacatggcctagatgtccatcacacactgcacatgttatctccattcttcttccacctgcttctggctatatacatttaaaaaaacatcaaattagttattgtaattacaatctttaaatggttttgccggttttgctaaaatagtcaatctttaaagttgttttggaattacttttctaacaccaaaaaactaattaactcttttttacatacgagaatcttgacgtggtggccaatcaaattggcgggttcttctataaaaagtcatacgataaaaaagaagaagccaaaagatgaattataaaaacaacaaaaagtactttaatttgcataattgcatgtgatgtctcatgttgttccgccaatatatcagttaggtccaaactaaaaaaacgtcaaaattaaatgcacatatataaatgagtttcacgaatatggatgctcgaaatatgttatttgctatagagaaagagagtcaacgaattacagtttgtttaatagcaccggggatggcgtcgaagaacgcaggccaaccgcaaccggagtcgaacttagtggtcgatttataaagagcagttccacaaccagcacaactataagtcccttcctcgaacttctttgtaaactctcctttgcctcgtttactaaatcaccaaattaaccattaacaacatgttcaggtaaacttctcaagtaaacagaaaaataagataaataaaaaaaccctagaggacttactctgttccttttagtctgagaaccctaaactgctcaggagacagaacagcacgccactcttcgtcttgtttctggaaagatccacttgatggaactgcagccgcggtcattgccatgtcgagaatatgatttggttatgtaatgatgctagagagatcaagaggaagaaattagcttatgtttgaagttttgtacgaaagactcggtttaagtttaattgtgattcaacatttataaatagacatagacaagaatatttttcaaagaagcagaagaattgtccaagaaaactatactaaacaaataataattaatttaggtaacagcaaacgcaatgaggtagtgcttgtggacttttgaatgtgtttataatata

SEQ ID NO: 6920 - DNA, 922 bp, Arabidopsis thaliana landsberg
gttgggatctattgagcgtatgtttgccatattgttggaacattacaaaggaatttggcccttctggcttagtccccgccaggccatagtttgctctctttcagaggattgtagttcctatgccaaacaggttttcttacattctttatttatgaaccctcacacctgcaattcttgcagtgcctaatctctaagctttttgtttcctttgcacgtacattcaaacaggtacaaaaacagattaatgaagtcgggtactatgttgatattgatgaaagtgacagaagcctccgtaaaaaggtaaattcttatgcattacaagctttccaaatgtttaggtctttgagcatattatacaagtgagattatttaaggccataaatttttatctcgtaaaggctagttgtctaaatttcattataaaataaagtcgttttttcttggtagatatgaatgtatatatagaaattgcaaagaaaatgcatagttatatgtgttcacgagtgtgatgattttgttgtgtttgtaggtggcagatgctcgggatgcaccatacaactacatactggtcgtaggtcaaaaagaggttgcaactggacaggttgagtgtctcacttttttctcatgattcatatctctttgaccatcgagcttctcaaacattgattgatctttttgttttgttggactgtaacattttcaggtgacagttcggctcagagaggaccctgaaggccgtaaagacttgccagagatgagcatcgaaagtttgcttgatgaattcaagttcaagacagtcaacttcctctgagatccgatgtttatggtttaaaatttcatttttctgttgatgatgaatgtatttcttttataatggtctttttcattgtaccaagacacattttggaataaaatgtactat

SEQ ID NO: 6921 - DNA, 3069 bp, Arabidopsis thaliana landsberg
tgtcccttgtgtccagttggggccttatgagcgacatcaaatcacttgtaaagatcgaacaaaaatctctgtgtggccttgagcttcactatggtattctaatgcgctatgtcacatcatctcccgcttatctagggaaagaaaccgaagccctagactttgacataacatattaccgagctaaagacccgttaacaccgcgactctacgaagatttcatcgaagaaatcgagcaaattgcattgttcaaatataacgcattgccacattggggtaagaacagaaacttggcgtttgatggagtgattagaaagtacaacaacgcacccgcattcttgaaagtaaaagatagttatgatccaaaaggtttattctcgagcgaatggacagatcagatcctaggaattaaaggaaacgcgtcaatagtaaaagatgggtgtgcattggagggtttgtgtatatgttcgaaggatgctcattgtgctccggcgaaaggctatttgtgtcgaccgggaaaagtgtacaaagaggctagggtttgtacacgtgttgatgggataataagtgttatttaaacagtaagttcttaattttcattgcttcttatatcagtaacagccatcgtctatatgcgtgggtcaatatttattgtgagcctaataatgttattgtgttgcaacaataatgttttattgattcgtgctatagtgttagtacgtaaatcatttcaatcggccgtgcggaggaggatcttttatttatttatattccacagatctattcttgttccttttactatgaaaattggaagagtagttatagtagatatttgttctggttctggctagctataggttttcctagtaaatgtgggggattttatcattttgtgcatacacagtttcttaagatgatacaattataatttttattttttatatcatatcgcatgaccacaccccaattattgttataattattaccgaatgaaaaacaaaaaccatcctccccaaaatgcgcaacgtctcgtgccttcccttgacgcccgtatagaatgggccatatatatagtcaaataagtattcccactaaactatgcaagtcgtcgtacgtctatccttttttattgaacatatatacacaatttgcaaaatattaaatatcgaaacattttttaatgataatattaaatcatggcagcgccgatgaggttatcactgacatacaaggatacggtttccataatatatgaaaccaagttaaaagaaaatatagaaaatctacatttacttgattttgcaagtctttaagaccatgtgatataaatgaaactaacattgacagctcaaaagtaatggatcgaatgttattagtcgttatatatcttacacgctagcatgatgcatctcatccagccttttatgaatttatcaaccaaacatattttatgtaaaatatcaacaagctagcatgatgcatcactgaaccggcctttaagccacaaccactatatataccaaacatttagaaacgcctccattagacaaaactcaataaaaaccatggcatttggttattctccttcctattgttcgttttggcgcacccttaaagggttatattgtttatttacacttgtgcacacggtaatctcaacaccacccgaagatcctgtcaaatgtgtgtcgggaaacacgaactgtacagttacaaactcatatggagccttcccagaccgttccacgtgtcgagccgccaatgtggcttatccaacaaccgaagccgagcttatctctgtcgtggctgcagccactaaagccgggcggaaaatgcgtgtaaccacgccgatattcccatagcatcactaagcttgcgtgtaccgacgggaccgacggtttgcttataagtacaaagtttctaaaccacacggtgcgaaccgatgcaacggccatgaccttgacggttgagagcggtgtgacacttatgcagctaatcgctgaagcggctaaagttggattggcgttgccttatgcaccatattggtggggtctaaccgtgggtggtatgatggggaccggtgctcacgggagctcattatggggtaaaggaagtgcggtccatgattacgtgaccgagatcaggattgttagtcctggttcggtcaatgacggctttgccaaggttagagttttaagagagactacaacgcctaatgaatttaacgccgctaaggtttctcttggcgttcttggggttatctctcaggttagatcaattaaaaattcatattttgttcttattacgtaacaatatcagtcatagctctaacactttttttttactcaaaaaaggtaacccttaaattgcaaccgatgtttaagagatcgttaaggtatgtcatgagaaatgattcggattttggggatcaagccgtgactttcggggaaaaacatgagtttgcagatttcttatggttaccaagccaaggcaaagtggtgtatcgaatggacgaccgagttccggtcaacacatcaggcaatggcttgctcgactttttcccattccgtccacaactctctgtagcgttagccatcattagatccttaggtaaatttattctttctttctcaagataactaatacaaaatatatttgatcatttgcataatttttttggtaaaaaatatttgatttgcatagttataatgtttcttataaacaactgcttcatgatatgaagaggagagtgaagagtcatccggagatgcaaacaacaagtgtgcgagagcagagcaaataacgtcgtttttgttttccatctcctacggtgtgactaacaatggtaaaaatattcgttcacttacttatgcatctttctattgtttccatatgtatgagactttacaactttctatcacatattcatttgtaatttccacgggcaggtatggaattcacaggctatccggtgatcggaaagcaaaaccatatgatgtcgtcgggtacatgtctagacagccatcatgacggactgatcacgtcttgtcttggggatccacggataaaagg

SEQ ID NO: 6922 - DNA, 1356 bp, Arabidopsis thaliana landsberg
tacgatctgggtcgaccctaatttgcaacaaaaaaaaaaacacatcatatcagaacttgaatttcatgagtcggatctcatacaaattcggcagtcttggccttgaattcttccagtaaatcctcaatgctcttcacggagtgggctgcattgtctctcacacgaacactcacctgaaaatgtgaaagtgcaacatacaaatggtcttaaaatcaaaattaaattactcgagagactcaagataaggatcggcagtctaacctgtcctgtagcagcttctgtttcacccacgaccagaatgtagttgtactgagcaagctgagcttctcgcacctacaaacacaccacaatcatcatcactcaagtcaatcttaggaatcaccagccaaccacagaacaaaacttggaacatgaaccgaaatcgtttacctttttatctatctttctgtctgttaagtcagcatcaacatagaacccagcatctttaatttgcttttgtacctgttgtgccaaaagaaaaaccagagattagacactgcaaataagtcgataagaaccacatgtgctcagtaaaagagtacagcaacagccataaaagtaaccttttctgcatattgctgagatttctctgatataggacaaactatggcctgtcgcggactaatccagaagggccattttcctttgtaatgctccaacaatatggcaaacatacgttccacagatcccaacacggctctatgtatcattacaggtctactctttttcgcttcatcctcagctgcatattccaagttgaagcgaatcggaagttgaaaatcaagctgatttgaggccacaagaaacataaaatcaactcctgcactgataacagcaagagaaatgcatagacaagaaaagctaaaaagaatttgggagtataacctgtaaagtagcacactggaatttcctattcattgcatcagaaactgtgatgtctatctttggaccataaaatgcaccatctccttcgttcaactgccaaaacagcttacattagaatgaatgcagactttgtgaataaacttgagtattcaacaacaagtgacaataccactaatggctttccaaaagcttctatagcttctttgagatccgcttcagctttatcccatgtttccaaatctccaaggtacttctctggcctctgaaatttaaattaacatgcaaataatgggcaaagaaacatgtcacgccaagactataagatttggtagatgcactggtgaagaaatcatcaaatatggtaccgttgaaaggtttagctcataggtaaacccgaaaactttgacacatagtcaatgaactccaacacac

SEQ ID NO: 6923 - DNA, 551 bp, Arabidopsis thaliana landsberg
gcctatattccagtgtgctactatacaggtttggctcccaaactcttttttttttttttttttctattccctgcatttctcttggcagtttatttagtgtgtcgtttctgctgttgcctaatatcaggttgattttcaccttcgtgatcgcttcaaactagaatattcagctgagaatgaaactgtgatagagagatctgtgctgatacatagagcggtgttgggctctgttgagcgtctttttgccatattgttggaacagtacaaaggaaaattccccttctggcttagtccccgccaggccatagtttgctctgtttcagaggattatcgttcctacgcagacaaggttatacattcatgactgtactcttaacgagtttacttgcagagtcttcttatatctctcttcctaatttcctttgtttgcgtatattcaaacaggtgagagatcaaattcacgaagctggctactatgttgatgttgacacaacggatagaaacgtcagtgacaaggtaactgttacagggtccctgagcacaaaccattg

SEQ ID NO: 6924 - DNA, 3221 bp, Arabidopsis thaliana landsberg
cataatttctaagaattttttcatgtttgcttgtttgttcagaatcttgaggtcttaaagaggatcacgctcagctgttccgtgcaattacttaacgttgatgaacttcaatattctccaaacatcgaaaaaattgatctcaagggatgtttagagcttcaaagttttccagacacgggtcaattacaacatctccgtattgtggatctctcaacttgcaaaaagataaaaagttttccaaaggtgccaccgtctattaggaaactgcatcttcagggaactggcataagagatctatcctcgttgaatcattcatcagaaagccaaagattaacaaggaagttggaaaatgttagctcttctaaccaagatcaccgtaagcaagtcttgaagctgaaagatagttctcatttgggaagtctgcctgacattgttatttttgagtctcttgaagttcttgatttttctggttgctcagaacttgaagatattcagggtttcccccaaaacctgaaaaggttatatctggctaagactgccataaaagaagttccatcatcgttgtgccaccatatctctaaacttgtcaaactagatatggagaattgcgaaaggcttcgagacttgccgatgggaatgagtaacatgaaatatcttgccgtgctgaaactgtctggctgctcaaatcttgagaatattaaggaactcccaagaaaccttaaagagttatatctagccggcaccgcggtaaaggagttcccatcaacactgcttgagactctctctgaagttgttctattagatttggagaactgcaagaagcttcagggtctgccaacgggaatgagtaaattggaatttcttgtcacgctcaaactgtctggctgctcgaagctggaaattattgttgatcttcctctaaatctaatagagttatatcttgctggcactgccatcagagaattgccaccgtctattggggatctagctctacttgatacattagatctgaagaactgcaatagactccgacacttgccaatggaaatgcacaacttgaatcccctcaaagttcttgatctatcaaactgctcagagcttgaggtattcacaagttctctaccaaaagtcagagaactacgtccagctcctacagtcatgctacttcgatcaaagctgccattttgtttcttcatattttatgaacatagagttactttgtctctttataaggcacgtttgcagtatattcctgaagagatacgttggatgccttcactaaagacattggatcttagtaggaacggtttcacagaggtgccagtaagcatcaaggatttttctaaactactcagtctaaggttacgctattgcgaaaacctcagatcactcccacagcttccccgaagtctacaactcttgaatgcgcacggttgttcatcactgcaattaattactccggacttcaagcagcttcctaggtattacacgttcagtaattgctttggcctaccctcacacatggttagcgaagttttagcgaatgcaccggctattgtagaatgcaggaaaccacagcaggtctttctctttctatctatctatatctcatatataagaactgtacaataataacggaaaaaacaaaagaattgtgtgcgaaaaaccataacgtgttttttttacactagagaaacagaataattgtgttattctaatgtgctatgaatacttatattttttgtagtgtgtgagaaatctcgaatatagatgttcaaaaaatacctctatccatagtatgaggataggattctcgaaaattataatagtataaatattagttaaatattaattagggctctcaaaacttgagaaacccacctatagttagtatctatattaatatttgtattttattaagtttttagaactccatttcataccatggatggagatgctctaaatgttcaacaattactgacttgttttgccttggtgcaacagggactcgaaaacgcactagcttgcagcttctgtctaccttcacctacaagtcgagattccaaactttatctacaaccaggatcttcaacaatgattattctaaatccaaaaacgagaagtacgctcgtgggctttgcaatattagttgaagtttcattctcaaaggattttcatgatactgctggtttaggctttaggtgtgtttgcagatggaatgacaaaaaaggccatgctcataagcgtgataatatttttcattgctgggctccaggcgaagttgttcctaagattaacgacgatcacatgtttgtcttttttgatcttaaaatgcatccaagtatattatttgaaggagatgtcttcggtatcttggctgatctagttgtctatgaaatattcccggtcaacaagcaggagatgcatgtaggcgatagttgcactataacaaaatgtggagtctatgtgattaatgatgcagctggcagctcaagtggaaacacgatgaccccacaatgttcttcaatggattcactgaagcttttagatggtaaaggtaaaaagagattaagagttaactatgctggtttaaaacaaagagaaaaagctttatttctttacatagcatgtttgctcggtggtgagaaggctgatttgctagcacaatttcttgctagtactgactttgtaattgagtctacgctcgaagacttagctggcaggtatctcatagatatatcttccaatggggaagtaatgatgcctcctctgcaacgaaatttttctagagaaatcattcatatgctgcctgctagcacaaaagagttggtatctatggcttcgggctcaccttgcaaccgaaacaatgatgtttttgtgagcttccatggtaaagattttcggaaacaattcatccgtgactttctcaagaagctcgtgtacaaaggaattcgtatatgcataggtgataagatcctaagccgctcgctgatcaacaaagttataaaagaatcaagcattgcggttgttgtgttctcggaaaattacgcctcctcaagtttttgcttgcttcaattgatggagatcatgaagtgccgggaagagttgggtcaagtagtgatgcctattttctacaaggtcaatccttccgatattcagaatcaaagcggacactttggaaaaggtttcaagaaattttgcaagaagagaaaaaatgatga

SEQ ID NO: 6925 - DNA, 429 bp, Arabidopsis thaliana landsberg
gtggtcctgcttggaccggcactcgcgctcgtctcatgattatggaaagaagaactcaataacctcgtactagatggttttacagaaatagactgaaaaagcttatcaatgtcatactcaagagaaccatgatactctcgttgcttacgctccaccaaatccttacttgatgatcccataaccgatttaccatatctccctgaatgttttggcaatcttacttcatcatccttctcttccacaatctcacaagcgcctgcaaacgaccccatcgcaacagagtggatacagaatctaaaatctctgaagataatcaaagccgcaccaccgagttatcattcatcttcttgtgatctgtttctacacaagatcctgcaacaatcacagctacctggatgaaaaagaaaaatcagtaaaactggtaaaaga

SEQ ID NO: 6926 - DNA, 2117 bp, Arabidopsis thaliana landsberg
caataacaaaaactctaccgattcttgcaaaagtgttactactattaacctcctcatgatgtccctttgggtatctatatatcttcctcccgagcaagaagatagcaagagccataaccataaacaaacaaggaatcccaaacccaaacgcccaattaacattttcttgaacataagcgaccacaataatcgatatgcttattcccgcagataaactcaagaaccaccaattgaaaaacgaccctctcgctattacctcttcggatcttcagcatcaaactggtccgcaccaaacgcttgaacacacggtttgtgtccaccttgtccgatcgccaccaaatacagagaacagaagaaaagtgtattaacccaaatagatggtttagcagaagcgtcgttacgttgcttagataatcccattatgattaaagaagctgataacgtcaatagtcctagcccctgtaataataataatcctccaaattcagctaaaatcccggtttaaatcatacaaagatcaaaccggtttaactagaagaagacaaaagtactaaccaatatgtagatgagggaagctacgacaatagtacggtaacgaccaagataagcgtcagctacgaaagctcctaaaataggaagtatagaggcagttcccgaccacgtgttcacgttcacggctgctttcgccgtcgattgtccgagaggtccggtgaggtaagtaatcaaattgcaggcaatcccaaagtaagcaaacctctctgcaacttccacacctaaacaaatcatttaagactgggacttagaagtttaactagaaaaagaaaaaaaattggattgtttctgatgtgttttacctataatgaaccaggccgatctccatccgccggtggaagattttccggcgggaaatccacggtggtcgacggaatcgctaacgtaatcttctaagagtgcaacttcttcctctggtatcttcatttctctcaccaatagaggttgagaatctctgtgaaaactttttaaagggtaaatgcctaaatgagatttttaagctaaaagatctctttgtcttgcgcaactagtgaacacgattacattaatttatgatattttgggtaactaaactttctagtctttcttttatgtgtatctgtatatttattggcatttgagatgagtgtactatacgcgttaaaaaataagtatgcaattacattatcttatttgtatttttattttatataactttccgatattattgtattattacgcaataatacgcatacttcctttggacaagtgatacacgtacgagctagatatttgccatgttttgttttgtatcagcaaattctttttgtcattttttttcaatcaaaagtcaacatcaagggtaatttgattgatcacgacttattcttaaaattaagttataaaaaacatgtaacttagtgatgtacaattgttatttgagtataaatgttgatagaatatttagatgtttttgggttggatcgaccaaaaatccatatatcattcaagctcttagacttaggcttagctaaccataattttgacgtatcattttatttgtaaattcacttactttttagtcacaaaagcaacataattgatcactattatttcaaaattagaaaattcgttaacaataaaaaaatagacaacatttgtataaacattttacatttgtataaatgctgagactaaatcaataagtttttaatttggaatatttattatgtagttgtatatttttctttctcctacttggctagtggctacttgcatgctctttggtccgcttgttgcggtgttccgtatttatgatcgagttattcttatctcctgattagctgtcacttcataacttctttttacttgcaagttgcagggtaatatgaatgtatttgttcacagcacaagactatactctccacaaatcagcaaaatacattctacacgaatgtttccttttttctcaagctgtggtcactaaattttattttttggctaaaatgtttgtgatagatcagtcaaatagtcaaaataatattttgttcatagcagaaataatctcctgtatttccagttttgaa

SEQ ID NO: 6927 - DNA, 1114 bp, Arabidopsis thaliana landsberg
atcaaattttcaatttttagtttcccttaagtttattcataaatttgtttatacttattatacatgtaatgtgacggttttaactgaataacagttaaagggtcttacgacggttagttaaattataaacaattttaagttatacactatttaattactttctcgactcatagtactttctttattatacaggaattgtggtatataatgcaactaattttaacaaaaataaaataaaatcatgatagcacaaaatagtaatctaaaatcattatctgaattaacacgatttaaaaaggattattacactaagaattaataacaaacagttagtaaaaaaaaaacttttagcttatttaaaagatgaaaattagcttgtatggatcgtgtcatttaaatttagtagctaataaaccctaatagttgacttttgatttctgtaagataaaataacgaaaacagtgatatatagacatgaaaccgcatgtttattgggttgttagttgtaacttagattatgtaatcatattagaggattaaaatatagctcgtgaatcacgtccatttaaaattatgataggagctgtacaaatcataaaaataatacagctcgtcataatcaatcactcatctgactagactatataaaaagaatatatacatatcacaatctatttatcgtgttcattattcacgcagcaaatatagctttaatatcaaaactaaatataaataaatacatatagcttaaaatccagtttcctccgacaagaaaatggcgatagccgaagaagaagctgcacttatagaagattccgtcagcgactccgttgaccaccgtggacttcctgccggaaaatcttccaccggcggatggagatccgcctggtacattataggtaaagaacagcttttgtgatttgtaaattgtctcataaaccattattttttaaacaatttattttgtttttttggtgtggttttttaggtgtggaagatggagaaagatctgcttaccttgggatgggatacagattaatgacttacctcaccgaccctcactgacaatctacagccaccgtcgccgtgaacgagagcacctggtcaggagccg

SEQ ID NO: 6928 - DNA, 224 bp, Arabidopsis thaliana landsberg
gactattgaccttatcctctatcttaatcctaatgggattatcggatgcattgtcaacataaccgcaacgcttctgctaaaccgtttttttgggtgaatatattattcttttgttctctgtatttggtggcgatcggacaaggcggacacaagccgtgtgttcaagcttttggtgcagatcagtttgatgtgggagatccaaaggagagactcagtagaggatc

SEQ ID NO: 6929 - DNA, 2447 bp, Arabidopsis thaliana landsberg
acctcatttatgcctctctttcagacgcataaaccctaaacacaaatcctcttcctctgccgtcttcgtcccttacgcatcacagagttccattgccattacctccaaggaaagatggtctctcaatggaatgtctgctcttgtcaccggcggcactcgtggaattgggtttgtctctcttcacaacaagtgtgaacctttatcaaacgcaaattctcagagtagtgtgtgttactgtttaaattctcaggcgtgcgattgtggaggaattggctggtcttggagcagaagttcacacttgcgctcggaatgagtacgagctggagaattgtttgagtgattggaaccgttctggttttcgagttgctggatccgtttgcgatgtctctgatcgatctcagagagaggctttgatggagaccgtgtcatctgtgtttgaagggaagcttcatatccttgtaaggtttaatgccattgcttagagataatgcacataaagtgtttgttaatttgtctgtgagaacaattgtaaataaataactttactttcttgtgtaattatgatgcttttaggtaaacaatgttgggacgaacattaggaaaccaatggtagagtttactgctggagaattttcgactctgatgtctacgaatttcgaatcggttttccatttatgtcaacttgcttatccattgcttagagaatctaaagctggaagtgttgtgttcatctcttctgtttctggttttgtttccctcaagaatatgtcggtccaatcttcaaccaaaggtaggtatttgttcttatgcagcattcattcatttattcaggttttaccaagatgtattagattctttaacgagcaggcgatggataaactttggttcttttcgttggcctttgtgttttaggagcaattaatcaacttacgagaagtctggcttgcgagtgggccaaagacaatataaggatcaatgctgttgccccgtggtatatcaaaacatctatggtggagcaagtatgggtttaaaagccttattatctattatgcggttaaatataagctcttgaggctgaaaatcaaaatgagaaagactaagctaatttgtgtgttccttgtttgagatggggttgtttaatggttctcgtcttttcgtctcaggtccttagcaacaaagagtacctagaagaagtctactcagtaactcctcttggtcgacttggcgaaccgagagaggtgtcttctgcagtggcttttttatgcctacctgcatcatcatatattacagggcagattctttgtgttgatggtggaatgtcagtaaacggtttcttcccacgacatgattaggccactctattgttttactagtttccttgggatcctttttgttttatctttagcatgtctcctttctcctgtgaaagacagttcatcgatatgagatgagaattgaagttgtgctactaagtctactgttaatgaaaaggataatttagcatcagacagcgtgattcagtttcccttgtcttttactgattatcttgattgtgcatgtgggggaaaattgctgaggaaccttttcatgttatgacttttatgaaaacaaaaactttatgtttcttgagttagtattcattagcttgtattctgtgtcatcctttctcggttttggctttcattgtgtcttgaacctgcactcatatccaacaaacaatggttgaggaagagagaagctgcatagaataaacgaggaacctttaatgaattaccgccacctgtgtctcgggtcactcttcttctgcccttgtatttacagcacattaagctctgcttttggttaatatcgctttgtctctgtgtttaataatgtttttggttcgatgtatatatacaggtaagcaatgcaggaaagtgtatagccaaaccgaccacaaaatatgcagtagaagatttctcgttgctgatggctacaaatctggagtcagctttccatctctcacagctcgccaatcctttgttgaaagcttcaggttcagggagcattgtccttacgtcctctgttgatggggttgtccatctgagagtcggatccatctatggagcaaccgaagctaccgtatatatgtctacatccttaaaacaatgttcccttgcgttatgatgctttcgtaacatatagatgcgtttcaggagccatgaatcaactggctagaaacttagcttgcaaatgggcgagtgacaacataagggcgctctgtttgtccttggttcattaaaactcctttaactaataatgtacggcgaaaagtaaaaagtctccttattattatgaaaatatatctatatcataacttcccccttttcatttgtgtgaaatgtttcagtttaacaataataaagatgcaaaagaaaaggtggagagtaggccaccgatggggcgtg

SEQ ID NO: 6930 - DNA, 1724 bp, Arabidopsis thaliana landsberg
ctaacctgtaggttattgaacacatggaagaagatcaagcctgtgaatttggggaaaaagttctgagcttgttccaccccaagctcctgattgtctcaacaccaaactacgagttcaacacaattctccagcggtctacaccagaaacccaagaagaaaacaactcggagccacagcttccaaagttcaggaaccatgaccacaaattcgagtggacaagagaacagttcaatcaatgggcatcaaagctcggcaaacgccataactacagcgtcgagtttagcggtgttggtgggtctggtgaagtagaacccggatttgcttctcagatagctatttttagacgggaagcttcatctgttgagaatgttgcagaaagctcaatgcagccttataaagtcatctgggagtggaagaaagaagatgtagaaaagaaaaagactgatctttgactagagtagtatctaccagagaatatatatattgcaagcaatgtgatgacgtgttcatctataaaactcaaagctcgtttagttcttttgccatgagcttttgcagattaaccataaaatcgaacctttatgtttacaagatccttttgtctccaagtctactggtccggtgaagtttaaagattagatcagtagattaccctttttgcccctacgttaaaatttgtttatttaaaatacaagtccttgtgatttttatcactttctcacttcttcaacgacactgattcgttttcaaagcatttgcgttcttgatctttttcacgagggcgatttctgaagaacacgagaatttgaattctgggaaaagctttctcgaactttatctgagtaaattgacagagagaatcgaaaaagaaaatgtgtccctgcgtagagcgtcgtgctccacctggagtttactatactccgccgccggcgagaacaagtgatcatgtggcggcgatgccgatgacggagaggaggagaccaccgtattcttgttcttcgtcgtcggagagacgtgatccgtttcacattgttcataaagttccttctggtgattctccttacgtcagagccaaacacgcgcaggtataatcaattttcccgcgaaaacaagacaggggaatttttcttttgacctaatttaggaattctagattcttcctcatgtgataaaatctcttaaaagcttttcaaattttgagtgatcttcttgaacctgtctatgattgaggttttctaacaaatggatattgtttatgtggaagaacagttgatagataaagatccgaacagagctatatcattgttttggactgcaataaacgctggagatcgagttgatagtgctttgaaggatatggccgttgtaatgaaacaattaggtcgatctgatgaagggattgaagctattaaatcctttcggtatctctgttctttcgagtctcaagactcgattgataacttgctactcgagctctacaaggtaatgcagcctccttctttgttaatgcagcaagtgttatggagttgttataacttggaaatgggttttggtgtttttgcagaagtcagggagaattgaagaagaagctgttttacttgagcacaaactgcaaacactcgaacaaggaatgggatttggtggtagagtcagtagagcaaaaagggttcaaggaaaacatgttattatgactatcgagcaagagaaagcaaggtagaaagttc

SEQ ID NO: 6931 - DNA, 1090 bp, Arabidopsis thaliana landsberg
ttatgtaagaacctcacgtaaagtcttctggtgaaacttaggattgatttaaagtcttgtgcattttattttttctattctttctgttatggaataatgtattattagcatttcaactttactgtgtcagctctagctagttagatgaatctgtcggtctcttatttctttttcaaatcatagccaaaattatcaaagcttacatggctgtaaacagaggatgaacaaaaattagacctatatctatgactaagttaagagatatcatgaacatttaaatgtgatagtgatggatttctctgctttttgtgcacagaacgtccatgtttaaattacaatatacttttgttgggagtgaaagggccatcagaagaacgaatggaggcggcttttttcaaacctccactttcaaaacaacgtgttgaatatgcactgaaacatataagagaatcatccgcttctactttggtaagctctatatatcttaatgtcttcctgcttactaggattatgaattcaagactttgttaaaactcatttgtttcagtctctttttgtccttattggtaaatctttgacaagcataagatggcacctctattcttgttacaggttgactttggatgcggatctggaagtttattagactctctacttgactatccaacttcacttcaaaccatcatcggtgttgacatttcgccaaagggtcttgcccgtgctgctaaggtctgcaaaatcacacatcactgttttttattcccgctcgtagacataacttgatgagactaatggatcaaaataattgataaatgtttgatgaagaatgtatttgcaccactcatgattctctgcattttgtgtaattgaaaagaaatggtagatttacttatgcttttgtgtatcttgtgtttcaactttagatgctacatgtaaaactaaacaaggaagcttgcaacgtcaaatctgctacactttatgatggttccatccttgagtttgactccaggctgcatgacgttgacatcggcacttgcttagaggtccacctctcatctgctctctaatccttcaaattttgtacacgttt

SEQ ID NO: 6932 - DNA, 2605 bp, Arabidopsis thaliana landsberg
tttttctttacacattttttcttttttacaatcaagtgttgtacaatcaatacaaatgtcatgtataagaagtagacttttaatcataaaaaagttcttacaaaattttggtaactttttaaatctgtttatccaaaataatttaatctttttaaccttttcactacaaaaaagtatatataaaaagcgggcatttttaattttaattgtaagttttacctttatacaaatacacaacaaaaaattatcaattttaactatccaaaatggtcagctgttttggaccattaccaattgacaatatatattctacaacacttcaaataatttgacttcccctgaaaatataaaaagtttctcgccattacaacttgtaatctagtagttaatttgtgtcgttgtgtcacaagccaaattcaaacacgacataacaaatatttcttaagaaaaatacaaccctctcatatgtaaaacataattttaataacaacaaaattacaataaaattatttatttgtgctatgacttagtatcccatctccaacctacttcatcattttattctttcttcacacacatgcttcataattttttggacctttttgtacatcaattttgttttataattttttttttaaagttaaaatctggactattttataaatatagttttgaccttattttttttgaactttttaaattttttttttttttgtaacaactgtgttttatttatttatataaggccaaataatacagagccaaaattaacaggccataacactaaattaaaagaaaaacccaactaaaaaccctaaattgaaggaaagcttgttgtagacagcacatgaaacacgtatccaatggtaaccagacttctagacacgtgggaagtggaagagataggagtttccgttcactggcagaattgtgtgtcgtcgggaatcttcaatccgaccaaaatcaccagagaacttgatctatcgacaagtctcaaacttcgcccaaagaaatcatggcgagattccaattttagctttgatgagaatatgactctttgaatcttcttcttcttcttcttcaatcgacaagctttcaatcttcaattgcaggtcatcaaacctaaaaacgaaaattcaatcgaatccaaagtatcgatctttaattcagctcccaattacttcaacatgaactattaactaagagaaacatcaatccaacaatacaacttcgttcttaaaattttaaaacctagaaagcatgaagaacgaatcaagccctttaaacaaagaaggattgaagaattagaaacttagatcaatagaaagagaaaaaactagcgagagccaaaggaaaccaaaactaattggaaatcgaaagagtctaaagaaaaaaaacaaaagctagagcaaaagctagccaatactcgctagagagataagcgacgagatcgctagaaacagagccaaccaccggtgttgacaaaaccaccgatgccagaaacaaagccggacgaagatgctatgaaagccatctacgccggaagcaaagccaacctacaccactgagaaagctgatgcagaaagacgagaattgtgcctcaagcggaaccaacatcagtggagaataaccgccggcaaatcctgaacgaaaaaacttctttctctctgaaagatgaaagagagagaagagagaaggaagccgaactttttaaaatataaagcctctttttctgtaaaagaagaaaaaaatattttgaaaaaactgaaaatacaaaggcccttttaaatattttatttaaaaagtttgggtcaatttacactttttcaaaaacataatgggccttttattttttatctaaatgtttccctctgcccacgctatttgggccgggcctgcatatcccaactcgtgtcgatttcaagtttcaccgtcaatggaggatttgacgaaaagagactaataaacctaaatcttccccttcggcgttaaaccctaaaccctaatttcgtgctctgtatctctctgtttttgtttttttttgtttgtcaacaggtttcaatggctattgatgggagtttcaaccttaaacttgccttggagacgttctctgtacgttgtccaaaggtcgcagcttttccatgtttcacttcgattctcagcaaggtaaagttttgtacttgttacttcaaatttgacccagaattatgggcttgactttgttttgaacaattttttgtctttatggctactgggttttgtttagggaggagaagttgtggataacgaagaggtgattcatgctttaggggatgcgtttcttcacccggagtttacagttccgttggttcattgcttccttccaataataagaaatgttgtagatagagtggtgggtcttcttcgtctagtggatgatcttaagtcaagtattgactactcagacgatgtgtcatcagttttggataatgctatgacggaaggtattagtgtgattgatttttatgtccggcgtggacaaaggttggagcttcatgagtgtgcttgcttggccttcagtcgtgcgcttcatttcaatacgtctttgttagggtaagatgactat

SEQ ID NO: 6933 - DNA, 4483 bp, Arabidopsis thaliana landsberg
tgctagttggatgaattaagttgatagatagattcgttcgtcgtggacgatacatgtaaaacgttgttatcccaatcaagcaaagaggaacacggttacacagatgccagccataaatcataaaaccccaaaacccttcgattgctattttatttttcttataatttttgtttgcatttgactcaaatgatgtcgttgtatttgaatttataactcatgtcgacatataagtcgtcgcctagttggataattaattccatcatcttctaaaccgatatatgaattaattctatgcatatacattagatttcgacgaaggaacgaatctatcaatcatcattgattaaggaaccatatacatacattaaatatttatgaatatgcatattcataggatgaagataacatcacattaaatagaatgatattagcaaattgaatttatcagaaaaggcccaaaagttttaagtcatgtcatataacagatattgtactgtgttgtggagatgcgttattgggcctaagatacggcccagtttagtccgaaaaatacaaatttatcagagaaaagggccgaacaaaacgtcaaaaccctaactctataagagaccgttctgaaacattcaggcggcggtggcggcgatggaagtagacggatggtggtaggaatgaaaggctagaagcggcggagaagtatgtggataagaaataacaaaaactgaggggatcatgaagttcttcgttatattatagttttcaatctgaatttcaattccgccgctcgcctttttcctctccgccttttccgtctctccgatctgctcccgccgccgaccttgtgatgattatagctctgaaggtccaaggatattcaaatctcacttcttgtagaatagaaatttcgaaagttattattgaatagaagaacttttattagtcaagattgcaaaatatttttatattctttgtgcactcctgaaatacacattcacgaatttatagatccatttgttagcttaattaaactctaaagttcaatgtctttttttctttggtgagtttgtctgggaagtaaaaaaaaaagttttgatcagacactcaaattttgagtatcattctttaacattcagaatatcaattttgagtatcatttacaaagaccagacactaaaatgttaagtccagctaagtatcattcctcaacgttcattaaagttttatcacatcccttgaataatttgagtctctacagaaagtttttgaagagcatattattattagcagcagtgtaacttgggacggcccacaggacaagctcaagatacttccaatttttaaagcaaaagtggaaccaaaacactttatatgcttagaatttggtctattagaaataattttttcttgttgaattattgaataaaagaacttttattaatcaaaaagtaattcatctttaacaagtaaaaattaagaatgactgaattttacagaaggaaaggacatacgaatgctaagacgaccttaaaatctcccaaaagtaaaagtaacaaaaaaaaaactagaccacatcaacggaaacagtgggttgatcagcttctacgtctttggatttcttgaagaacaatctagcccatctcttcttaaactgtaaaatttccatcacaaccgcaaacgctgcaatgcaacagattatggtagtataggccattttccagatgcttccgggttgtaaaatagacaagcctttgtagatattgtatatgcttagtacaatcactatgtatcccatagtatgatgataccagttccagtattttctgtatttatgatccttgttcggtcttgctttgagcgaaagtatctgcaaaaaccctaaagcaaacagaagtaatcctatcacggtatgcagtgtagtcctcatcccggtatgtctcgccatgtagattgctgttcctaatcctccgatcaaaccggcaaaataacccgtggtttgacaaacaacgtgtatatagaaccatgtgggatctaatacctcgtaattcttcatatatcttgcagccataactccgatgggcatgagaatcccccagctcaatgcattcactattgcatggatttgttttaccaacaacatgtttctgttaactgattttgtggttgtgacttgtccggaaagcaaatccaaagaagccatggatttgagattatcaccactcattgcgtgcattccaagtctatctccttcctttaacggaccgtcttgccataagtgattaacgacggttgtgttaggaggcaagactaaagttgcaaatatcatcatctcttcattagaatactcagcggatacttgtgttacacgaaggctaagaggagactcttgaagcataggagagtagctattaatggaggaagtataagcacgcatgacaccagaagttgagtttcgataagccacgagtgcttgagctcccaccatgcctttgcctgtcgggtttatagcccacgatatccaactagaagactcaagattggagtgccggtatgcaatttcaagaactccggtttcttgagcataattaaagtgtagataagagtttaacaccaaaagatccgtgcaagagcgaaagctttttccgttgttgaagctgtaagattcacatctagatctagcatgaagtccttgttctgttgctgctgtcgtaaaagatggaatcaacatgaacagacaacacaaaacgactaacgtggctctcgaagacaaggacatgataataattatgattgtggcttttctcggagaacactaggtttacgattttggaagaagagatttatgatttctggtgctagaagctgagtagtttcgcatatttatagcgagttatattcacttcctaagacttaggactgtatttccataatttgatattgtttacttttttttgacccttaagtatatcaacaacaaaaaaaaaaaagtgtacatatatctatattaatccaaaaaataatcttttcacatctttactatatctaatacgatctctttcaaatttggaaaaaccttttctttatgactttattgctttttaaaaaaaacttttaagttttgttagtagcaaaattttaaggaaattatcaattacattattcggaatgctagctatttgtatttcttttctaaaacatgtgattaaaatatgtataaaagaaaccgacactctaaagtctaaatttttaaatttaaatttccataagataatcattaaaaataaaataaaaaatacaacattaatctcttcaaatcaaattacttattcaagttaatctatgaaaatatttatagtttctaaaaattatctaggttacgtgaatgtattatggattatttgaagtgcattaagcgtaggaaagcgatgatgcataatagtgtcgcaatgataatacataggttagttgatgtatacattttttttttttctcatcacggcaatctggttgccacaaaaaagtcaaaatctaatcattttactatttgtttgtttacttggaatagtgtcgcaatggaaaagtataaaccttatcttcccggtcaacttctaacgttatacgttttcgggtgacaaaaaaagccttaaggttttccgggatgttgattagttagatggttataattcagattaaggtttagattttttttaaaaacgttaatttggttggtcatggtcaaacagcttaagagaaaacgtaaggacttgtcccttaccgtcatttatacaaaactcttcttattttaaaattgttctcaaattgaatagtatggttataaccggtcaactttaacgactctgcctttagtaattagttaataatacacactaaggtgttatttattgggtccattttcattatgcgttctttgaatcttatagtaatgtaatgtgacgatgtttattttattctagcatgcgtcatttaaaggtgatcgaaagttgtattggttagagactttttttcaaagatctcattcttggtttggcggtcgaaatactatagctttctctcttgtatatagcgcaaatatttttctcatatttcttgatcaatactcaatagattaaagcctagacacccccacttaagtgtttgtgtcgtagcatccaaatcaaattctgtctttgttaagcagtttaattgattatcatgaattgtagtagttaatcttttttctgttccaatcactttactacgagtgaattttgtattgtcttttagagattatatgttgacaaagaaagatcaacccgtttatcgcaaaatgatcacgtttgattacaatcgcgccaaacagaaaaattcgccacccacagtttgcatctatataatctcattgaccgtagcatttatgcctcaagaatttaatagttacacaaagttctcataaatataattacacgcgcgtgagtgttaggaaaaaatt

SEQ ID NO: 6934 - DNA, 1374 bp, Arabidopsis thaliana landsberg
tacatttacattatacatgaaccaagctacgtacagaaatatcattttcaatgaaatagttttcttagtctatgtacctccacatagtggctcctgacctgaaattttgaaagatgagtattatcattaagtagcaggaacgagtgtcaatatgatgaagggtaagcacaaaaaggcaacggatatacgaaaaagtaataatctgaccgttatggccatttatgagtaaaacaaatcgatgttaagaaagtcatgaaagccatacgatgaataaggtttgttgaagcagagacttgagatagttaagaaaaattagagtttaagggtactacttactgtgacacaaggagattgcagagataagaggaccataatttcctcttttaggaatgagggttgtccctttccccgcccaatacaaacgaatctccaacatatgattggtcacagtcgcgtttatttctttaataacaggcttcatatttccattagcctccttgttgatgttaaaatccctcaagaataattttccctaacagggcaggagaaatgacgaatagcaaatgaacgtcaatcttccatgcaacttataatcaaagaaacaattactaagtagtaagtgatgcttaaccacctgaacatagacatcaaatatgcgtctgccaagacggctgtatacttctttgtcagaaaactgaatctccataaaatgtagtttcacattgtagtttccattttccaagcagaatgcataataaacaagagatagagcagatcgacgtgcagtcttataaagatcaggatagtctccagacagggttaaattagttgacctgtagtactcatcatgatcactattatcatcggtaaagtcacctgtgttactgactccccaataatcgaactgctgatttgatgcagcgttggtttgacgactgttatcagtttgatacgttattttacccaaggagtttctaatagatacttcttctccaccacagtttatatgtagaaatcgctgatctacaattcatcaccatcagtagaaaaagtagacgtgaaattattaatttttaagaaaaaaaggatgaacaaatgtgagtacgtcaaaatatctaatgcatgttagagatacgttagaacggctcaatatgtacttacatttcttgcagttggctggcacagcgcatggaggaagcccagttctgtatgacaagacggtcatagcatctattacaatatacggaagcaagagaatgctaattatttagtctgttcttgatgcaacataaggcaagagtgtgtacttacaaattgttcttcgaatatgagctctggtatgtgttaatggtactgattcaacagaaagtgaga

SEQ ID NO: 6935 - DNA, 618 bp, Arabidopsis thaliana landsberg
aaaaatcattgactcttgtgtctgtgaatttagtttaggttgagaggatgtatacgccgggagcggcaacatgagtacgcgagactaaaatagctgtgtggtgggacatgaaggactgtccgattccagagggttatgatgctcgtctggtccgtccgagcatagaagcggcgttcaatgaactaggctactctggtcctatctccatcaccggctatggtgaccaaagagaaaccccttgtcagatcctgcgagggctctcttccaccggagtcgctgtagcacaaatcatacccggttagtccaattgctatcgatctctttgaatgaatttagtgctagcttggtttaaatttgaacaacatctcaagtcaatttcaacagaaagcagatgctcactcatgtattcgagtatgctggagtggcgagatcttaatcctcctccggctacaatgatgctagtatccgatcagtggcagcatgtcttcgcttgggatctgcccgtctacaacaaacacgaaatcaaccttttctggcttatcaactgagcgttcgcaggttcgcactgagacttgtggagagtggatctgagaaatacgtgagccaaaaggaatttgt

SEQ ID NO: 6936 - DNA, 2061 bp, Arabidopsis thaliana landsberg
actcatagatatttgttgtactccaacgttagcttcattgagaggtatattactctcttaaaacttttaaagtttgatttctccattaatactcactgacacaagcttcaacgacctctctgtttctcaagttttgtggatcctggtccacatggaaccggtagacatatggaacacatgttaccagaaatcgccaaggaagattttagaaagggtgctcaggtaaagacaagctttaatctctaagagcttcttttaatcagtatgctgctactgccatgaaacaaaacaaaattgagttcttggcaccttttgttgtgttattgttctctgttcttcttgccagtggttcacaatgaagcgacaacacgccattatagtgatggccgatggtctttactactcaaaattccgcgagtattgtggggtaagtttgtcctgcagctgaacatttttggttttcatatcgtagcttcttgatctcttatcttttgatatagaattcaataatagttttcagttctcatccttttgagttctgattctgacattaagtttctataaattcagcctggaatagaggccgacaagaactgcattgctgatgaacattacttgccaacattcttcaatgttagtctattcttcttcacacccccatctcttccaatcttttaagccttcttgatgctgaaaagtgtttatttgccactcttatttcagatgattgatcccatgggtatctcaaactggtcagtgacgtttgttgattggtctgaacgaaggtggcatccaaagacatacggaggaaacgagatttcattagaattcatgaaaaatgttacggtatgtttcaaaacgcagtcttttcgaaaaatgtcacaatcgacatcttattatacttatatcttttctcgcttgcgcagtctgaggacatgagtgtacacgttaccagtgtgggcaaggtatgctcttgtgactctcccttgcagcctctattatttttctctcactttaatacttttacttgtgcttttgaagcatggagatgagctgcattggccttgtacatggaacgggattaaacggccttgttatctatttgcaagaaagttccatcctgatactctcgacacattggtcaacctcttcccaaactacacaagcacagctgtctgagagaggattcttgaaccaaacacacacattcttggacctaattgtgttccaaatatgtctcagagatggatattttagatactgtaaattttctgaagaaactgaaattattcttggattttgatgtttctttatgaaactgaaagcctggttatatgcaattagagcagaaatttttggttataagagtttcatttttgtgatttccctgttggtttggtcgttattaattggtttatgttacatggaatagtaataacttaagctatcatcaacaaagagtgttgatatcttgaaagtggtttattatttctctgtgatgacgagtggagcccgaggaaccgtgggctgtagcggtgtgcagtgccagtctttaccgtctttgaccactgagaaatgtttgggaacccatgactcaccagaagcctctctctgtttcagagcctctctctgcttctcctccacaagtatcttagcttctcttgctctttcccaatctttcttcagtattccttcacttacttcgctccacactattgttgactcgctctccattacctcctgcagattcttgatagttggaggtttgagtcctgtgatattctccttggcattgtagataacctcgagctcaccagtcttcagatttttcgccattaccgttctgaaacatcatggagatcatcaattcatcattcaaagcttttcatgttcttaagagctgtagtgactttatgattccaagtttctttacctgtcccaatggccaaagatgttgtagagctgattaccagaggaagattcaaagatctttcctttaatcgatctgcttgtggtgcctctgaatctttcaatgaatgaatcggagatcaaatgtaactc

SEQ ID NO: 6937 - DNA, 833 bp, Arabidopsis thaliana landsberg
atgctgttgctgacactaaagttgaggttttgtggcttctagatatgctttattggaagtgaaaacaagcttatgatgctattggagctctttctcaggtttggaaactctatacataatcatcattttgctcaagaactaatctttcaacaacttttgataattttctttaatacgagtttgatgttttctttctctctttaactatatagcttttgtttgatcatttgctgtaattcgatttatttttgtttataacgaaaattggaatgccatgtcaaaagaactcaaaacagaacaaacatttttgcacttctcttgaaggtttaggggattgaaaccaaatgcaggaagccaagaactaaaagtatcataaacaatatttcatttatattcaattattgcaaccaatacatctctcttagttgtaacttgtaagccaaaactaaaaaacattcatatcatatttcttaaaagttagtctttccatcaaaagtctgcccaaaaccccaatttgctggcatcacatcagtaaaatcttttgtaatcccatcactcgttgtaaccctcaatgatacactttgaccggttagattaacattagtagtccaattttgtccccaatatctgctcattactatccacgcggttttgcttcccttagcagacacggctataatatctccggctcctcctacattgtacggcaatattgttaggatattagggtttcctttaacttcaaacttgacaccaccggttttgccaagaaacacgtctgtatctaaccgggaccatcttggctttacccggcgatcttggtaacattggta

SEQ ID NO: 6938 - DNA, 3034 bp, Arabidopsis thaliana landsberg
gagcttatcatgctcattagtaaagtgatataaatgcccaacactaaaattctaacatctaaaaaaggtataagctttaaatgaacaaaagtatgggttgcaaattttaaaaaacagtgttcaagctttaaaagatcactcccttcaacgaaaaatgcctagaccataactcttatgcacctattcaccagaaggaaaaacccagaattctaggtatacgcagacacttaacatgtgaaagcacacattttgcgtcaacaagcataacaagctacaatgcagatgatagagatacaatgaattcatgtttcacatttaaccaaccagcaaaacacaaacttcatttatagaaaccaaaaaagcaaggaaatttacactaaaaagcccaaatcaaaacaattcactgcaagaaatctcagttctaacaacaagagagctaccaaatatcacattttgtgccatttcatacactagaacaccctacggagcagtgacatacccttagcagctagctacacaacaccagaacaaaaagaccaaaaacaagagtgaatctaaaagacctaagcagacattgactccataaccaagctttcaagcaatcccttcctttataaaccattactcaacactcaaatgcccaaaatcatgcagagaaatgtctaaatttgacaagtgacgataacaaatgataatataagcactacctctcacaactttgttggtgcccttgatggtataagagtccagctccttccttcccgtcttaattttggaggcgacaccaggtcgagttttcgccatggaagctagggtttttcgaaaactggttaagccggaataaaaaaaaagctaggttttttgttcccggaatgtataaggattggggcttctaagaagatcaggatgtgtagatcgatgggtagagaaaaaaggagaagaaaaggaaaatcccagtggggaagaagcgaagagaggaagacgaagagtaaatctggaaccctagattctctccaggtgaagaagatgagtcatttgcaaatttgggagttttactgttcacaaagcccaattcatttttttgccctttgcttttattttatttctcttataacaattttggaaatattgttactttatcctgccacatttaccgtaaaatgggaaaaaaaagtggctcgaatttcaaatttttactgtcgttttgaactttgattgaatattttgagcaagtaaaagtaaaagtttataggtgaaacagtacaataattttcatggttattcaagtttttttttttttatgttatcatgtatttgagccatttactggcaagatcaatgtttatatttaaatctagaatggtagcacgcgtgtttaatctttcggctaatgaaaattactaattgtttgatacaataatcactagttttggtatttgatgaaactaatcaaaacattagtgaatgaaactaaattaatcatggatatacgtacgtccaaaatagccagtttggcacagcaataacatgaatatttaatcaaaagttcaatgatattttgatattaccaaactgtcatacactaattgtttagattgaactttaataaacaaagaaaatcaaataattgttcatgtgaaatttgaagtaatgttagaactcaaacttttcactctcatataggtaacaagtatgaaagtaaacacattgaaacgaaacaacatagaaaccatatgatgtttttatttctcttgccacaacaataagccgattgaatattttcagtacaattccaagttgttgaaatctctctctagtacaaaaaaagagaaacgaaacttttctagaatttctgaatgactacagaacttgctagaccggcttgttcaatggtctgagaagggtcagtaagtggctttggtgggaaccccatgacctgaagggtatagttgtttggattccctggtcgagaaaactcaatgaaaccacgaatgtcgttaaccgtgtgatggttgttgaactttgctaccatgcgtgtcccatccgcgagtctaagctggatcgatgtggatggaagagtttcatctactacaaggctctgtaacggtgattgaaccgctgctacatcagttaggttactttggcttgaagctgttgatgagcttgcaccacctagagtccttccaactccttgaaatgaaaccttaagcttttctttctcctacaaaagaagaagaaacaaagatgttataagtgttggtaccatagtcataagatggatcaagcacaagttagtgtatcccaataggaacttacagggcacttctcatctcttctcataagattaacatgtacaggagctcttttatcaacaggctcaagctctttcggacattcagactttcgaatgctctgcaatacacgaaaatacaagacagttcaacacaatattcataagccaattcataagcattaaccaaaataaaattcacactcacatcaagaaaagaagcattctctggatcatccaacttcctcaaaggtccatcatctacagtgaatccattagaccagaaaataatattgtgaatcacaggctcaggctgttgaagagccgttggcacactttctccagaaagcaatcttcctgttcctgtaaagcttctagaactcgaaggatgctcaagaggtccttccacagctcctagctgtcttgcttgattaaatatctcatcaacatcatcgtgttttggttcttttgtaggatcttgaacaagcataccacttcacacataaaacacaaaacaaagatccaacaatttaccaaccatactaatcatcaaatagataattgatgattaataaattactcactaaactacacaaatctcaaaaagtaatgattttgattaaaacacttaattggcctaagaccattatagttgaatcatcaaaaactttagttaacacatcataattaagcagatcattagtaaaactagtgatttaggggttttaaagtacgaaccttttt

SEQ ID NO: 6939 - DNA, 1279 bp, Arabidopsis thaliana landsberg
ctctttatagtgcatatagattgacaaaaagaaccacaccttgtagaattttctagaatttctgaagaacaacagagttggcgagaccagcttcttcaatggtctgagtgagatcagtcaaaggcttaggtgggaaccccattgtctgaagctggtagttcaacgaggctccaggtcgagatgagtcaatgaaaccgcgaatgtcgttgaccgtgtgatggtgattgaacttagccaccagacgtgtcccatccgctagtctaagctgtatcgatgtggttggaacggtttcatctattacaagactttgagatggtgctggttcggtttggatgggaatgggagcggagtctggagccacaggtgagctacttccgctaccttcattgctaccacctagagttcttccaacaccctgaaatgaaaccctacgtttctgtctttcctacaataacaaacaagaccggtaagtcgattaaataagaccggttatcgcatataaaatctaccaagatttttgtaatgtatgaccaaaatgctagttttgctaacacaactttgagagactagtaacccaatatggataaagcagagaggggactcacagggcatttctcttcctttcgcatcaagttgacatgaaccggagctcttctatcggcaggctcaagctctttcgggcactcagactttcgaatgctctataagaacacaaaaactaaatcaataaccaaaaacaaaagatcaaaacagtttcacatgaaagtcattcacctcgagaaacgatgcattctcaggatcatccaatttcctcaaaggaccatcatcaatagtgaaaccattagaccagaaaacaatgttgtgaacaacaggctcaggctgttgattaccagtaggcacattttcaccagaaagcaatctaccagttccagtgaaactcctggaactcggaggtggctcaagaggtccttccacagctcctagttgtctagcttgattaaatatctcatcaacatcatcttttttcgatggatcttgaactaacataccactgcaacacaagaccaataaaaacatcatttagacatgaaaccctaaacctcacaattaatatctagatccaatcatagctaaagacgatccacatcgccattagtatcacgtgcgaaatagaaacaagactgaccttttctcaccacctgtgtagtattcttgaggaccatcggaatcacagtcggagtcaggaccagacctacggttaagatcggaaagagttcgg

SEQ ID NO: 6940 - DNA, 508 bp, Arabidopsis thaliana landsberg
tgttacttgaagatttatcaatatagtcgtgttcgtgtttcgttgattaagaataagataagttttatgctcttattttattatggcctgattgattgtgacgatctacagtgtcttatgaatcattatgttgcatgtgaatcttggttcaattgagattgtttccttttttgagagtacttgtctgattgaacaaaactttccatttatgttgaaatggtttaaggtttatagaaacggatgtttctagggttttgctgtaatctgggtatttgctttctgatatttgcaagaaaatgttgatttcaaggttttatcactttctctaacagcaaaagaagtcttagtcatttgcaaagttaagagagtttttactttatttatttcttccacgctattgcttcgtggctgattgagatataccaagtaaactactaatttgtagtttgaacattatgttgcgtgtaacattgtccttcgttatctgtttaggaggagggccgagtag

SEQ ID NO: 6941 - DNA, 2098 bp, Arabidopsis thaliana landsberg
catatgctgtctcctatgagtacatcccctttgatacgcctgatggaaaacctcgtggaagttacgatgaaatggtttataatgtgtttcttggggtaagttactctgatccctaaccatttgaaaaaacaattcctcttttttttttttctttcttatatacatacataatcatgagacctgtaaaagtttttttttgtttttgatagttaaggcgtctacaatagggtggagagccaatattgagctaaaatgttaatatcttttttacaaatgatgttgacaggagtttgatggagctgtaggtgatacaacaattttggctaatcggtcgcattatgttgatttcgcgttgccatactcggagaccggaattgtattccttgtaccagtcaaggatgggaaagaaaaaggagaatgggtcttcttaaagcctttaacaaaggagctatggttggtcactgctgcttcttttctctacattggaatcatggtttggatttttgagtaccaagcagatgaggagttcagggaacagatgataattgataaaatatctagtgtgttctacttctcgttttcgactctctttttcgcacacagtgagttaatctctgtcacacacaacttcagctactaaccattaccaatttacttgaaaatctttgaaacaagaaaactgatctacaaacattttctttatagggaggccatcagagagcttttttacaagggttcttgttgtggtttggtgctttgtgttgctaattctgactcagagctacacagcaacactgacatcgatgctgacagttcaagagcttcgaccaacagtgagacacatggatgatttgaggaagagcggagtgaacattggatatcaaactggttcgtttacattcgaaaggctgaaacaaatgcgtttcgatgaatcgaggttaaagacatataattctcctgaagagatgcgtgaactttttcttcacaagagcagcaatggcgggattgatgctgcgttcgatgaggtcgcttatatcaagcttttcatggctaagtattgctcagagtattccatcatcgagcctacctttaaggctgatggctttggctttgtaagtggagctgattgctttttatttagacttttaatggtggcagcagaagagaggtacaccgcttgtagtcaaaaccacttttagctaacattcaaacgttttggcctgtacgcaccaaacttgtgaacgatgaactaaaagcagctttctacactggcaccattcagaagtgatactaaatctcaatgatttttgcaggcatttccactaggatctccattggtgtcagatatttcaagacagatcttgaacataacagagggagatgccatgaaagctatagagaacaagtggttccttggagaaaaacattgtctggactcgactacatcagattctccaatccagctcgaccaccacagctttgaagctctatttctgatcgtctttgttgtttctgtgattctactcttactcatgttggcttctagaggataccaagagagacaacacaatgcttcacccaatctaccaaatgatcaagccaatgcagctcaagaagaagtcaatgaagaaggtaatgttggagatcatattgtggaagtcgacacagctttggtccgtcgtaagaaactgacctcaaacactatacccattagaagagttgcgccactatcaaggctaaagtcagcatagtcaaacctaaactctagatttctttcactgtttagattgcataatcataatatttaaggaatccttttctcaaatatgtttaaatgtatctaagatagactgatgcaaacttaaatcttacctactactattacatgaaatatttgttcattggtcagcataaaagacggtatttacgttcaggattcttatcaacattcaataatattcgctttgcatcaaactagatcaattcactaggaacatttaatcaatgatcaagccaaagaataaatcctgaaataataatattttaaagataaccatcactagtacaaaaaacaggagagctctcaacttacacgatt

SEQ ID NO: 6942 - DNA, 575 bp, Arabidopsis thaliana landsberg
agactttttaatggtagctaaaagcggtcgtactattcccgacccatcctctggcactatttaaagcctcaataacagtaaccagggatacttacaaagccaaagccatcagccttaaaggtaggctcgataatggtatattttgagcaatatttagccatgaaaagcttgacataagcgacttcgtcgaatgcagcatcaataccaccattgctgctctttttaagaaaaagctcatgcatttcctgagaagtatcataagtctttaacctcgattctttgtaacccatttgtttcagcctttcgaatgtaaaggaaccagtttgatatccaatgttaactccactgttcctcagatcatccatgtgtctcactgttggtcgaagttcttgaaccgtcagcatcgatgtcaatgttgctgtgtagctctgagtcagaataagcaacacaaagcaccaaactaccacaagaacccttgtgaaaatgctctccgatggcctcactataaaaaaatgtggttatatcagattctttttttcaaaagattttgcaaagtaattgggaaatggattaga

SEQ ID NO: 6943 - DNA, 614 bp, Arabidopsis thaliana landsberg
caggcttggtacttaaaaatccaaaccatgatcccaatgtagagaaaagaagctgcagtgaggtaccagagctcccttgttaaaggctttaagaagacccattttcctttttccctctcatccttgacgggtaccacgactacaatacccgtctccgagtatggcaacgcgaaatctacgtatgtagaccgattagctaagattgtggtatcccctactgctccatcaaactcctgtaagaacaagaaaaagttttataaaggtctcatgatttcggctaataatttacatttatgatcaaaaaaagaaaaaagaaaaaacttagggatcaatatgtaacttaccccaagaaatacatgataaaccatttcgtcataacttccacggggttttccatcaggagtttcaaagggtatgtactcataggggacagcataaggcatttgtctcattgccgtgtcgaaaacatctatgcaaaacccggtgatcgttggagcattagtatttgcatcttttgttacctccacaaaattattgaaaccatccttttttggactgctattcgcagcttctttgcgtttgttgggaaattccaacctttaggcacaaaaata

SEQ ID NO: 6944 - DNA, 1726 bp, Arabidopsis thaliana landsberg
  unsure (1)..(1726): unsure at all n locations
taataatacaaactcctctacctctagcatcgatctattactcttctcctttgaatttaacttctacaaaggtattatatctcctctgttagtaatttctatatcaaccatacaccatatacatacttctattagttaaaacgccattaaaagtttttttacacaagtaaaccgttcaataacttttgaaagtctttgccgagtgaagaattttagatcagtaaatatatttcatacatagttttcttccatctttgtattgattaaagaacaaaacattagataaatctgtaacatacgtaaacttcttgcgcacgtaattactctgttttgtgtttaagaaagaattaacggttctctcccactgagtagctccatggagaagagtttccaaaggtctgctctccttgtgactttgtctctcttcttcttctccattccgggtttcactctctgttccattcgttctgtttcacggttggttattaacaatccttattcttcctccttgtgactttgtctcttttccttttttaatcgacattattggatttgattgaaacagggtttggaggtgcatgctccaatgacaaagtgagcaacttaacacagttcctcatcaaccactccggctaccctggaacttgcgtgtaccgacacaactccttctttgtcttcttcttgtctcatcttgatcttgcaaaatggtttatcgccgctgtatgtttatgtgtcaacttgtagagaaataggagatggagtgaaagattccttattcatgccgcttaggcaacaagccagcatagcttgtgagaaaattaaacagatgccagagctgagtgaaggttacaacatagtggcagagtctcaaggaaacttggtcgctagaggcctaatcgagttttgcgataatgctccaccagtcatcaactatgtctccttaggaggacctcatgctggcgtctctgcaatccccgaggggtgtgatgtgagttctcttccatttctatttatctgtctttttgtgtcaaccacaatcacaacaacaacaacaatgggattctctgtttacagtcagcattttgcatactcatgaaggcgttttttgcagtgatttacagcgattttgctcaagtaaaccttctagtcttctcttattcctctagtcatgatttaaaaccttaaaccatgattaatacctataatgactctgcaggatcatactgctccaagtggttatgtcaaaaaacctatggtaaactaaaactcttttctttcataatcctcaaaatcatttccaattatatgaaatacttgaattgacaaaacgttatctggtttttaaggaaataaaaaattatttggaacactccaagtatctgccaaagctaaacaacgagagacctggcgagaaaaactccacttttaaagaccgtttcaccagcttgcaaaacttggttctnnnnnnnnnnnnnnnnnnnnnnnnnnnnnnnnnnnnnnnnnntttgagatgatgacaccacaagtcttgaacaatattttcattaatttctttttttttttgcatttcctaaacagttccagaatgatacaatattggttccaagagaaacttcttggttcggatattacccggatggagcttcatcttcaacacctgttttgcctcctcaaaaggtcaaccagaaatcatctctcttcactaaactaaactaagtaactaact

SEQ ID NO: 6945 - DNA, 861 bp, Arabidopsis thaliana landsberg
caagtaaaccttttctcttcttcttctctaatcaagattcaaaacctttgagcattcattactactacccatcattagcaacatcactaatgactctacaggatcatattgctccaagtggttatatcaagattcctacagtacgtaaactcaaacccttttctttgtaatccttaaatcatttcctattagatttagatgaatacttcaactgagaaagcatgaaactggttttcaggatataaaagattacctggaacactccaagtatctgccaaagatcaacaacgagagacctaacgaaaggaacaccacttttaaagaccggttcactagcttgcacaacttggtccttgtcatggtgcctctctttcttaaaccacctaaatcttgagcaacattgttaagtagcttcattaatattgttttcttcatttcctaaacagtttgagggtgatgcagtagtgattcctaaagaaagttcttggttcggatattacccggatggagcttccacacctcttttgtctcctcaacaggtgaaaccttcttgatcatctccatgtcatttctttgcctgatcatcaaccacttgtttctaacttgatattggttatccagacaaagctctatactgaggattggattggtctgaaaacattggatgctgccagaaaagttaagtttgtcagtgtccctggcgagcacctaagaatagcgcaagacgacgttgtaaaacacgtcgtgccttacctcaagaaccagcctgcgtctatgagtgaagatttggagatactgcatctatgattgagacttcattgttatgcttctcttagaatcaatttaaaagtgaagaacttt

SEQ ID NO: 6946 - DNA, 723 bp, Arabidopsis thaliana landsberg
atcttcaacacctgttttgcctcctcaaaaggtcaaccagaaatcatctctctcaactaaactaaactaagtaactaactgtacatatattctttctgcagacaaagctatacactgaggattggattggtctgaaaaccttggatgatgctggaaaagtgaggtttattagtgtccctggcggacacatcgaaataacggaagaagaccttgtcaaatacgttgtgccttacctccagaatgagtctttgttctcttctgaacacgagacaatatagacattacaatctttaacccattaataaattggcctcgtccgaatctaagggcctatatcatcaatgtaacatcatcatctatgtatcagtgaaattaaaataaaagcttcatctcgtataagcttaagacttacctttctcgtgcatacaaaaaatcaataaaaatcataaggaaattgtgatcatgcagagttcttcatgtcttctggccttgcaggtggggaaaaaattgaagaactaattgaacgatttgagtttaatattggttgaaatgcttctgaatacattacatgattaatgcagcatactaaagatatatttcttggttgtgcatgtgagtgtgtgcgcactttttttttttttttgcctataggccaaaaagaaccccaggcaaaggaaagacaacggaaaccctgttgcttgaaaaattgacatttcaatttac

SEQ ID NO: 6947 - DNA, 902 bp, Arabidopsis thaliana landsberg
tgttatagaacccaaaaaagctcttgattgttattctcccgtgcatcaggtctgacctgcattcacagtaagttcagttctgtatttgacaactcttaagcaatttatacatcatgttttagcgttttgtagattggaaatgatctttctcaatttgttggaccggttatactgagccatttattacgggtaagctctctctctctgctcattccttgctaaaaaatatattgcatagttgtctttggcccgtgacttatgtttcacacgtactcaactgtcattacacattttttgaggttttatatatacattatagcttttaaaactgagatacatgagtgattcttatctcacattttcaatgactgaaaatttgtgagcattttgtagcatatactttggttttttgttgcatctacatttttatggcccatgatttctctgacctgatcccgtgctactctggtttattgaatctaactttaacaaatcatgttatgtagtcaatgcaagaaggtgatccagcttgggttggctatgtctatgctttcattatattcgttggtgtggtatgtatgacaaaatttgtctctgatctctaactatcatgtataattttctcatcattttatttctcatattgttgattttcttgtcaaaaccattgaaaagcttttccatttcgattttgctacagacacttggagtgctttgtgaagcccagtattttcagaatgtttggcgggtgggatttcggttgagatcaactttggtaaaattctgtgaaacttacatttctctccgactattataatcaattagtcatgtttattcttctaccaagtatactacattccctgtaggttgcagatatttttcacaaatgctttaagactaac

SEQ ID NO: 6948 - DNA, 1207 bp, Arabidopsis thaliana landsberg
ttcctcactatttctagtggggggaatgatgtactacagagtggctctcgaacttcaatgtttccaggaatacactgaagaaaacggtttgaacttatccttcattctcaatattgaatgttttaaccttacagatattgtggtttggccttctctgcctaagtatcctccactacttcatttagttgtcaaagttaatcttgcttgtgaagaagattgttttatgaactctattttcttcttgcagctaccaatggtggctatcttccctcagaatcaaatgaagatgatcgaaaggcttttagtgaccgtgcacgagctcttgcagatttaaaatttacatatgtcgtgtcctgtcaggtctatgggaaccagaaaaagtcaagtgaaagccgagaccggagttgttacaataacattttacagctcatgctaaagtaagaaagttctcttgtttgaaatcaaaacttcatatgcttattcttctagcttagttttaattatacattatggttaggtatccgtcattgcgtgttgcctatatagatgaaagggaggagacagttaatggaaaatcacagaaagtattctactctgtgctactcaaaggatgtgacaaattggatgaggtatgcaaaggaaatttataataactaagttcatacattcgtagcccacttccttgcttactggttttaggtcacaaaggaaaacttatttatttccagtcccacataggacccagatatagttacctatttatcctgaactttgattttgatttcttaggaaatatatcgtatcaaacttcccggccctcccactgaaattggtgaaggaaaacccgagaatcaaagccatgccatcattttcactcgcggtgaagcactccagaccatagacatgaaccaggtagctttcacctctctatccctcaaccattttattgattccaactatagtttcatttcctttttccatttcaggacaactactttgaagagtgtttcaaaatgagaaacgtgctacaagaatttgatgaaggtcgacgtggcaagagaaatcctacaattttgggtcttcgtgaacacatatttactggaaggtctgagattcttcatacattttttatttttattgagattcttcatattatttagttttctttatctttctcatctgacttctttctgacctcgcagtgttt

SEQ ID NO: 6949 - DNA, 1216 bp, Arabidopsis thaliana landsberg
  unsure (1)..(1216): unsure at all n locations
cttagatgcatagttacgtcctaccatataaccaattttatttatatactcgattcgccacatattaccaaaaccaataataataatgctatagtgttgaaatataatttatgtatactagtaattaagagagtaacctcaagagggctctggctatagtaataatggcgtataaactccggtttcatgaggactccggtgggtggtttatcggtaccttcaccatatgtgtactcccatatatcttcttctcccacatgtatctatcaaatactcacaagagttaaatagctagtggttctatatatcttctatacattacaaaaaaaacgaagaagaagagaggtgagttagtaaaagagtcacactcacgtttgaaagatgcggagaaggaatggatccgggtcgaaccatggaagctgcgaggtaaatggccatggagattttgtctgtgaacttgcaaagagcttcggtgacacttcctccgccgatgctatgtccatagagtatgactttgtggtgaggagggagatcggacaagagagagaagagaggacggttatattggtcggagtcgaagcgactgttagagtctatgaggctgatgcagcgccggtgagatctacggaggttgatttgaaccggcggcgtcgagaagagtggtgagtttataccaacaccaagctccgtgactggctccatgaacaaacacaaagtgaattacgggctcagcaccaccttctcctcccattgcatgaatcttgatcaatgcttgtacactatctcaccttttaacacgttatgcagttttggtccacagtttggagataacaacgtaacgtacgatcctttttttcctttttcaaaagggtatctaattttcttccagtttccattttttcattttaaatttgtattaaaaatattgtaaagcacacaaaaagaaaattagatgtgaaggtaaaaagaaatatttaaatttcagataattaagannnnnnnnnnnnnnnnnnnnnnnnnnnnnnaattatctgagtattattttcttgaaatgcctaatatattctaaagctattaactatgggatccctaataattattttggtacttattaacttatatgaagattctaattggagaacttgcttgctattaaatatgtgatttatacatagatatatttaacggagattattgaatatatttttataatatg

SEQ ID NO: 6950 - DNA, 440 bp, Arabidopsis thaliana landsberg
gtattttcatatcttgtgactagggaaaagatccttccaatccttcctttgtagcttcaaatcttatttaaaagtagcagtccccgcatcattgaacctaatagactatattatagttagaatctttttgttatggaaagaagactagctttggtctttggcaacttacccacgattcttttacagggtgcgtttccattatggccatcctgatatatttgatagaatcttccacatcacaagaggaggcattagcaaggcttcaaagataataaacttaagcgaagatatctttgcaggtagagaacgatcttgacaagtttttgttttctaattattttggtgtatttgtgatggctgatcatggtaacatccagggtacaattcaactcttcgtgggggttacgtcacacatcacgaggttattcaagcatggaaag

SEQ ID NO: 6951 - DNA, 637 bp, Arabidopsis thaliana landsberg
aggtgaatactatgacatgtcatctcattatctcaacactatgacatgtcattatcctcaagcttttaacaatttttgtgacccttcgatgcattagcgtatagttcttgttgttttgttttggttcagtttagattcacattttttaaaaatatatattattaaaagtgtagagatccgaaatttatataacaggatgacctaaagcaaaattttgtttttattattcataaggcatgtgtacgttattttacggataacctcaaaacgtatttggaccacagacgagagaggagattaagttcacgtctctttttccttttttctgcctttttccttgaaattgtttgagtgaacactagcttgtttgaaagacttgtcagctagcaagaaaagagagtacatatgttggttttgtccaacacagatagacgtgtaacgttatgatatctccagtatgtggactaaactgcatacatttagtgttaaaaattgagtggattagcattaataagcacacacattgattgagattacgatgggaggttacggtggtgatgagtccgtaattctctttgtgtttgttcatagggccagtcacggagcttggtgttgggccaatattactataaccaaa

SEQ ID NO: 6952 - DNA, 3633 bp, Arabidopsis thaliana landsberg
atatctatattttttttatctatacgaactttgtgttaaggttttttgaaatgttaacgtgatcgtgtttatcaataaagatttagtgtttcgtgtttcttttgttggtcttcagttatacagagaatttctttagagtattgtggtttgctttggatgtaggtgctagctaaaggaaaaaaatggggcttaatttcacaaagttgttcagccggctttttgccaagaaagaaatgaggattctgatggtaggtcttgatgctgctggtaagaccactatcttgtataagctgaagcttggcgaaatcgtcactaccatcccgaccatcggtaaggtttaaggattccttaaatcacagtgtctgtcgatgtgtacacttagattaatattttatgtgtttcttacctgtgtgtaatcctccgctacggattttatgtaatcctcttctgcatggaagttttgtttcttaaaaaatttaatgttaaggagggtttcgtttccaggattcaacgtggagactgttgaatacaagaacatcagcttcactgtttgggatgtggggggtcaggacaaggtacatatttaactcttgccatgtttatggtatactgtcctcgtgatgctttatgctctgctctggttttggtgtgactagtaatgatctttcataaaacctggttattcatatcgtgcaagctcaatttgaaattttaatctccacgtctagtatctatgagtgtttgtcttcttctttttttgtctgatatttgacattaaaatgcacttccgtaaaaacataaacagattcgtcccttgtggaggcactatttccaaaacactcaaggtcttatattcgtggttgatagcaacgacagggaccgagttgtggaagcgagggatgagttacatcgcatgttgaatgaggtttgccttctttctagttttctcttgttacacagttagactgaaacaacttcctataatttgatttataccatgtttgtaggatgaactgagggatgctgtccttcttgtgtttgcaaacaaacaagatcttcccaacgcaatgaatgctgcagaaataactgataagcttggtcttcactctcttcgccaacgccattggtaaagttattttctttctacaaagtttttcattaattaatgtggttagattgaaaaataaaaaaaaatgtggttagattgatcacattgtgataacatgtatcttatgtttttttcttttaacaggtacattcaaagcacttgtgccacatctggagaaggtctctatgaaggccttgattggctctccaacaacatcgctaccaaggtaaataacttaaatatcccattctaaaactaagtagaaatttgaaaggaacactcttttgaaagtattgatgcacttaaataacatccttaggggttttagattatatctatatatacagttttggagacatttagaggaaaaaatcattattcatgaatactgatcaaaccttcattttgattgagtactgagtaggcatgatgaagctgaacactttttgtccttggagaccattagtgattgtggagaagaaagaagtattatgtctgattttacaacggtttatagcatccatccgttgatgcttgtgtcattgtgtgttaaaacgtcaaaaatggatttgtgatagtttttacttttacctttttgtttgtttcttctaaacttatggaaatgttcttcctagctaaagagtagatatgataccttttcctccttatatagaaggtttttacaaattctctcagtttatagaaccctaataaaaccaaatcaaatacactatgcatgagggctcaatatggtccaacagaagagtaagtagattcatgttccaacaaacttggacaaatatgagagccaatatggtaattttcaagaaactcaacttgatctcgaatttggaagaagctttaggtagcattagaaaatccgtggtgagtcgtagcttttccttgtggtcttttggggatgcgccaacgttaacgagctcaagacatgacaattcctccaagaaacgcttcatttgctccacctctttgatacttccttagtactcagttaatactaggaccttcacaggacatgatgataaacgagaacatcccaagaagcatttgcaatcagatacagcagaccagacattggatagccatatatgaaagacattgaagagtctaagattacacaacaaataaaggaactttttgtttttatgttttcgagaatggagactaaacacgaatatatatgatgctttgtgtgtgtagtatcatcgaataacatctagaattacagatgcacttactagatcaatcaaaagagttttttgtaacgtttttcttcttctgtactgcaacacacccatttattgtctctcaaaagcttgcgggattcagcagacatgaaatcaccgcatggttttgcgttgcttttgaaatttagtcatcagctggatcttgtggagattcttcagcagtgcgtttgattgtgatgactgggcattctgcatgcttcacacaaaattcactcactgttccaacaaataccctgtccagtggtaaacaaatgtgaacttgatcaatatctgtgatttcaagctcaagcaagtacaagagctaatgacgattctcggtgcagtataaagtctaaagcataagcagtgattgatttccatgaggtgtcatcaatcatcatatgcaagaaaaaggtctcaggatttctaataaactcttgatctgtatttttcccgaaaccaacaagtcatttgagactacataatgactaatcgatatggtataactgtaaagcaagaataagtcttcttgaggcgtgtgtgaggattgtacatacttttggaatgggccgagaccacgacttcccacaaccagaaaatctggccggactcgcctcacttcatggcatatcaattctgtgggatcacctttcctgatccaggcctcgcacccaacctacaagttcaacaactaccatgtatcagagccaccaaaagttactgtgatacaagtgagggacataaagacagatatggatctatcaatgagtttaaaggagtcgtttaccccaatatcatgacattttttaacgaaaaactcaagaaggtgaagtcctttagccttgttacgctccctcatttgtcggaaatcatcaggggaagcatatatactgtccatgtcatcaaaacctggttcccaattcataatcagaacaagtaagatcacatttattaatgctacctaacaaaaataaaacttggtatattattgcattgctcccaatgaagaggaaaaacatcacataaacatgaagaaagtcttttccataatatttcttagaaatcaaaagcacaattcttctcagaagtggatctagattcttctaactaaccaaaaacagttcttgtcggttctttgacttccattgaaaactctacgaccctcgcaacagctaaaacactagagatcaagtcttgagaacatatacaaacacctaatttagcctgaattaatctactataccctaaaaatatccgttgagcatcatcattgaactaatg

SEQ ID NO: 6953 - DNA, 2071 bp, Arabidopsis thaliana landsberg
atggaggggggagttttgggccatttcggcgaatcagcccgttgctctgttaagaaagctttctcttcaatggtgtttatgattagagaacttctaagctttacgttacacatgagagagcttcttctcttcgaagatttgcaaggaattcttcatcgtgtgagaaaagaaatgcaagcttcgttcgtttggttgtttcaacaagttttctctgctactcctactttgatggtctctgttatgatccttctcgctaatttcacggtttactctattgagagcaactctgctttagccgcatccgtaagtcccccgacaaccaccctctctttcagcttcgaaactatgtcggagataagtgaaactcaagaaacagaccagaaattcgattcttcaatggttaagacgttctctgtttcttctccttacgggaaaacatcttttgtcggtggtggaggtgggaacaacataccaccgccggtacaaagcggaacagatggagatggatctgatcagttcagaaaatctcaattctcatcatcgtctctaggtgcaacaagtgcggattcagatgtatctgtgtcagggcaagaagagatcagactgtggaattcgatattggaggaaactgcgaaaatggaaacgttggatcacgagacgatgaaggggatggtttctccggtggaagctcgattagaagcagaagaatccatggattacttcaagacagagcttctttaccaaacgggattgtctcaggagcctggaaacgttctccttcttgctaattacgcacagtttctctaccttatcattcatgactacgacaggtaattaacatctgaccattatattataatttactactaatcatgttatctttgattttgttcttttattatactaagttagattatggagttttagatacggttaggtgttaaggttggagtcttgcaagttgatactaactgtcagaagtagccgtggaatggtagatattttattgcaaattagggagccatagagatattttaagctagaaattgtcataatcaaatcaccataagaaccaatcggataggctttaaattgagtgaaccagttctctttaccccttaagagaaagaagccaactagtaagtgaatatctacatcttccattttcagaataaaatagggaataatttaaaaatgttgtcactcactatagggattgatagttctctttcccaaagagtttgtcttttagccagagtcttttttgggggtgggttcccaacaaagaaaaaaataagcttggttgatgatacttgacagtggagtatgtggtgtaattttgaagcttgagtctttagaccaatgttacattatttcttcatccaccaatagtgttgttaggtaacaattctctaaaatgggtaaaacagtgttttagatattttggtgatcagtctcttgataatattttgacattttagctaagcggttccattttagacagttcctcatttgatacatctgtcacattctataaaccaaaacccaattcacttacgttttctcacttacccttttggccttattcaatccatatcttatctctactctatgtctatatctaacgcggcttcttttggtttgtttggtgaaaacagagcggaaaagtatttcaagagagcagcaaaagcagagccagcggacgcagaggcattgaacaaatatgcgacgtttctgtggagagcgagaaacgatatttggagagcggaggaaacctacttagaagcgatctccgctgatccaacaaactcagtctacttcgcaaactacgcacattttctctggaacacccgtggtgatgaaacgtgttttcctcttgacgctccatcgcaacagaacaacaccacatgaataaagagtcacaacaatttgcgtatgtccagtgctgtttttgcctatacaaaactcatgtcatgtggccaactttttttttgtttttgtgaaccaaagactttagattatatatgcacctaatttcaaggtttgaattaatttttttttttttaaacat

SEQ ID NO: 6954 - DNA, 1602 bp, Arabidopsis thaliana landsberg
actcgcaagacattttgctaagagttagagaagagatgcaacaatctttcgtttggttgtttcaacaagttttctctgctactcctacgttgatggtttatgttatgattctcttagccaatttcactgtttactctatcggtaacaacagctccgctttagccgctgttgctcctcttcctccgacgattacggagttaacaactgttagtgaaacagaggaaacaaacgtgaagtttgattcctcggtggtgaaaacattctttgtatcatctcctagtgggagtatagcttcagttggtggtaacaacaatggcggcggtggaaacgtcaagccggtgttaagcggaactgacggtgatggatccgatggatcagaacagttcagaacaatcatacccgaaggagtttctcaattgtcatcatcgaatttcgggtcagagccgtcagtatcgggacaagatgaacataggctgtggaattcgatggtggaggaagcagaacgaatgcagtattcaaatattgacgattcgttggatcaagagacgaggaagcggttcgtgtctcatgtagaggctcgagtagaagcagaggaagacactggttacttcaaaacagagctaatgtatcaaacagaactgtctcaagagcctaataatcctctactactcgctaactatgctcagttcctttacctcgtctctaatgaccatgacaggtaacactttaatcatgtgttttctaattaaattatgttaatcttagtttagcttaagtagatttggttattgagttagggtcgaatcttccttttagattcttttgggttgtgaatttctgaggctacaagttgatgcatagagtcaaaaataggcgcagacttcgatgattttttaattcactagtggggcagattgtggaaattcataattgtcataataatcgcatcagcagaatatacaccaaccaatttcttttcctctttgaggaaaaacgacattacacaaatatctaacagagaataaataaagaaaattataatgtaactctcagtcagtgttagggattagttctagccaatgagctttgagtctttgagggttttagtgatagtggagtttacggttgtgttttaaagactccccaccataacccaacaacaaaagtcgttacatcacaatttgtcttctagattttatctcccacccaaattaattaacccatgtttttgtcattagctttatacagttagttttttgttctagattgtagcattctttagaaattgggcttaacaagcattatagattttagtgacacgatgaatggtttgatattattcctaaccgatccttatttgttagtatgatggctaaattgataattctttcacatttttgtaaccggtacctaattcatattatatggaaatttaattttcacacgtaacacttttggcgttattcatttcatcattaaatacgtccacatgtctttacttatctctattgaaaaagttctcacgtgatttcatgtgtaacagagcgggaaagttttttaagagagcggtaggagtggaacccaaagatgcaaaggcgtttt

SEQ ID NO: 6955 - DNA, 1187 bp, Arabidopsis thaliana landsberg
gcaaggaatcttggattacaaactaatagtctattaaaagcactcgaagaattaaaataaaaattgtatccaaaaaaattaatggcctgatattcgaaaggaatcttaaattatagactggagattcgtctatgtgtatcccatgcataaccttacgtgtcttaaatacgtggcatgaacgtttctgaaactagtgcattttcaaacaattattgatcacacaccaaaaaaacataaacaaaaaaaatttatattttccccagtttactatagtcttggttgcatagtaaatgaaatccaccactgaccatatttagtggtccaaattaaaaagggtgataaaaattgagttacagaaacgacgaagacgattcttcccatggcttcttcactggagaagcttatttcaagctttctacttgtcttgtactccaccaccatcattgttgcttcatcagaatctcgatgtaggcgttttaaatcgatcatcagctttggtgattccatcgccgacaccggaaattatctccatctctctgatgttaaccaccttcctcaatccgcctttcttccttacggcgaaagcttcttccatcctccctccggccgttactcggacggccgtctcgttatagatttcatcggtacctgatttttcttctctatttttagacaactcggtcactcctctgcttcaggtctctcttgcttgaaccacaagttatcaaccttactagcttctgtgtttttgtaatgttgtcttactatttgcacagccgaattcttgggactaccgtacgttccgccttacttcggatcccaaaacgtgagcttcaatcaagggataaattttgctgtgtatggagcaaccgccttggatcgtgcctttcttgtaaaacaaggaattaaatctgacttcaccaatattagtctaagtgttcagcttaacaccttcaagcagattttacctaacctttgtgcctcatctactcgtggttacaaacttagccttgttctcttccatatctacgatgcattgagctccttctaactttttttctttgggggttcagattgcagagagatgcttggagactcgctgatactcatgggagagattggtggaaacgactataattacccattttttgaaggaaaaagtatcaatgaaatcaaagagcttgttc

SEQ ID NO: 6956 - DNA, 1386 bp, Arabidopsis thaliana landsberg
ttcgtgtaaagatttgttaccacaattgcagaagaaatagctttgatgatcaaatcctgtagtttggtttcattgatacttttgccttcggaggataggtaaaaaaagtcgttacctccaatctctcccatgagtatcagcgagtctccaagcatctctctgcaatctaaacacaaaaataaagaaaccctgtaagaacaaggctaagtttctgtttatcaaaataaaaggctgagtttctaaccacgagaagatgaggcacaaaggttaggcaaaatctgcttgaagatgtcaagctgaacacctaaactaacgttggtgaaatcagattcaattccttttgccacaaaatacgctcggtccaatgcggttgctccatacaccgcgaaattgatcccttgttcaaagctaacgttttgggatccaaagtaaggtggaacatacggtagtcccaagaattcagctgttcaaatagtaagacaatattagaaaaactcaggtgaagtagggtttctatcttgctttccacgcaagatagacctaaagcagatagatgattacaagtggttttgcctaaacagaggaaatattaggtaccgatgaagtcgatgatgagacggccatcagaggcacgaccagagggaggatggaagaagctttcaccatcaggtctaaaggcggtttgaggaagatgattgacgtcggagagatggagaatatttccggtgtctgcgatggaatcaccaaagctgatgatagatgtaaagcgccgacatcgagattctgatgaagcaacaatgatggtggtagagtataagacaagtagaaagcttgagataagcttcttcagtgaagaagccatgggaagagctagtcgtggtcttcgttcgtctttgtcactcaatttttaaagtctttttggatcattgaataatgcaagagatgtggcaattattggatttcatttattatgccagtaagaaagagagaaatgagaaaaagaagttaacggcagaaacgtcagacaagttggaggctccatcacgaaattggattcttcgatgatagaattcgtgaaactagtaataacgaaatattccttcgttgctttttcttttttctatttggccttccttacttattataatcatataaatggattctttaactaatccattataaaatgagtgaaaaagaaagagaacaattatgaaacggttatggagatatgtgacgcacgcgatagtatgagggaagccataggagaattgtcgtctctatcactcaatttttagaatctttaactaatgcagagtttgaggcattagttattggattttatgtattatcccaacgcctattagtaaattgaggaaaatggtcagg

SEQ ID NO: 6957 - DNA, 750 bp, Arabidopsis thaliana landsberg
tgcattattcaaagatccaaaaagactataaaaaattgagtgacaaagacgaacgaagattctgcaaaaaaaaagaaaccaaaaaagacgaacgaagaccacgactcttcgtctcttgactctcttcccatggcttcttcactgaagaagcttatctcaagctttctacttgtcttatactccaccaccatcattgttgcttcattagaatctcgatgtcggcgttttaaatccatcatcagttttggtgattccattgccgacaccggaaattatctacatctctctgatgtcaatcatcttcctcaaaccgcctttcttccttatggcgaaagcttcttccatcctccctccggtcgtgcctctaatggccgtctcatgatcgacttcattggtagctatttttttcatctctataggcaaaaccacttgttctcatttgctctaagtctttcttacgtgaacagcaagttatacttcttcctgattttttttttatgttgtcttactatttgaacagccgaatttttgggactaccattcgtaccgccttactttggatcccaaaacgttagcttcgaacaagggatcaattttgcggtgtatggcgcaaccgcattggaccgagcgtttcttttgggaaaaggaattgaatctgatttcaccaatgttagtttaagtgttcagcttgacaccttcaagcagattttgcctaacttatgcgcctcgtctactcgtggttagaaactt

SEQ ID NO: 6958 - DNA, 951 bp, Arabidopsis thaliana landsberg
cagcaaatcccacttgggttttttttttcccacaaggagagaagcagaggggtcatctgcaaggcggaagctgcggcggccggaggcggaaatgtgttcgacgaaggagacacagcggcgatggcggtgtcgcctaagattttcggtgtggaggttacgactctgaagaagattgttcctttagggctaatgttcttttgcatccttttcaattacacaatccttagggacacgaaggatgttttggtggtgacggctaaaggaagttctgctgagattataccctttttgaagacatgggtgaatcttccgatggctattgggtttatgttgctatacaccaaactttccaatgttctctccaaaaaggctctcttttacactgttattgttcctttcattgtctactttggagcctttggtttcgtgatgtaccctctcagcaatttgattcatcctgaagctcttgctgataagcttcttgcaacactcggccccagattcatgggtcctctcgcaatcatgaggatttggagtttctgtttgttctatgtcatggctgagctttggggtagtgttgtcgtttcagttctcttctggggatttgccaaccaggtaattgtgattacactcttcgttttctgctactgctagtcatagactcatgttaagtttgatagccttgaagatttggaacccttttgagtcagtatctttgctatttgtgaattaaacttgcatgcaatcttttggtggcagattacaactgttgacgaagccaaaaagttctatcctctgtttggacttggggccaatgttgcacttatcttctcaggaagaactgtgaaatatttctctaatatgagaaagaatcttggtcctggagttgatggctgggctgtttcattaaaagctatgatgagtattgtcggcggatgggtctcgccatct

SEQ ID NO: 6959 - DNA, 1252 bp, Arabidopsis thaliana landsberg
gattgcaaagagaaagagcaagcttttaaacacacacatcaccgcttgtaatcatattcagggcatctttacacatcaaagtcggtagcaatcaaagactattatcttcaaatcataaacacaccaatctgtcaaacaacaaatgaagatacacaaaaatccatagaccagcacaagttcaaatgatagaccagtttagtcacctgattagcaaagccccagaagagaactgagaccaccacactaccccaaagctcagccataacataaaacaaacagaaactccaaatccgcaatattgcaataggacccatgaatcttgggccgagggttgtaaggagcttatctgcgagagcttccgggtgaatatagttgctgagagggtacatgacgaaaccaaaggccccaaagtagatgatgaaagggacaataacagtgtaaaacagagtcttcttggagagaacattggagagtttagtgtagaggagcataaacccaatggccataggaagattcacccaagtcttcaagaaaggtataatctcagcagaacttcctttcgccgtcaccaccaagacatcctttgtatccctcagaattgtgtaattgaaaagaatacaaaagaacatcaatcctaaagggataatctttttcaaggttgcaacctccacaccgaaaatcttcggcgaggctacaacagctgcggaatcgccttcgccgaagacagctccgtcgccagcagccgcggcctccgccttgcatatgaactcggtgcttctctctttgtgggaaatcgaaatcccatgcagggttggctcaaaggtttgaaatttcttgtgcccgttaaaggatagagacaacccatgtagatttcttggcttcgcggcgaaaagtctctgctttaagccatgggaaggctgaagttggcttctcactccgatgggtttggtgggtaaagagagaagccctctggtttgaatcacagcttccatctctctatttcactctctcccgcagatacacagaagaaaaaatgggagagaaatggaggaggatgatgagatggagagatgataaaggagactggttggttagtgcaatgaaagaatatagtatcggcaattgaatattaacaaatgtggtgatgtgtatatatcccgtaaaagggaaggatttttttgaaattttcttttgcacttgtaaatgaaatgtggtaacgcttactgttttaacttgtgcttaatgcaaggaa

SEQ ID NO: 6960 - DNA, 2055 bp, Arabidopsis thaliana landsberg
aataaataaattacgtgtcgtgagttatagtatatcaatagtttcaataaatgcttgttactcatagcttagctacagagcaatatttattgtgattgaaatttcatttataggacacagtacattttctgtttatagaacttgaaatttggaccgacctttatttttcttagaggaatattgcatgttgagtggttagagactagagtagagagactgcaaagtttgaacctccaaagatttgagtcaaactgttgatgtaagcgagattaccacaggatcttcatgacatcaaataatttccttaagagtacacaattatttgtttcaccacacacgcaaaatttcgaactatttcaagacatactttaatatgaatcagtccagacaaataaatgaatcaagataattgatatatatgtaaacgtaagaaaattggattataaatcgttttaactttatttttgtgatatccatagtaagattggatatatcttgaaagtgtgaatgagtctacatgcttagctatcacctttaaatatttgtattatgcatttaactgaaaaatcaacggagtacacaagatgacgtattgagagtatatcagctcgtatgctcaagaatgtccattttctttctttcaaaactacttgttgcttttttcaatcataatccaactccattttatattttgtttatgttttcaaagtagatcttagttatacctctggatattcttacaatttaaactgtttacaatggtgaaaagccaacaacggaaattagtaattggtaggattcaaacctagacccacaatagaattattttgtgagaccaacatcagacaaactgctctagtctaaacctttagtttaagcaatgataagatacggtttctacatgcttgtttttattaaaactagtgattcttatagttccaaacaaattagagatggtagaaatatttaatgcgttcacctaataggctaatacatgcataaacgaaatatgagtttcgtgtggattttttggcaactaatttggttagactacttacagagttacagtttcaggccaaataacccatatcgatccattgatttttttagtttttacttgatatggctactatagcctgcgttgacaagtctgagtacgaagaatcttcttcattgattcgtcttctctcttttccttgacagaaataatataataatactactctaatcgtttttttttttctttttaaaaagagatcaaatcaagtacaaaacgaatcacatattccgatttaaggataatgtatcaaactaaaccaaaaaaaaatccatctacctgtcagtgattgagatcaatatcaaaacatcaatccaatcatccacttttttttttcttttacaaaattgaaaagacaaacattacttcttctatgcacatttacattagttagataatgtaaaaaaagaaaagaaaaaaactccatagtaaagcttctcataatttaagctcactatgaatacataaaaaaaaaaacaagatataaacatttctctatgtcatctttaattgtcacaaattttaccatccatttgattttgaactgctttcacagctgcaactctagcagccgtcgcagctttattagctgcagccacagctcgtatcacctgctcatcgatccgtctctgattcactccattctttgctctttctcgtgcactctgcaagtaattaaaccattaagtaatcataaatccaaacaatgtttaatttctctaattgaaagtttcattatgtatgtaaaatacctgaaccgccctacgaaccgggtcagagtctaaaggaagatggttaacgagattaccatcatcccattcaccggatttgatatcaccggttctaaatctatacgtgccatagccttgtttacgaccttcatgccagctccttcgtaatagtgaccatcaccgacatggtaaacaccaaatccatgaatcaagtctccaaaatactctcctgcatacttatctccattcctacaacggcaataattt

SEQ ID NO: 6961 - DNA, 1003 bp, Arabidopsis thaliana landsberg
tgccattttattgtttaataactaaagggaatcgatattgtcagtgatccagatcaagaatcataatatcaatcaaaatcacttgttcccaaagattcgatcaaaaccaaaataagctccatttcaagccgttgattctacaacaaaaacaaagcttcttcttcaactatttacagttttgttacattagtaaaaagatcgaaaattaactctctgttacaaacctctgaaacaaactttcgattcagggttacagagaaaccggtaaaaaaaaagattttttacattttccttttttcaactttgacaaaatttaccatccatttgattctgaacggctctcacagcagccactcttgcagccgtagcagccttattagctgcagccacagctcggctcacctgctcatctactcgtctccgattcactgccttattcgctgtttctcgagccgcctgcaatattttcaagttaaagttttccactttttggcaattccaattccaacaactcgagtttaaacaaatattacctgaacagctcttgaaactggctcactcgtaagaggaagtgaagtcacaagaacccctgaatcccattcaccagatttagcatcaccatttctaaacgagtaagcaccaaacccttgcttacgaccttcatgccatgctccttcataacagtgtccattagcaaatcgatacacaccaaacccatgaatcttgtctccaaagtactctcctgcatacttatctccatttctgacacaaacacaacacacgcaaaatcagactatataatagaaaacaacttttaaaatcatgattcaagacagatacatacctgaaatggtaagaaccaagaccatgcttaacaccaaatctagactcaccaaggtaagagctaccatcagaacaagattgaacaccaaaaccatggctttgaccattaaaccactcaccagcataacaatcaccagtgtagaatctataaacaccaaaa

SEQ ID NO: 6962 - DNA, 2737 bp, Arabidopsis thaliana landsberg
taattatgtcattatgtatgagttttttggttaattttaaggttttttatataataaatttttgatgttgtaatgacatctcagaagcaagaaagagatcatggccacaaatttaatcatgactttgagaacttcaaaacttgttagagaaaaactgttctgtctctaaaaactatggtattagttgtaacagtttgtcaaagcatatatataaaagaaagatcatcagggtttggattctgttttagagtatgattagcaccaaacatcatgtcgcttttttgcattccctttgtacacatcatgccgtttagtatttaccgttaagaagcgcctaaagcaagttccatgaacatacaaagatacaagcaaacactaaacttgagataaacacaatggaacaggagatgatagtgagcatggcagttgcaggagccatcgttggagccgccataggaggttgggcgaacgacaaattcgggaggagaagcgcgattctcatggcggatttcctctttttattaggagctatcattatggcggctgctcctaacccgtccctccttgtcgttggccgtgtttttgtgggcctcggggtcgggatggcctcgatgaccgctcctctatacatctcagaagcttctcctgctaagatcagaggagctttggtcagtactaatgggtttctcattaccggaggacagttcttgtcttacctcataaacttagcctttactgatgtaagtgatactagcctaaagacagtgaaagatcaaactttggctagttttgaagtttttaatgttctgttttctctgttttttaggtgaccggaacgtggagatggatgctcggaatcgccggaattccagctcttttacagtttgtcttaatgtttacactcccggagtcacctcgatggttataccgcaaggtacattttgatatttttctcttctccaagattttgtcacagactatgatgaactaaaacgtgtgtaaacagggaagagaagaagaggctaaagcgattctaagaagaatatactcagcagaagatgtagaacaagagatacgtgcacttaaagactcagttgaaacagagatacttgaagaagggtcttccgagaaaatcaacatgatcaaactatgcaaagctaaaaccgttagacgaggactaatagctggtgttggtctccaagtgtttcaacagttcgttgggatcaacacagttatgtattacagtccaaccattgttcagcttgccggtttcgcttcaaacagaacagctcttctcttgtctctagttaccgcaggacttaatgcatttggttctataattagcatttacttcattgatagaatcggaaggaaaaagcttttgatcattagccttttcggagtcattatctcgctaggaatactaaccggtgttttctatgaagcggctactcacgctcctgcgattagctcactcgagacacaaaggttcaataatattagttgtccggattataagtcagctatgaataccaatgcttgggattgtatgacttgtttgaaagcttcttctccatcttgtggctattgttcctctcccattggaaaggtaaaatacttttcgaaaagaccaaaaatatattttgaattcaagatccttacttatatgatgatggcaggaacatcccggggcatgttggatctctgatgattcggttaaggacttatgtcataacgaaaaccggctttggtacacgagaggatgtcctagcaattttggttggtttgctcttcttggattgggactttatatcatcttcttctctcctggaatggggactgttccatggatagttaactcagagatttatccattgagattcagaggaatatgtggaggaatagctgcaactgcaaattggatatcaaatttgattgtggctcaatcttttttgtcattgaccgaagctattgggacttcttggacttttctcatctttggagtgatctcagtcattgctcttctctttgatatggtttgtgttccggagacaaaaggaatgccaatggaggagattgagaagatgcttgaacgaagatcgatggagtttaagttttggaagaaaaaatcaaaacttgttgagaaacaaaaccagagtgcatgagagaaactcttaaaggaagcataatcaatgagaaagcacatgagacttgtaacttggtattgaaacttaatagtgacaaagtgatctattttaagaaccagtaaaaaagtgttgttatgaatctacttattggagcaagatcctaggaactagatcttaccatatacaattgaaatttcaccaaaatcattttgataagaccatttacttatgaataatatgaacacagaaaaacacttttataagaaacacataatctggtctaattattgtcaatggttaaggacccttcgtttcgtagtacttgactctttagctgttgagcatgaaactgacaagtacaagtgtaagtgcatataacaagtattgttcttgaaaacttgagtgattccaattggttttttcctattttttgcattagaaattatctaataataaaaccatataaaataccatttggggtatattcttagttcggaacaacacagcaattatgtttaatatattatacattcgaaccacataagagaattagagatacattggacactggagtaaaatatatatttttg

SEQ ID NO: 6963 - DNA, 862 bp, Arabidopsis thaliana landsberg
aaagtataaatgaaaagccagaaacttattacatcttatataagggaaacacactacattacattattgataacaattttaagctgttgattcgaggaaagggtaatcggtgtaaccgacgactggatcagaagtgtaaaacgttggtctatcgtacttattcagcggtgcatccacttggaacctctttggcaggtccgggttggctagaaaccatcgaccataagccaccaaatcagttcttccctttgacacagcctcattcccatcttccctcgtgaaacctcctgcggagataaaagtccccttaaacgctttcctcatcggcattagtgtgtgaggacaagcatgtacttctcccattgttttcattctcgcttcaatcacatgacagtagaggattccgtatttgttcaaagattccgccatataaagccctaatgctcctggattagtgtctccagattccatgtagtcagcaaatggagagagcctgattccaacacggtctggtccgatctccttagcaactgcatcgactatttctagaggaaatttgcaacggttttgcaatgatccaccgtattcatcagttctatcattcaccgtatccttcatgaactggtcaatcagatagccattagctccatgaatctcaactccatcaaaacctgcaacaacaaggacacatataagaatcttgaatggtttcagcttcttgaattccaaatccaaaatgtgcttaccagcttccatagcatttcttgcagcacgcctaaaatcattgacaatgccgggagatttcttagataccaagccgtcttggaggggtaaagagagcttcatcgatgccattagagcg

SEQ ID NO: 6964 - DNA, 627 bp, Arabidopsis thaliana landsberg
aattttttgattaacatagaaaatttccactctctcccttccctctcattctctttaagtgtgaagtaacttatgtttgaaccattcagagcctttagactcttttacgcaattcatcaaaaccaacccgagttcactagaccattagacatcacaaaagagaaagaaaaagtcttttgtgaaaagtcatcgaggaaaggaaggcgaactttctccgtcattgtgttgtattattgatttacctaaaagaaaggacggggaagtttctgtatcattatgtgttaccttgctaggggatttgattttaaccactaaaagaatatcttgaacaagtcttctatgctagtcttcaagtaaaggaagaccaagtttctgtatcattatgtgttatcttgctaggggatttgattttaaccactcaaagaatatcttgtacaagtcttctatgctagtcttcgagtaaaggaagaccacgtttctcctctttgtcattgtgttgaattattgatatacctcacagtgctttcacatgagaattttcggctcttctctctcatcctcttccatggcgtcgtcctccttcagatggatatacaatgtattcagatgggtggacaacattttctg

SEQ ID NO: 6965 - DNA, 586 bp, Arabidopsis thaliana landsberg
gcacaagaaaccctatgcacgaggatcacaaagtaagattcctaaccttaaggtctctatgataaactcctctgctatgacaataatcaaccgcattaatcagctgctggaaatacttgctcgcctcatcttccttcaatctcccattggttgactaatacatgacaattctaaagaattaagatctcatttccacatagtattaagaaaaaaaaaacacatctttcaatgaaatcttacaattttatcgaaaagctccccaccagtgacgaattccaaaacgaagtagatcttagttttgctagccatcacctgaagaagaagaagaagaagaagaagaagaagaagaagaagaagaagagaatctgtaactacaaagataccaaaaaaatacatagaataatcaaatcccttatattacatacatatgagtagccagggaccacaaatatgttccataacttcaaacgaatctcagcttatagcacatatctatagaacaacaacaacaaccaaaacgtgcaacacaactatgaattcagctttatagtatcagaatcaaacctcaaacatacgaatgacattc

SEQ ID NO: 6966 - DNA, 1571 bp, Arabidopsis thaliana landsberg
  unsure (1)..(1571): unsure at all n locations
aagactccaagattaggagtagagggaccagtgtatcaagttgatgaggagagaggacacactcaggtttcaaacagaaccaacaccatctcaggaaatttacagcgcttgctaccaccatcgtgctcagtctccgatcaggtggctaatgtgaaacagggcattgtagatagtctgaacactgtgagacaatgtcggactgagcttgagacaagtgaacaaaatctgcaagcctctttgctagcaattgacgccttaggtttgttctagaatcaagatgtagttgttttttcttgataaccgatatttttgaacttgggtttctaatgttgtgatgatgaaacaggggagaggatatggggaatcagcanaatcctcagcagtaatctggtttgaagtgagactgaagatggggaaagaacanagagtgattntcactaaactaggtttattctgtatttgagacttgcaagttntagagactgtacttaaaagtttgtagtttggaagggccttcttcagttgtatcagcaatttggactacttcactatatcgctgagaaactagtaatattgtaatgcattgtgagtttcaacttttgttgtattagtgatattgtaatgttatttggttttgacatattttattcttgaggattagaaaatcaactgtcataagacttgatgagataatgctatacaaaaggagttctctatggtcaactaactccttcactccattgttgaacatgtgggaaaagaaacagactttcatcaattagagggattatgagatcaatctcattctcaggaaagttctaaagtctagaatgagctaacgtcgagatacaaacaaagtttgcaaaagagtccatgctccatttcctgatcttcagtcacttttaaacttgatgtttacttgaggattttgttgatttccgacactttctcccctgttttttccaacacaaagaacctaattagtaaagaaaataaacaagtgttcatcggttattcagatcatacctaaagcatcaatttccagtatcgaagcttctaacttttgtccctttctttctagctctgaccgaatccgttttatcccggttaaagtgtcaacaataatctgtttcaccttttgcacttgatcagagattgagcaatgtggttgcccaggctgcaagttttgtggatcagcattgggtttatttgatgcctgattgcggcgagaagatcctctttctgcagaaactcgagctctctttttgaccctagtctctgtttcttcttgagtctcccctccttcatcaaatggtacttgttctatctgaaatacaattcattaaaaaaatattcaatacagctcattttaacacaaaagttgacttgatacgcaagttgatttttcaccttgtccttggacttggagcagaactttagcattggagttgtgccttctcctcgaacaaactccaacgtgaaggtctctcccgtctttaacctattggctgcacaaaaacttctccaaccttttgccaaataatactttcctccttgaccatcgccagaag

SEQ ID NO: 6967 - DNA, 916 bp, Arabidopsis thaliana landsberg
gtggttgctctatctgaatacaattcattttaacagtctaaatatagttcattataacaaaaaaggtgacttgaatcacaaggtgtttattcaccttgaccttggcctcggagcagaacttgagcataggagttgtgccttctcctcgaacaaactccaacgtgaaggtctctcccgtctttaacttattggcttcacaaaacctaatccaaccatgtgccatgtaaaactctcttcgttgtttggaagaagatacataggatggccactctactccatttttgtccactagaattatctcttcagcctccttgatcccgttctccctcacaaatgatctccggagacgctgcataagcattcgtgaagtattacaagaaaatgcataatcaaattaaccctaaacctaagacgttgaaaacttacaagttgccctgactggatcatgtaatgcttcaaggttactgtcagaaacttgttctgcttcgttgaagcactcccatcttccctgctatacttttcagaaacattagcttttccatttgctttggaattggaacagtttccttgtggaataactttaaaacacaattgtagcaaaggccttgtcccattccggacaagcttaaaccggtagaacgatccgggtttcagctcatttgcatggcagaaacttctccagcgtccacggataaaagcctgaccagttcttttgttgtgtcgcagacccagagtccatggttccccacttagattcattagatcaatcatacaaccatctttcgtcaaaccatttgctctcgaaaaatgttttgtaaaactctgccaaaaaaggacaaaacacaatttcaatgttcacatatatataaataactcattaacaagaaccctaaagaatttgaatgcccatgtgtac

SEQ ID NO: 6968 - DNA, 1803 bp, Arabidopsis thaliana landsberg
  unsure (1)..(1803): unsure at all n locations
atcctccactgaaggcaacgatcaaatcgcccaactcatctctcttctacaggctcaacgccctaacacttccttttaacgcttgtcgggtaaaacttgtcttactaatattgtgattgatacaagcgcttcacatcatatgacaggagattgttcaattttggttaatgtctttgatattgttccgtctcccgttacaaaacccgatggcaaagcatcacgtgctacaaaatgtggcaccctcccactaagttcctcttatcaacttcatgacgtgttatacgttccagatttcgattgcactctcatctctgtttccaaactacttaaacagacaagttcaatcgcgatctttactgatactttgtgttttttacgggaccgtttttcgaggactttgattggagcgggggaagaacgtgagggagtgtattactttaccggtgtcgtgtctcctcgagttaacaaagcttctttggatcttgctatctctggagatttgcttcatcgtcgactaggacatccttctgctagtgttttactttctttaccagaatgtcatcgttcttcgcaaggttttgaaaagattgatagttgtgatacttgttttcgttcaaaacaaacgcgagcagtttttcctattagcaataataaaacaatagaatatttttctttaattcatggcgacgtatggggactgtataaaacaccatcaacaaccggtgctgtttattttctcaccttagttgatgactactctcgctcggtttggacatatctcatgtcttccaaaactgaagtttcacaacttattcacaacatttgtgccacgtcttaacgtcaattcggtaaacaagtcaaagcattccgcagcgacaatggaactgaattcatgtgtctcacctcctattttccgacacacggcattctccatcaaacttcgtgtgttgacactccgcaacagaatggtcgtgttgaaagaaaacatcgtcatatattaaatgttgctcgcgcttgtctctttcagggtaatctgccggtcaagttctggggtgaaagtattttaacagctacacatcttatcaaccgaacaccatctactgtgttaaatggtaaaactccatatgaagtcttgtttggaaaacgtccctcatatgacatgcttcgtacgtttggttgtctctgttatgcgcatatccgcccccgcaacaaagataagtttacttctcggagtcgtaaatgtgtgtttctcggctatccatacgtcaagaaagcttggcgtgtttacgatctcgaaactggaaaaatctttgcaagtagagatgttcgttttcatgaagatgtgttcccatacgctactattgaccaacctattactcctgtccctactcctgcgatggaaaatgacgactggtttctccctataccgtctagtatctgtccgttgtctcctccacaatccagatcaatcgatcccaacactggatcgatcgatccgactattaccaccccnnnnnnnnnnnnnnnnnnnnnnnnnnnnttgatcgatccacccaccggatcgaccgatcccaagtctctgccagctactccccgatcgattgattcggaccccactccgatcgatccggccaatactattgttgttccgcttgattcttcatctgcttccttttcttctcctggtctttttgagctattggggaaaggctgtagggagaagaggccatcaattctactaaaggactttgtcacaaaatcctaaaagctagacgacctttgcattacacaatatacactctc

SEQ ID NO: 6969 - DNA, 945 bp, Arabidopsis thaliana landsberg
tcgaacagcggaaggcttacaaccaagtagtcccacctcattaataatatccaatgcattgcgttgagagagtcaaaatccatctggaccacgagaaacttccaaaccgaggaagtacttcaacttcccgagatctttcatgtgaaaacattggtgaagttgtctcttgaatcaattgatagcattgagatcattgcctgcgactataaaatcatcaacgtaaataagaatatgaatgattgtatcatcggtcttgagagagagcaaagagtagtcttcgtagctttgtgtgaaacccatgttacggagagttgtagatagtttggagaaccaacagcgaggtgcttgtttgagacctttttggggtctgaacatttaaaacctggtggtagtttcatgtagacttcttcctcaagatcaccatggagaaaagcattgtgaacgtccatttgatggacttcccaatcttttgcggctgcgactgctaaaagagttcgaactgttgtcattgtggcaaccggagcaaacgtctccttgaaatcaataccttctttttggtgattacccataacaactagacgcgccttatgtcgctcgagtgttccatcagagttaaatttcaacttataaagccatttactacttatggctttcttcccatgtggtagatccgtaatatcccatgtatgattagcttcgagtgcatcaatctcttttgacatggcttcgcaccactctttaataagaatagcatctttaaaatgttgaggctctttactatcaaaaatggcagcaataaaagcaatatgatttgcagagaaaccagagttagtcaaataatccgagagaggataaagaactttaccagaaaccgagtccaaggatgttgaagtggggagaccagaggagagaacatgtgagggagagtgtatattgtgtaatgcg

SEQ ID NO: 6970 - DNA, 1651 bp, Arabidopsis thaliana landsberg
tggctctcagtcttctatggtcctgcttctttgctttctttagatcacttccttttgcttcttcgccttcactcgtttcatccaaagtctctagctttctctttttctcaggatgcgattctccattcgcaacacctgaggaggcaggtaaatctactttcttctgttctgaatcaacattagacgcattttcacttccatccttgttatccaaagtcgtggattgttcttgttgttgcctagcatggaaggctttagcttttcctcggtgcttcttcccatccgcatgggcaagcaaagtctgctggctagtagcctttgtgttacataaactgcaaccaaatagacaaaatactcaaaaccatgtccacaaaaatctcgtcacaagacaaacacacaaaacaacaatacattctaaaacaaaagtctacattagcgttataaatccacacaaaaacttattctcctaacaacctcaatacattatgcattcgtatctaaagcggaaaacggaaggaaagtttgaaagatgtaaatacctgcaaaaccatggatatcggtttgataagccgacattaatatcaaagtcaggctcttgcttagagatgtcctttggctttgcaggtgttccattagctgactttgactgcccttttggaccatacttctcctaaaaacattcaatacacaacaattcctcaatctcttaagtccaagacatagccaaaaatctagaacttaacccaatttgttcaatacaatgcataaaccatttacttacagcttcagtaatgcattggttatgtccttgcacagtatctctcccaaacatttctccacaatcgatgcacgataactattgatacaatacaacacacgaaagagagacttaacacaacaatcatcataaagtttcgatttttaccatagagaaaatttgaaagtgagaccttgttggctctgcacatcttgaagtgagacgggacctttggcttcttcagactctctccacagtcttcgcattgaaaccaaaccatctttttcgttttccgattatcgaaattgagatctcggggaaaacaatttcaagcagaaatcaaaatcggagaggggtttaagattggtaccagctagggttttaaaagccttccagaagaactaattcaatgtagagtttgtttattcaagtatcagacaacgcgctgttttggaacgctaaaaacgacaaggtttcttagtttttagaaatgagacggcatgatgtttgtagagctggtattgcaattagcaatgcatccaggggaattcaaggcatttaattttggtataaaccgaaccaaatcgagtaaaccagaattcaaacagaaaactatagaattcaaaacgaatcaaaccccaaaaagctggtttagtttggtatatattcacacaactcgaaaacccaaaaaagctggtttagtttggtacatagatgccaggtataatataggttgaagataccagattagtaattagcctaaccgaaaattggaagcctgattaatatatcagagataacaaagccttaccaaatgatctcagctatctctgatgccaagcctgttccccatcacacaaaatattgccctgccatgcctaaatgattcggtgg

SEQ ID NO: 6971 - DNA, 1111 bp, Arabidopsis thaliana landsberg
tgttggtggtgcatcttctcgagtacatgtccgcgacccagctcgatcccgggcaagactgcttcactttgattagccatcttggttagatcaatattcactggttcagccatatcctgctcctttccagccttgcccggcttctctgatgctagattacataccacgatgcggttgtacatcctcttctccggacttttcaatgcctctctcgctcccttccgtgtcttgaacatcacaaacccgtaacctttacctcttcccgtgtccttgtccatgactaccgagcactcctctatctccccataagactcaaaagccgtcttgaggttctcttgcgttgtgtcccatccaaagccacgcacaaatatattgcgctgagcgatgtcacggtcagccgactcaaggatggcagagatcaatcgagaacccttctcggcagtcttgtatatgaggttaacaagctcttccttcgagtaagctaccaacagctgcttgatatcttccttgtcatgctcgaaatcagagtctgacttagtctgcttcttgtccttctttctcttcttctctttgtcttgctttttggctttctttgattcactcttttgctcaccccctccttttgcttcttcggcctgaactacctcccttttccatgtttcatcgcaggtctctagctttctctttttgtgagcctgtgaatatccatttgcaacacctgaggagacaagcaaatctactttcttttgttcggaattaccatccgaagcattgaccgttgtatcctttttatccactgtagttttttctaattgttgttgttgtgtagcatcaaacaattcgacattttctcggtgttttctgccattggcatgggatagcaaattctgctggcatgtagccttcacgttacacaagctggaaccaaatagatatattcaaagcattaactcttgaaatctcacccaaagggaaatgttaagaacaaacacagaaatcttctttatttattacagtacagaatcaaagagaaatccatgaacccataccaatggtgcaaaaccaaccatatacacgactttactcaataatagctgatgcatatcctact

SEQ ID NO: 6972 - DNA, 575 bp, Arabidopsis thaliana landsberg
  unsure (1)..(575): unsure at all n locations
attgttggtttgatagatctttcttagagatcatctaaaagtgcaagctctagattttgatattgcataagaatcatcaaacttgcgatccaagaaatccaaaattnnnnnnnnnnnnnnnnnnnnnnnnnnnnnnnnnnnnnnnnnnnnnnnnnnnnnnnnnnnnnnnnnnnnnnnnnnnnnnnnnnnnnnnnnnnnnnnnnnnnnnnnnnnnnnnnnnnnnnnnnnnnaaacaactcgctcctcatcgtctccaagaaatccgccgtttcttcgaagactgtaagatccttatctcttgtcaaatcaaataactaaggaccaaaactaaagaagcttataaatcgcgtttggtttcagataagaagaacgagaacaagaaagtggctgtcaacgatttcttgccatcagagagtgcacatgaagctattcagtactccatgtaagatttaacaaaccctaaaatcgcaaactttgtttgtcaacaaaacattgagtaacgaatctgcattggttgtgaaaatttacagggatctatacgctgagtatattctccacacngttgggagatgaac

SEQ ID NO: 6973 - DNA, 1332 bp, Arabidopsis thaliana landsberg
aatgcgcggatctagatcatgtcacttctatatcactggtactatatttatcttttatggattttctatcgataacctatcggtagtggatttgtgtatgtcacttatatatattagttaggtccattttcctttagatatagttttcatgaaaaaatataacaaatggaaatcaatactagataaaggtacgagctagggttggttatatcttacctttgatccccaattggtgttaagctcgtagatacatcctgctacacggtgagccaatgctaaaacatcttgagcattgataggcttatctacaatacgattgggcttaagttcatctatctcaggcaaaattaaattagatggagctccataaaaaactcgtcgattgaagaaacaaccagttcccacatgattcgggcccattaaaccatcaaacccaatcatattgatctcaaagagacgcttatacgcgcatgcatatatatcgttcttgcttattccttgaaatgtttgaggaaactgcacaaaccctaaaccagttttgattttagggtctgttaaatagcacagggcacgaactggtgttgctggatcgttggaatacatatcacagtctagtgttagaatgatcggtgaattcgtcatcactccagacactcgtagctataataaaaagaaaatacggaattaactaaaattaaacgaaaccaaaaactaattatagataggttttttagttgataccaaggtattaagagcaccggctttgaaatgatgtgatgaaactttactcttctctcttgaaacgtagattaggtttggcattatatattttttggtatcgtccatatcattctcactattttgtagcacctgtccttaaataaatgttagttgagattttgtcaagacaaaagaattaacatatggcaaggtataattgtctagtaaatatattcaaaatgcaattttcttatgatatatagtagtgagaaaacaatatttgaactttttttttctttaaattacctgaataattgtgggatggtcatgacgagtgaatttgtcggtccacaaatcgaataccccacgaaattgatcgcatgtgataaatgcagtctcaacttttccactctccaccacatgttctactctactcttcatgtcttcgtacatcatctgttacacggtgaaacaattatacaccacacaatttatttatttttctcttgtatagttttttttttttttgacagctctcttgtatagtttattacgatttatttataacactggttgaaaatatcttactacttgtgacaactttgtttacta

SEQ ID NO: 6974 - DNA, 1351 bp, Arabidopsis thaliana landsberg
aaaaaatgattttatgtatgaagtatgtactttttcgcattgtcgaaaagcttcaacggcttctgcatgagcgttgaggaggttgtgactgactagataagcctcataacctgatcgtccgcctagacaatctcccttgacagtttcgtccttggcgtaaggagaacaacgtccaggtgctttcttaccaacgtcataaccggcatgcgcgaaaacccatggctcgttaaaagtgatccaatgtttcacttttccaccatattctttgaaaacaaactcagcatactcccgaaaatctttcctgttttggcaaaaggatattgcattaatttaaatcacgttgtgtgactgtgaattaaatttcatgtgcttccaagtcaaaataaattgaccaaaaatggatttatccatctcacttatatatatacaagtgttcaaacttccgatatgggatcccaacatgttgctataaacgaaacattatggaaacttacacaatgtgtgcgcttaagaagcccccatattcattctctagagtttgtggcgtgtcccaatgaaaaacagtcacgaacggaattatacctaaataaagtattatacaaaatgatttttttagagaatatacataaaggtaatatgtatatgtttttctttcattaatttttattatttatatgatttatattaccgtttcttttgagctcgtcaatgaggtcatggtagaattgaacaccagatttactcactccattctcttctctcccgtctgataagccattatatattgtttcattaatatttcaaatgattataaaatagatttaaatataccaaaccttattcacactaaatcaatctggaagcacatttactcacgaggaaaaattcttgtccatgagatagataatctgaaggaatctgtgtttagattcttcattaattgaatatcttcctacaaatatattacagaaaagaaaaaaatgcaacatcatgtgttagtagactcattaatgggatatagttttaaatttagaagatatacgtgatgaatattgtcatgttttctaatggaaaatcttgtaatatgttatgaaaaacatgtcatgtttcaagaagatgatgagaatcaacataatttagacatgtaaacaactcttctattattgtttgtcacgtaaaatgtaagggattttctttatataccttgtaacgatagaagaaatcaacagcttgagtaccattatcgccattgcattcttctgtaatttataatgcctttagacactcatgttgataaaaaaattcaacatgaacatccattatttaagagaaaatataaaataacttgaaa

SEQ ID NO: 6975 - DNA, 867 bp, Arabidopsis thaliana landsberg
ttacttaacaccaatttaacattatcgtgtagaaaaatttagcctataattctaaaccatttccctaaacacgtaagctattttgctatggcattaggtcgaaggtgcgattaatgaaacttgtcgtggaccagccttatgggacatctactgtagaagatatccaggtgagtgtttctacattatcttttacatactgtatatagttagaatgttttggttcacctaatcttatattttttcttaattttatatttcagagaggtgcaataacgataacggcgatgtggccgttgatttcttccatcgttataaggtatatattaataaagattgaagaaattatcatattatatgcatatcttaatagtttattgattattcatttagactagatgttgataaaaaaaattctcatctgaaaaatgtttgcaggaagatattcaactaatgaagaatctaaacacagacgcctttagaatgtctatcgcatggccaagaatatttcctcgtgagtaaatatatataaggattgatcgatatacaaataaatctagttatttattaatcactacttagtgtcaatcgaatttggtgtatttacgatgattgctatattaatgaaacaaaacaataattttatcagatgggagaaagtagaaaggagtgagtcaaattggtgtgcaattctaccccgacctcatcggcaagcctcataaaaaatggcaccatatcttaatcacttattaatagaccaaaaccccatttagtatgtacatacgtattaaacgtctaaaaaatttttatttttttctgtaattaggtatcactccattcgttactgtttttcgctggcacactccgcaa

SEQ ID NO: 6976 - DNA, 1122 bp, Arabidopsis thaliana landsberg
gaaaagaattttgagaaaattaactcagaggatgcttacaaagctttgaaatggttagacccgaggagccacactgtatatataatatattgatataaagttgaggtatatattaatataaatttaaggtatatattaatataattttaagacaaatataacttatattctatagatttaatttgctgatattatacgagatattattgaaaatttgtctcgtcttaaaaatgtttgtaggaagatattcaactaatgaagaatctaaacacagacgcattcagactctcaatcgcatggtcaagaatatttcctcgtgagtatatgtctgcagatctctagtttgatttagtaatcgaatttggtgaattgatatataaatcaataactaatgaatttacatttattgactaatcaaacaaactaacgggtttttagatgggagaaaggagaagggagtgagtcaagctggtgtgaaattctaccacgacctgatcgatgagctccttaaaaatggttatatacatataaactaattaattaacaaaagacaagaaatatagtatcattatttaacatttctatatatttttacattgtaactaggtataattccgtttgtgactgtttttcattgggacactccacaagatttagaagacgaatatggcggtttcttaagcgagaacattgtgtatgtttttgtaaattgaaacaaaatacatctaattaaattttatatggaaattattagtttaatatcattttttgcaaaaatacaggaaagatttccgagaatatgcagattatgttttcactgaatacggtggaaaagtgaaaaactggatcactttcaacgagccatgggtcttcgctcatgcaggttacgacgtaggcaagaaggcgccaggacgttgttctcgctaccttaaaggttgtgaagaccgagatggacgatcaggttatgaggcttatctagttagtcacaacctcctcaacgctcatgcagaagctgttgaagttttccgccaaaagggtatttacattagatatatatatatcaaaattaattatcaggttttggatatgaatagaatttgttctgggttgcgtttatggaca

SEQ ID NO: 6977 - DNA, 564 bp, Arabidopsis thaliana landsberg
  unsure (1)..(564): unsure at all n locations
tcaacggccacatcggcgttgtggccactacatctttctgttttttaaaaataaaaagtgaatgaattgagatgtctaaagatattgtatagaaaatctagattatacactcacctggatttctcttacagaagatatcccatagagcaggtccacgacaagtttcattaattgcaccttcaacctaatgacataacgaaaatagctgatgagttgaggtaataacatatgtttgaattcagcatttggacttaggcttgaattttgatggagacacaatactaatacatatttttgaactatagtgtagtaaataattcattttgatgtctcacagtttacctgaaacgcagcagtagctgtgccaaacacaaacccattagggaaacttgctcggcttagtttggacgtcngtgggcacacaggatcatcgacggctattgtcgaagagacgacaatggttatgagaaaaagaagccccaggagagggaacttttgcaatgccatggtttctaatttttggtcttttggaagaaacaagtttgtgatgatttgttacatcta

SEQ ID NO: 6978 - DNA, 2652 bp, Arabidopsis thaliana landsberg
agcggagattgttaattgtatataatgcatccagaacatcaagggtatgtatatatacatatacttttcctttctgcacagctttgttttaacatgaatctaagtgatctcgtgggtgttataggtgattggaagctgcaattagaaccagtactcgagtgctgtaacgagacatacccgaggggtaaccttcaagattctcttgacaagtcagcatgccaaagcaacaagaggctgaagctcagtgaaactcttccttctactaaaagtctgtgtcaggttagtttatggttactttaatcatttcttgttcaaagaattaagattcattgcccctatttattgcagagactcgatgatatctgtctcatgaataactgggtactaccaaactatcgtgtggctccatcagatggtaaagttttgagatcatttgccaaactcgtagttcagctccattactcccttcagatttgcatgttgatgttgatgctttgttcaaaaaggtggatatgaagctgaagtaagaatcacggggaatcatgtcgcatgtacaatacatggagaggaaaagtctgatgctgaggaagctagggaatctgcggcagcttgcttgctaacaaagttacaacacgacacagcagccaacttatcatgattatgtgagattcaagaacaactcagaaaccaaactaacttccagcatgagtagaaaacaaccctgattttgatatgtatggccattttggacgaatagcaagatttgtacaaaactccatcctctggttgagattttgagatatattacaagaagtcaaaggtattaactgatgcagaaactaaagtagaaccagaatcatgttaaaaacctaatcctaagcctcctgcatttaaaacaatcctagaaactcaaaaacccaacaaagtgctaaagagggatgaaagaaatcctaatcaaaaaaaaccctaatattgttaactagaccaaaaacctcaacaatggcctgaaagattagaccaatatgaatctcaacagacacaagaaacttgtcatgcaactaaaataggagctatactgtctcatggcaaaacagaggactccatcgcacctaaaggcccaaagacagatgtcgtcgcgagctttcagttcattagagggttattgggtttaagtggtctctgttgggcccaatggttggcccaatatttattgatttggattctgattatcccgggggtgatttcagtcatcgtctcgatcaatcttcaactctcaaattgaagtttccatgggaggccacgaaggtttcagcaaccaacgcctctcctccgccacatggttctctcatttccgtgcttcagctctccgatctaaatcactgccccctccgtcctcgcagactgccgttcgctccacctctggcgactctctggttcgtcgcctcggccttttcgacctcatactgttgggcgtcggcgcttccatcggcgccggtgtcttcgtcgtcaccggaaccgtcgctcgcgatgctggacctggtcagttgaatgaattactttttctcaccacctccttgattcgttcagaatcgcttagtgattattgctgccgttgcgtgcctaggagtcacaatcagcttcttgctagctggagcatcgtgtgtgttgaacgctctctgttatgctgaactttcatctcgtttccctgctgttgttggtggagcttacatgtactcttactcagctttcaatgagatcacagcttttcttgttttcgttcaactcatgcttgactatcatattggcgccgctagtatctcccgtagcttggccagctatgctgttgctcttcttgagctttttccagccctcaagggctctattcctctctggatgggaagcggcaaagagctcttgggagggcttctctctttgaatattttggctcccattttacttgctctcttgacccttgttctatgccaaggtgtgcgagaatcttccgctgtcaactccgttatgactgctactaaggtaagcttctttccttttaaccttctcttcttatctttaccaaaaaaaactcttcttcactatattgtttcttctgtaggtcgtgatcgttctcgttgtgatttgtgccggtgcttttgaaattgatgtagcaaattggtctccttttgcgcctaatggttttaaagcagttctcactggagctactgttgtcttcttttcatatgttggatttgatgcagttgctaattctgctgaagaatcgaagaaccctcaggtctgcctatatatatgttgaatgtacatactatctacaaagtctcttatgtctgtttaattcttgttcagcgcgatttgccaatcggaattatggggagccttctggtttgtatctcgctgtatattggcgtatgtttggtgctcaccgggatggtcccttttagcctcctcagcgaagatgctcctttagctgaagccttttcatcaaagggtatgaagttcgtctcaatcttaatcagtattggtgctggtgctggactcacaactactctgcctggtggtctttatggtcaggtgataaaaaaaaaaaggaattcctttggaaattcctttaataaggacctggaaaataagcaaacc

SEQ ID NO: 6979 - DNA, 3087 bp, Arabidopsis thaliana landsberg
gaccacaacaaatgcaaagccctctaaagagactgttgtggtgtaaaagctcgagcagtcaaagctgagacaacgatggtgaagtaggtggaagttcagacgcagatagttggtcgactgtgcaagaaagagctttggttcaagctttaaagacattcccgaaagagacaagccaaagatgggagagagtagctgcagctgtccctggtaaaacgatgaaccaatgcaagaagaagtttgcagagcttaaggaaatcattagaaacaagaaaaccggagtatgaggtaaaatcatttcggagtcccatgagaattttgggttttaatcctcttggggcaccgttactttgcgagaagcaagacctaaaacttttttattatttgtaatgattcatttccctttgatgtctctatatattgagagtgctggagccactattatggagtatgttttttttttacataatcttatgtaacgtttgattagcgtctagtttcaagttgtgaaataaagcgcatcgctcatgctgctgtgtctccggtcccaattagaggttgggctacaataagccctaattttgatttgcgtctttacaatctaaacaaaaccaatcgagctagtatgatggaagtagcaggaacaagaaatgagtatatataaatgccttcaagtataagaaaaatcaggtgaagaaaatccaaatttttaccaagtccacaaatcttctctcaactataacaaaccaccaagtcatgtaagccaggtgcatgaaaatacagaaagattcaaattgtgtgatatggttcattttgttacagcgaccaaacaggaggcatattggtccatccataagacccgacgcctcgtggtgcttgacctgatgatgacccaacagtcacgtaactgttcccaatgtcgtcaccaccaagaagtgcaagcgcatcactcatgctgcttgtgtcactaacaatgccataacagccttggtcaagccagctcgacgcaagtaaaacatcaggccgtgttatatcaactctctttggttcccaaacctgatccaactcttctgtctttacaacattccctgcaaaagcttcatatacgaaaaccaacacagctgcataagaatcaatatggaacaagagtagataagataccaatcaacaagtaactttgatcaactcacctgatgaaaaaccacctgcactaagttgcgagggacttgtaatctcggagcgacccaaatacttttgggaatcttcatattctcctgatttgatcaggttttcgctgccacgtggtacattctgagtaacattggtcgtgcaagtagttgaactgaaactcttctggggtgatgacatcaacaaactgtgcttcgcactagttttgatcttggcctcatgaagtaacatatctagtaggccggtgtcgcatgaagagaaacaatctgactcctctacctgcgatggtggtggagattgaatataggcatcaacagagtcaaggagatctgagtgtggaggtgacggagtcgtcttccactgatcaaatgcactagtttctgaatattggaatgaagggagctccagcttcactgccccaaacaagggcttagaagtaggatgcatgccatacgtaactgtatggctatcaggaaccatcatcatatgagacgaatgttggttttcataaggatgatgatcaacatcacaaggcgagatactgcaagatctgggattcttctgtacagccgtattctgaaagtgttcccgcgattggaattcatgctttatgttactgctgcacatgggaaaccgagatccagattcccagatttgctttggggaaggcaatattggtggcatgtagctctcataccgggaagaacttgcgccagttcctagcatgttgcatgcaaccaaatctgataggtcagaagcggcaggtaacaagctagcagcaaaatttagatcgtcaaataagacattatctttagaattccccaactgcaagaaatcttgatgtcttcttcttctatctactcttatgatattactctttgtatactcttcgctccaatgaaggtcatcaacatagatttcaggagggtaaagtggtaagcctgctcgttgtctcctcttgatacgagtgttccaataattctttatctcattatctgttcgaccaggtaactggtaaacaagaagaaaacatcataccagagattaattagtctttaggctcacaaagaatatcaaaatatgaaaatggaccatgatcaggtagcttccgcagttacaaaactacttacatgttcagccatctgtgcccatttatttcccatcttggcgtgcatttcaacaatgagctgttcttcttcttggctaaatgctcctttcttcaagtttggcctcagatgattagcccatctcagacgacagcttttaccacaacgggccaggctagtgtgtttctgcacagcattccagttaccctcgccgtgcttctttacataatcaattaaaatcccgtcttcagttgaagtccatggtcctttcttcaggacacttcttttccctctacttctgcagccattgctaatactatcaggagctggtgattcattatggatgctggagtgcataccatcatcactatcagcagtcgccgtcgtgtaactcatctctttctacttaaagcaagacagactccagcagttcaataacaatttagacatcaagctccaacctgaaccaattaagaggaaaaagagacaaattaatatttcagccagcattcatgtagttatcaacaaaataatgacatgataaacttgtaaaaggaggcgataattgaaaaatatgtctagtagattcatcatatctaccgctgagatatgagttgatactaggcaacaactaaaagtctgtaatgaaatttctacagaacactagtgacaccattttgacgaatagatttcgtatttgaaccaaaccccagaaatggaaaccagaaactagctaagcaacattttatagctctgatactttgaaagtgacttctgtatcaaagtcgctgtctct

SEQ ID NO: 6980 - DNA, 588 bp, Arabidopsis thaliana landsberg
  unsure (1)..(588): unsure at all n locations
gggaacaaccaaaaactctatgaaattagtctcgaaacacacttttacaaatttaaccatatccttatcagaaacagaacacttgggtgtgcagccatacgtgcccatctattacccatcttggcatgcaattcaacgataagctgttcttcttcttgactaaaagctcctttcttcaaatttggcctcagatgattagcccatcttagacgacagcttttaccacaacgaaacaagctggtgtgtttctgcacagcattccagttaccctcaccatgcttattcacatagtcaataagaatatcatcttcagctgaactccaagggcctttcttgagagcatgaccatcccatctacttctgcagtcacttccattatcatcagcagctggtgactcattatggtcactgtcagtgctcgtgtaactcatctcttttctaattaaaccactgacagtaacaatttagacatcaagctcccacctaaacaccaaaaacttcagcttgaaataaagaaagttcatagtcataaagaattaaaagagacgaaagaggaaaacataccctaaatanggaagaaaaaaaaac

SEQ ID NO: 6981 - DNA, 1571 bp, Arabidopsis thaliana landsberg
tatctgagtatctaaacgttcaagttgatttttttaaggaagggaggaataccgttcgaggaagttcaaaagaaccttcttaccgtaaagtttcaaagtcacgagcgatttgcaggtatacaaactactgggcaatgatacagcagctttcgtatcatgtaaactgatgcttagctcacgcacacagcgagaaactgcaattctaacccacgatttcaaatccttaggttgaagtgatccaaaaaaagagcaaaaacgcaggctttctatgattggagctttgtgtaatggcagattcttggcaataaaatccctcaggcatgcagactctgaaccatcactaaagtagaactcgagtttggacaactacatccaaagaaactcccattgtttcgacaaaacactagttgatactgcttcttttgttggaagaaacgataatatcttcaccagtaattcatcagacaagtcactgattttagccatatcactcgaagactcaagacaaatttggggttttccgaccctggaaaaaaagaatcacatgaaacaaaacctaagactaaatgatttgtctgaatccaactcaacaaattacaaaacaagtgaagataatgaagtaaggaacagaataacaaacctagaaatttcaggtgatgagtttttcgtgtggaatctcgacttctgctcgggaaccagtcaccagtcaccaccactcatcagaccgtttggcttccacttataggcccatcaaatggtttaataaacataaatatctgaggggcctgctactgggccagtcgtcatgtcaaactctttttgagtgcatgtgtatattttaaggtccttattgtagttgagatttttttgtaaaatccatacacagcaaacttctgaattagtgtacttttgtaaactccaaatacaaactaagattaggttcagttttggaatgtattttcaggtgggtttggttcaatgagattaagaacctacttatggaaaaaaaaaagaacctacttatgcataatgaacttgtaaattgtaatggcacctttaagaagaatgcaccaaatgccttttaaggagctaagatcaggaagtttgcagggaaggctatggggactaaaaaccctattttattgaagagaccattttcttcttaatgattgaatcttgggatgatcaagctgaatctgagtattaaatgatacaagatgtcgtctattatatggaggagacgaatgatctaaaacatgcaagttcagttcttaaacaagtaccacattcaaataaaaacccaagtgttcttggataacaaaacaaatacgacgactcatagatcattttcaagtttcagttgtggagaacataacatcatctgtgcaggattgatgtagatttcagacatcgagcatgtttgaagataagactcaagaaatccctatcttcttgctcctcgctgtagtaccatttaaccctgaaagtttctagactattcaagaaacatttaggaacggatccctgatttttgctccagctaacccggtgatactccccaattttttctt

SEQ ID NO: 6982 - DNA, 1206 bp, Arabidopsis thaliana landsberg
aatccaatttcatattaaaaatatttatcttcatatttgaagaaaagaaaaacaatataacatcacatttttatttaaatccaataacgaccttaaaaatacacatgcactcaaaaaagagtttgacatgacgactggcccagtatcaagcccatcagatatttatgtttattaaaccattggatgggcctataactggaagccaaacggtccgaggagttgttgtgactggtgactggtgtggtgtgatatcgacggcgagaacggagcgggaacgcttaacagagaacccattcagaggatttagggtttgtctctattgactaatcgctgacaaaaaactagagtagaagattcttcgatgatgaagaagaagtgacgcaggttttaggtatttaaccgtacctactcgagcaattttcttatgatttatcatctcttttattgtttggatatggaagtaatagattcccaaatcccaaaatccatctatcactgtttggaactaaaagaaaaaaacatttgtgtttcggcagctattagatgatcttgatggtgggtttctgtttttccatagggatttctgtttaggctagggttttgggattcaacctaaggatttgcaaaagggttaattagctctcaagtctcaattatggatagcataagtgagttgccctatgctctgctcttgaagatattatctttactgcctactgcgagagatattgtggccactatggttttgtccaaacgatggcaaccgctttggatgatggtgccgagactcgtttatgatgatagctatcagaatctcgagtatggaagtttttcgcggtttgtagacaagtctttgtttctgcacgaggctccagttatagaaactttgcatttcagacttggtaaaacatgtggtagtggagatattcgagtgtggattagagctgctgataaatgctttgtacgtaggctgattatcgagttcgacagctcttctagtgcatctccagccatacttccaaggagtttgtacacggggtgtagaatgcttgcgatcttgaaactcactaaaacagttcttgtggatgttacttctccgatttctttcccgtctctcaagagattgatccttttatctgtgaaatacccgagtgaagaatttgtccagaggatgttatccaattgtcctgttcttgaactcttgta

SEQ ID NO: 6983 - DNA, 2972 bp, Arabidopsis thaliana landsberg
  unsure (1)..(2972): unsure at all n locations
gctttgttcttcttctcttctctctgtggttttgctttccactttctataaaagcgaaggtttggtaatagtggtatacgtggtcccatctgattggctgtccataaagaaaacggaacgttattaaccccttgaaaagactgtagtacccttcatttaaaactgttattacatgtttgactttccctttcccgtacgggctcgcttgatatcgggggatattccattttactttcaaattattattattaaaatcacttaaaatacgagtttacagataataatgaaattaaaaagtcaacgattaaagactttaataaaccaatgaaataacccaaaagttccttactacagtgttgttataataatcgcaataaatattttaattttcaaacatctgtcagtaggagtgctgtctgaaaatctgcaagcctactcaaaccgtattaattgttatattcgcttttgtggttacaacaaaaagcgaagttcctcgaagtttcttccattattgcctgatctacctccactacgctcggctctatatatatttttcttattatatactcactccaaagaaactcattaaccaatatagcttataataataattaagtttacaattatcgattgtataaaactcctacttatatcttccttcgtgcagattagaaaatttgattaattctaagcattgttcattagttggcaatgagcaaaataacaattggttgatagataaataatacgcttttcgatatttaggccgtagagcgttttctttaagcccaatatgagtccaatacaccaagaaaggaagaataagattccagggacactttaaaaacggcgtcgtgttcacaaaagccttttcgtatattgaccatattaccctccacagcgattgtcgtcatctaacagttaacgccgtcaaaagattctgtaacggcattggttcaacagtctccggtttgatcgcccaatcatatctctgccgctgacgtaagaatctacttgtacactgcaatttccacaagccaaagggaaagcttttattttgaggaagacgaagcaatgggtgtactcacgaacaaagtcgagagagacgagcttaaacctggtgatcacatctacacttatcgagccgtcttcgcttattctcaccacggtaccttcgatttcttccttttgatttcatcatcaannnnnnnnnnnnnnnnnnnnnnnnnnnnttttcctcaatttggatcttctttgtgtaaattttagggtttatgttacctctttccattgcagagatgaagaaacaaaccgtcatttggtttcttattgggttattgtgtcaaaaactctgttttgttattaggtctttttccctcatgccaaagtttttgactttattgaaacggatcttcaaaaagtctcatcttttgttttctctggattcaatcgtactgatgatgacttgtccttctatagtcaatggtggtagcaaatagattttgattgcttttgttgacatttcaactgaagaaagcattttgttttcttctaaattttccacatttgtaggcgtatttgttggtggttgcaaagtggttcatttcaaacctgagcacagcttgatatctcctacactcgcttcttcttcttcttcttcgtcttcttcagtttcagaggttaatgattcttcagaagctccttgtcctacatatcctgactgtggatataaacgaccaaagagtggagtagtactttcttgcctagactgctttctcaagaaaggttctctctaccgttttgattatggagtcagctcatcgattttcctcaccagattccgcggtggcacgtgcacaactgctccatctgacccgcttcaaacagtcatccatagagcaatgcaccttctccaaaacggatttggtaactacaatgtcttccagaataactgcgaagattttgctctctactgcaagacaggattgctcattctggataagaacggggttgggagaagtggtcaagccagttctatcataggtgctcctctagctgcactactctcgtcacctctcacattgttgattccaaatcctgttggtgtagcaactgtcactgctgggatgtattgtatgagtaggtatgctactgatatcggtgttagaaacgatgtgatcaaggttcctgttgaggatttagctctgaaccttggccttaaacctctcaagagaaaaaggaaagcttgtgacaccagcatttccaggtgaacacatattctataatattcaccaaaaagtacagaacattggccaatgtttagtcacgatcttatttttccttgatctctttcttgcttgccatggcgacattgtaaggattctctagatacattgtagattccaatcaagatttggttctatcacttgcttttagccttaaaagttgaaaccatgccgaagaaaatttcggatacagaactaagcaaaatcatacactaaaggcttatatatacacatgaaaacttcttcggtttaaaatcttcatgtatgatgagttttcgatgtgtaattgaaagtgatttaggaacttagtggtggttgtttagtgttgttgtctccggttttctttttcgaatcttgttcgaaatctgcaagatttgccagttcatcgactgcttcaacggctgtttgaattctagctgcgttttcgattaacaacgaaaccaaagtggcaactggaaggacttcatgtaggctcatggacgtggttctctcttcgctgtctactttgttctcctcttcagatggaacttcttcaggcttattggtttcaattggaacattttttaaagtttcttgaagctcttgtactgcagagttcatatcaaacaccaggaaatccatcttcgatgattttctcgtgttcttcatcatatcgactgagagctactaggagctccaaggcggggg

SEQ ID NO: 6984 - DNA, 3025 bp, Arabidopsis thaliana landsberg
atgaaaatttccgcttatatatcctcagctacaaaaactgatttatctcatgttgaataatctatcttctgtactcgattccgtgagatctgcagatgagacttctcgtcctcttgatgatatcataccatctttgcgcaaaacccgtaaactagcaggcatgtcttttctttcttttttcttttaaatatccctcagtttattgctaacttgacattggcgcagcgaagttttcttaccatggcttttcttattgtttatcattttccagaactattggatatgcctctcatgtctataacttcagcttgggaaagcggggagttatttagatgcaatttcacaagaacagaggtacaatctttttaaatcgtttgacctcgtgtcctactacctgatatatggattaaggctatttcttatggtgattattggatctttgattattggttatggtgattctgaaagcttttggaatgtacttggttacaggtacaagatttcatcaaagctatatttacagattcgccgctgagaaaagaatgcttatggaggatagacgaggttaaccagtagattggaaatgataaaacttaaaaagaaaactcaagacttgtgagaagaagcaagtgaaagcctattttggcaaaagagccatgaggtattttaatgtcagcagcttgtaacatcgacgacgcactcttgtctaagaatatatatgtaaagagagttttagctgatgagtttaaaactttaggtttaaaagcgtgttccagattttgttgtacatttgggctttagattcaacaagtaaaacgctctgggtaacaacaattttccggtacaaattctccaaatattgcattttccagttagctaaaaacttgaaaacccttaactaagaaactaatataaaaaaaaataaaaataaaaaagaagaaactgataggatattgaaaaccgtaacacatgaaaacactaaatatttctatgaaattattgatacaatgattttcaatgaaattaaacttttgatatacttattcaaatataatgtatgatgtgtttagatgctaatattatattaaaaactatttcataaactaatattaagttatgaacactaggaaaatattttggtctcataaaccaacaaaattacattaagaaatagagttaagagacattggtatttttccttttttttttttgtcgacattggtatttttccttatgttggccacatgtttaaaatgttaacaaaatcacataacggtcataattaagggccagaaaaggaaaaatttcattagaagatcttattagatttagtgatctatcaagaacttgagatgacgtcatatatttctatttaataacaccacacatctatctatctctaccttctctcttactttcaagtttccattctcacgctcattgtctttcctctagctctctttctttctttcttcttccccatctttaggtttcttgcgtacaacgttacaaattctttttacaatttcccatgtcttccagagaatcgaagagaatggatgaatctgatgatcctagggtttcagagtcgagtgaattctcaaacttcgagatgttgatacaagtcgctgtcatggtttacgatcatgagtacggtactcatgacgaacacaagtcaaagaccattgacgaagatacagagacagaagcaagaatctttggagatacaatacctagaaagaacagaactcaccgatcatcttcttcttctaacaagacgataacaccatggacgcgtgtgatcgaacaacagagatcatctgaactacaaaaccctaacccggaatctgaaccttcttcttcctcttgcgttacccacttcaagaaacgtcgccacatggacaaagaagagagtactcgccagagactcaaaatcgatagtcctttagaggtgaaaaccaatacaaacatcaccaccggaatggcttttgaaagtaatgaagagagaagagaacagctacaatccaaaattgatctcaacgagaaaactctataagactgatctcgctagtcttcaagcacgtctctcagtaccttttaaacaagtgaaaagtccagactttttaacagaggaagaaacaagaatcataaaggaacaagctttgaagattcgtaaagaaggtttaagtgttgattttgtggatcctttgttgaataagtatgttcttgatctgaggaagtggaagatgagtggaaactggtattatgtctttgttaatggttggaacgatgtggttactgctaataggttcaaagttgatgacttttttcctctctggtcttttcggtctggaagaggtaaactctgttttgctcttgtccctcctacggcgagccacgacggcgcctctacttcgggagaatcttgccacgaaaaccctcttcctgatgacgattccggccactgtggtggtgaatgtagcaacggatgctcttctttcggtgattctccgtctctctgatcatgctctgtttatcgccagaggatcacacgtaccaaaaaggatctatatttctggcaatttttcgtttcttgtggcctaaaattgtaatttttcttaggaaacgtaatttgattttggtgcaagatttagggtttgtagtctttatttgagaatgatgacacttattggaatcttcttcagattactaacaattttggattattatgttgtctatgttcgattatactcagtttggctaaaactaaatccagttgctttggtattatcttgaatggtttggtgaagatttcttatatatgtagtatgagctttctcggttatgaagacaaaaccacttgaaaaaggtttaattctatgacctgtgatattactccactatagattctctgttatgtatctattgtgatattactctcttttggaaaacattaggtgaaagagtttcactgttgagatccaaaagtagcaaaatccatcttccctagaaccaacagaatcat

SEQ ID NO: 6985 - DNA, 1236 bp, Arabidopsis thaliana landsberg
gaccgattcgaatccttccgaagccttaccaataggtgatgaaaatccgattgacgaagtgctcccagaaacttcagcggcagaaccttctgaggtagaggatcctgaagaggctgaactgaaggaaaaggtcttgagagctgcccaagatgcggtgtctaagcagaagcaaataacagatgcatttgacactgaatatatgaagctacgccaaacttctgaaatggaaggtcctttaaatgatatatcagtttctggctcgagcaatatagatttgcataacccgtgagtttgtgttcttgtctccatcccttgtctttgcgattttagtctatcaagccaattaaatctctctacttgcagatctacaatgcctgttacatcaacagttcagactccagagttatttaaaggaacccttaaagaataccaaatgaaaggccttcagtggctagtcaattgttatgagcaggttcactcaatctctgtttacatttgttatttttgttctgtaggacttaatggaggaaattcttcccctcagaaatcatctttcagaatgggtctgtactaagattattgtttgctatactccagggtttgaatggcatacttgctgatgaaatgggcttgggtaagactattcaagctatggcgttcttggcacatttggctgaggtaaatagggttgtttgacctttatatttgttgtgatttggttatgttaacctcatcagttttctcacacaggaaaagaacatttggggtccatttcttgttgttgcccctgcctctgttcttaacaattgggctgatgaaatcagtcgtttctgtcctgacttgaaaactcttccatattggggaggattacaagaacgaacaattttaagaaagaatatcaatcccaagcgtatgtaccgaaggtaacggctatgtgatatttttgaggtgacaaatttctcaatgctgtctgcatatcgtataattaggtgtaatgtttttttccacttggatcatctctttcgatccttgggctgtacgtcaaatatgcatttgcaaaagagcatgcaatgttgttaggtttcagacattaagtgatatgtactgccagtattgccccatctgtgtctaattttacatgttatcgctctaaaggaaaccatgtctattgttagaattcatgttatttaattgatggttctctcaaaggctgcacgatcaatgaaacttctttgc

SEQ ID NO: 6986 - DNA, 1450 bp, Arabidopsis thaliana landsberg
tttcacttgtcctattttccattaaccataatatagatttaagatgtagatacagtattgggtaaagatttatagatcgagatatttagtatttaatacaagtttttcatatataaataatcaatagatatttcttcttggtgcagatacaaaatccgaatcaaaagatgatatgttacctttaacatggtttaaagcgatgaacatcaaaacacagacaactataaacccagtgattgatgtcatgattcaaaaagataagaaaagtcgtatttacttgcagtattttttagtcttaaacctattattgttatatagttttttctttatatacactcataataaaatatacttaacacatgtactaaaaatagtttttactaaactaactaaaacaaagaaaactaaaaatcaggaaagagccgggccaagtcaattacaagattggtggtttatttttagtgtgcaacaaaatattgaatttataaaatattattagtagaaaaacattgtgttttaatgtatttttaccttaaaatcatgagatttttcgacatttataacatctaatttgtcatcttaacacaaattattccaaatgattgactgaatacctccttattaatctatagaactgaaatggtgagctgcaaactgtaaccgggaatttgatttaattaccgaggattttggaataatctatagtatgtaagataactcatctcccatttccacttacgtctttttctctctgctcaggcttttcttcacttagctctgcaaaactttaaaggttctcgagcatatttttgctaaaaaatgccaaaatcaactccaactatttttatgcgggtttttttcaatccaaactctgatctcctgcccttattaacccgaatccacataaattttatataataaacttgaactatgtaatcattagccaattttaacattattttttgtatttgttaatatcgattagaattgttaagtcgtaattatttgttcttttatatatgagtcattcattttattcaactggttaaaggttacataattcatatttgttacattatataataacatgtatttgttaaaattggctactaattatatagttcaggtttattatttaaatttatgaaggtttggattggtaagtacagggggtcagagttggggttgattttagccgttttccccatatcttgctacttaatcttttttgaattctcaattcatataacctaacaattgttattttatttttagaatttcaacgtatcctacgatggaaggttttgcatcaaaaactgcaaacttatacttatgttttattcttagaattttaacgtatgtagttataaatgaaaacataatttttttttgttgataaaaatagtttctaggattgacttttcaataacttaacgagaatttagtaaat

SEQ ID NO: 6987 - DNA, 793 bp, Arabidopsis thaliana landsberg
cgatgcatatcaagaattaatgaagaccaaaaattaagagatcatttattaccttgaaaacttggctgacactgaaatctcctatcttcactgtaccgctactagtaaccagcaaattgtcgggtttaatgtccccgtgaataacatcctgtttttttccccatagaaacagtttgaagacagcattaggtgatgaaccatgaagtgagagaagcacgctaaacaatgaagatcatacatgagcatgaagatacatcagtccagtaacaatatcccgcaaatactttctagcagttttctctccgagagcacccggcggtccagaaccgtcatacacccattttccatcaacgtattcaagaactaggagaagccagaaagacaggcattataagattaaaggctctttccacagagagtatatatcaaaacagtagaaaagagaaaggagattaagtacccatgtaaaaatgatcagtttcagggtcatctatcacctcaatgaggttaacgatgttaggatgctccaaaattttcataatcataacctgtaagttataggataaatgagcataaacataacttctctaaaatgaaaccaatagaaatgctgttcagcaatgcaaaaaaactaaggatacctcacgaagaacatcactcatagcagtctctgacggtgccacccttagccttaataaatgcgacttgtgaaatgcctggaaatccaagtattaaatcataatatgtcaaagtaacttgcataatttgcaccataattaaggatcagatcatc

SEQ ID NO: 6988 - DNA, 595 bp, Arabidopsis thaliana landsberg
cgatctaaaatgggagtgaagaaaccttggctagtgcaattgcaagccatccacttatgcagaatacctcagtgatccacaaagtctaagaaatttattagagcgaaaacattattaaaagttattagaggtttaaggatttgccaatgtatataggatttacaataagaaatatctgaccattttacaaccaaatgaatctgcaattgtggcgctaaatattgctccgatcattcctccaaatgtcaatagtgaaccaaatacagaaaactgcgaaaaatatccataaaaaccaaattccagttttcataaaacttgtcagaaatagatttttatttgttaagaccgatctaaaatagtaatgaacttcgttaaatagagacatacttgtgtgatagaaagatcaagatcttccataatggaagccattgtaccagcagtatgtcctaactgatcatcatcaaaataattgagatacatgcttgaacactggagtatttctattcaaaacccagctctaaatttcgaatctcgtacatatgtcatgtgtgtgtgtgtgtgtgtgtgtgtctctagagagagagagagagagaga

SEQ ID NO: 6989 - DNA, 703 bp, Arabidopsis thaliana landsberg
acgtgatctctgcagcaccaaatctacacatctcattgtacagttcttcctaagtttcatagccgtcacaacccatttcactaagaagactcagggcaatagtctttaactgggatgcgtcctcatcagttgatctatgagaaaaaagacatgttaatggcctagcaatgccaaaattattcaagatacaatcaaattttgccagaatgtgttctcttacccatcaaactgtccaggaaacttcttataggtaccagcaaatctatcaacagctctaagaagaatataaaatccaattgcgccactgcaagaggaataaacagaaaagtggtaagacccttaagagctaacagcaacatgcctccaaaatgctgcaactgtaaatattatttttcagttctacaaatatactccagtaatatttttgttatcacagtctctatggtcgtataaaagaatcaattttgacgaagtcattcttacctgtaattctcatcagccaagtacttatgtagttctgttgtagaaggacttttgaactcgtcttctatcgttctatatctgcagacctacaaggcgcaattcccggttttaatgatacagtacacatcaaattgtaagaaatttcagcattctcactttaagttttcgtgcattcttgcataagctcttgatagttggctttgagatgctacttgggtcg

SEQ ID NO: 6990 - DNA, 872 bp, Arabidopsis thaliana landsberg
  unsure (1)..(872): unsure at all n locations
caggtatttgtttctctaccttttttcttcatgtttcttgtcttccgtccgaatatatactaacatgatcctcgcaggtgccaccgttgccatcaagtgcnnnnnnnnnnnnnnnnnnnnnnnnnnnnnnnnnaaggctgttactgatgaattgggagagtttgaaatcgatcttccctcccaactccatgcgattccacaccttgaaaacacttgtttcatcaagccagtatatgtgcctaggccctatagatgctataacacctctaccaatatacacaaacctatcaaacttgtttcctctaccaatggtttccgtgtctacacctcagggaagatcaggttacagggccacagttcgagatcatagcaagctcgttgagacaacatttcaaccagaagatttgaacacaaacagctgattcttcaagttccttcatgtgaaaagcattttttttgttatggtcctcgtttgcttagctggcgctccagtcacagaaccgagttagagtctctctacattgtgtttcatgttcccaaagtgtaagaacaaacaactgtaagcatcatgtatataaaggctcccatgtttttggtacaaaagtagtgtgatcacattagaatatatatcatataaaatgtttagcagcaaaaacccaaatgatcatattggctgaagcaaagacacactgacacagagcatgtctctaaacttgcattaactaaacattgaaaacaagagagacagaaaggcagagatacaactcaggactcagacgctttggtaggagtttcagagagtatgtatgttgcaacatcaccacaacaagtaagcttatcagctttctcatcagggatctcaatcgagaact

SEQ ID NO: 6991 - DNA, 1295 bp, Arabidopsis thaliana landsberg
cagtgagaggttccaaaaacacacgatgaatcttcaagtgttctgttttgtttttctttaaacttgtgtttacatggttggctttatgaggttgggatgttcttgaactgtgtcctccatgtaacttgatagtccctgaggtgtagacacggaagccatttctcgaggaaacaagtttgatgtctttgtgtatattggatttggaaaaagtgtggtaacatctgtgatagtgcttaggcacatgtattggtttgacgaaacatgctttttcgagttgcggaattgctgtgaagatgagaaggaagatggatgacaaattctccaaagtcattagtaacactctttatccattttgatctctgttttagtccagtgtgacacttgatggcaacagttgcacctatatgatcatgtacaaaattcgtaggtctttattgttttttgtaataataaaaagcataaaatatagttctcttcactcattttcaattgattttgaattagaagtttatgatttctcacaagacgcagtgtagagaatacctgaaacaggggtgttgcaaagaagagaaccggtgataactacggatgagagtttgtgttccccgtagccagccatatccgacatctctcttatgctccataacttacttgaagctgcaaatgctccgttgaagaagaagaataataacaagaagcaacggatgataaagaagctctccatatctcaatataggttaagaatgatgtgtgtgaagaggatggatttaaggagagaaaattgtcaatttgtccaactccattcgcttattatttgtttggacctcaatgtgttatctcagctaactacactttggggaaaagtgtagtagttagcagaaaatgaagaaacaagcctaccatcacagagaagactgatcaactgacttttgtgggtttggtcagtaagcactaagccaccattggttaaaaggatttgttgaccaaaaccacattttctcaacactttaatgggcctccaaatctgagcatctgacatctttacggcctattagctattcaggtggacaacctgaaatagagaagatcactgatctgactggtctaatgcagcttgatggttgacttttcaagtcatagcgttgactcataaaaggcaaagaaaaagagtcaaatatgtcagctccaacttgtctcccctaactattttgtcaatagattgctaacaatcaaactctttagatattttgttcttatctcatgtcgagtcacttgaatgtctgatctgtgtgtgt

SEQ ID NO: 6992 - DNA, 1068 bp, Arabidopsis thaliana landsberg
agaaaaataaaaaccaacttcatgttgtaagcgcacgttaacatactttgaaaatttacttttcaaatagtatatagggaataacataacactagatttaacgaagaatataagaatcctaaaaccaataaaaatgtaatatgatccccttcttcccccaaaaataatgttgtgaatttgaactattcagaaggcatttttcttaccaataagccataaccaacccaaagcacatcctacaaatgctccccataatataaatagcaccagcaaatttcccaacgcattcttctccgggcccttcataaaaacaaagccaaatatttatacaaaatcaaaataactgtatatgtaggcagagttaaaatgtttataattgttttggtatctaatgttaattaaaaacatttctttacatttcacaacattaatatacctttttcaaattataacactgtgtttgttaaaaataaaaatatatatagtcatttacctaaacctagtttaactagtggtcaatgttcatggtcatttagtgcaattaccctaaatagaaacgcaatctcaaagaaactatcaaacatggagtagatagattaccgtgtatcctctaggagctttggcaagaatgcaaacagtgagatgtccattagttaatcccaaaatggaaacgagcaaaatcatccatccttgatcaccatattttgcagtgaagtagaaagccggaacgaggagaaaccgggttaaaaccgcgacggttagtccttttctgttctcaacatttagccatttcaccatcggtatgtacctcccaactaaatcccaccaattgtacattgctattaggacaagcgcataccacgagcctagtccgtgttgtcccgtgttctcgtataagaacccgggcaaaatggatagtgtcaaaacatagatgagaaatagattcactacatagtctacattttcaagcaacaactctttgttattttagccgttatccttggaaacatcatcagcagtctgcatatttagaagaatataatcaagaagcaaacaatgtttaagact

SEQ ID NO: 6993 - DNA, 469 bp, Arabidopsis thaliana landsberg
aaaagtctaatccctgctccttaaaggccattaggacatttcttagaaaatctgttattctccgaaaatatcttaaccctaaaccttggtgattcttcttgaccatctcatatgtgtcttattctaccaaaaaattcattttcttctttcccatccgtttctttgttgttagacaattttctaaatgttcgaaattcttgctagcaactactggctctagccgatactttcggaaaatacttacatcgtttaccttggaatttggtatttcttaaagtctctatgctgacttacggctttcattagaattttttcgttcccacgacgaaattcttaacgatacggttgattgacaactttgatccttctttcaccttttgattattttctagagtaataatctctcatgattcttcttgtagatctcttctactgatctatacatatcattcgaccttgatttttgatc

SEQ ID NO: 6994 - DNA, 1448 bp, Arabidopsis thaliana landsberg
ttatattcgagaagttatgcacgtttcttcctggacaaggacttgtataatctggtaaatctggaaccctagaaaacagttttgtgttggtttttttgaggtaacgtttggaggtccgaaactaatatgttcggaatgaaactttgtgcaggcgtttctggtattattggctagacgatcaacggtgggattgcatttttaacggttagttcttgacttatctttatgtttcaaagacagttttgtatggagtaagtagtgacgaatttgtaatgtttgattgaaaaattgagcttggcataagctaaagctttgcaggagctttcatgattcatggattcaggtcctggttgagggagaatcaagttagagcttatgagcatgtagttgtagtaaagattgcctaagtggaaagaaaggagaattgagtcttcatcatcaacatgccaaggtgagggtgctatttgcgaagcatgattttcttttgttatggttcttgacacatgatatgtaggcttaggtttgattgcataggataagattatgtgatgatatgatttgatgattattgagtgcttgatataatgatatgtatggtgataatgtttgactataaaatattatgtatgagaatgttaagtataagtatctaagtatgatgattatgtatgtctgtatgaatgaatggggagaatcaagctatgggccgtgctctccctagtaatttgaacagtgatggaccgacgggttaagagctggtcaagaacgcttgacaagcccggaatgggagtatctgagccacgagggccagtctccactgatgaggtttagtcaacacgaggatggctagactaacgatacgtatgtatgtgctattatggataaaatgcttgttatgtatgtgttgttaaggcatctctaaccctactctatttagagtaaaaactccaaattcttctccaaccttgctctatattggactctaaaatagaaatttatgcagaattgctctatatatagagtaagtctattctctactctattttagagttgaaattttatatttatattttggtccctcaaatttaattttttatttgatacatattatcattttacgaacaacaactacaacaaatagttttataaaattaataagtaaataattactaaatttaaaataaacaacataagaaaactaaaacataaaactagcaatttaatattccggtaaattgcttgtagatccaccaagatagttaaaatattgtccaaatgaagtagatggaggaggagtttcttgatattgatcttgttgttggacacgtcatttttgtaaaatccgtgcttattcaatctcaaaatatgcacgaatatttgggttttgaacgaaattcaaatcacaaaataaaattttgttttcttcctttaattgatcatatgtggaa

SEQ ID NO: 6995 - DNA, 603 bp, Arabidopsis thaliana landsberg
cacaataaatggttatgtatttccgaaacttcccattgttaagtactactgaagtaaatccgcttatgaaggattatgcagtgaatctattcctcctctacgatttgacattatccctggtacccaggtttttatatgaaaacacaggacaacacagactaggaacatggtacacgcttggcctcgtagcaatgtactatgggatttggtcggaaggtacacaccgctggtgaaatggctcaaaattgagaatagaaaaagactcacagttgcgattttgttgcgttttttcctcattccggaattctacttcactgccaagtatggtgatcaaggatggatgattatgctcatttctattttgggattgactaatggacatctcagtgtttgcattctcatcatatagctccttaataaagattgtggatatgattgtttattttcgtttgcgtttagaatttaatttgcaaatagctttacgtaatactaaacaatttttcgtgtttgtttctctaatataaaactattttaatataaccgaaatgtactgaatcgagaaaatgaaatgaacactagctattgtggtacaagttgaaaagg

SEQ ID NO: 6996 - DNA, 639 bp, Arabidopsis thaliana landsberg
cagcaaaagatgagccgagagccacttaccaacactggagatgcgttgatgcgcttgctgcagctaaaaaacggtttttggcccgtaagaaggcaaagatagaacaatagttttgcaagtcttgtagattggttcaattctcttttgattatcaagcaccctctgttttaaaaactattgtttaaaactaatttcacaaaactagattcacactttcttcgtttccttgatctttttaagtaatttgtttttagagcacacatccatctgtctgtgccctgtggtgttagaaaaggaactaccaactgtaaattgtttgggttgtttcgacaaccgggtttagggtaccaaaccaattaaaccggtctggtatggctcaacggcgcataagggtattattgtcatttactatctttctgtcacctgctcgacggaggaaaagacgccgcctttcttcttctctgcaaacatttcacgagtgactccgaactcagataaatcttaactctcagttccattggtgtttcgaccaacagccacaatcttttttggtgtataagttatactctcagtactcaagaattaaaaaggggaagaaattggtaaactctatcgccgcagaattttcggtttatcctc

SEQ ID NO: 6997 - DNA, 582 bp, Arabidopsis thaliana landsberg
  unsure (1)..(582): unsure at all n locations
tcgaatgcaagatcgtgaagaacgcaaggtaatgtttatctcttagagagcttaagacttgaagcttctgtagcttagggaatcaaaatctatgtttccatgttcttaagaggaatctatgatctgtgtcgggcttggtttatcatatgattgaagtataggaagccataacttagctggattttcttattacccttagaaaccaccaaaatcttgatatcctgcaataccctaacaactaccagcctataacccatggctacatatagttaccaaaaagtgtaaagcttagttactttgttttagttaagtagaggtgaagtttctgagcctctacatgcgtcagttttagtagtttcttatggtgttacattctctgtagttggggcactttaattaggtttcagaatgacttattggattgcttatgtttcatttagttttctttttctaattgcagccaaggtatatacagaatttgatgaaacaggcagaacgtagagagaaagaacatgagatagtttatgagagaaagcttgcgaaagagagggagaaagacgaacatctnttttcggattaaga

SEQ ID NO: 6998 - DNA, 1106 bp, Arabidopsis thaliana landsberg
gtctgcgagtagacctaaaagtttcagacaaatgaataagaaaattgccggaccaatataagagaagcccaactatttcagttcttcagaagcaatctctgatctgttaacttcttgtaaacaagaacagtgatgacagatgacgcattaacatggtgcttctttaaaacgttcacactttttgcaactagtctctactgaaagtgagaagattaataacagtttttttgtggggattatttaaatgatgagaaagtcgtatcatatatgcccgtttgggtcaccaacctcgcgatcactgagcctttgattttaatcacggtagggtgtaaggtcgatttgaagccgctgcttcccttttgtaaccctctgcggaataaaagagtcaagatcttgccattgttaatggtgttcaaggagacagatccctgaaacaaaaatgtgaaccaaagagtaataattcatggatttaaaaggcttaccgcaatcgcaatgagctcttccaggagttcttctagatggcgcaaaggctttgacaatggaaaaacacaagaatattcagaccattgcaagaacgagatggatactttcgtaaacattgagtaggacataaaactcacccattgagttggaccatcaactggagcacttagaggatcatcatgaacctgatcataatcaagttggaacaacgaatccagaactatgtgaccaataatccaatgagcttgataaaatttctaaaacgatgtggtatcaaacaaggtatatactacctccatgaaaattccatcgacgccaactgctacagctgttcttgcaatgcatggtattaactcgcgaaggcctccacttgcaacaccaccaccatccaactacataagaatgtattgttcgtgttcaaactatttggttattgctggcttcaaaataaaataaaaagttactttttaaaaggatcataccttcttgcctgcaggttgttgtagtgaatgggttatatcagcgacctgccaagaaattaaacgtgtatgttaaattgtagattgcagattgaaaaacataaagcagaataagcaatatgaaaaagaaaaaaaaggatggag

SEQ ID NO: 6999 - DNA, 2260 bp, Arabidopsis thaliana landsberg
  unsure (1)..(2260): unsure at all n locations
aattaagaaagctatacaaataaaatgaaaaaaaaagaagaagaaaagaaaaagataggagggaacgtggcacaattccccgtgcgtgtttcttcttccccagacgcaaaacgcagacgcacccagaaactaaaaaaaactgcttcctctctctctctctcttcccatcatcatcgtcgtctctttctcagatcgattttnnnnnnnnnnnnnnnnnnnnnnnnnnnnnncgtttgatttcatcgccggagaggatctttctttgtctacgtatgccctttcgtatacgcgtttcgtgttttgattttccccgaaacctttcgttgttctggtgagaacctggcccatgtttttgaatctaatctactatatcggtttctcctgtggtgatgattgcgaattgacttagaaatcgtaggttgatttcttgttgcttgtgtatttgttagatcatttctctgatgaaattcgtgttccttggtcttgactcggttattcaggtcctgagtttccgagttcggtttatctcctctctcgtaggagcttttcattgaatgattaatctcagatcgttttggctttttttttttaataagaacttcagatctttttggtttcttaagctttatcgattttgaagtgagtcttatattttcattgtgtgcttactgcagggttactgtgtgaggaaggacgtgcaaatttgtttggaagttgtgttaagttaaagcagagtattggagatcgtctgatagagaagagaatagttcttgtgtaaggttatgggttcagtttgttgtgtagctgtgaaagacagaaaggttcctcctagtggtggacctgcgagttcatctgttcatcggaattcagcatgttcgccacaatggagttttcgacgtgataataggaggcgagtggctgatgagattgagggttcaccttattacagtccttatgttgcgagtagaggtattagtatggataagatgtcattaggctctgagagaggaactttatctgaaggaggaacccctcctgatggacatttagggactcctgcttctcagaaatcagcaactccggaaatgagcaccaattccatggttccaccttcttcaggtaattctttttttgagacaatgacactattgggagctaattctgactgtaatctaactctttgctttgagtcgttttaattttttccttgaatcttttcgttccaccaacgtgtataagtaaagcttgctagttttcatgatctcttcacggtgttgagtagatatagttgacatagggatttttaagttgaacgttaatgactatattcctttttgtcaccaagaaccatgttattgtaatgaattagtcttgcgtatcgtattcctgctgtgtcttatgttatgcttttctgtgcggcaggttcatccttggcaagcagtgatctcattgaggtgagatgatcgacttgactctagtgttcctctcgtggaagctttcttttctttccttcggtgtatctttaacccttgttggatcttcattgtttcaggtgaagaacttagttgactcacctggaattgtcccttcagctcaatcgaagcctttgttctccacgccttctcttcccaatccagttagtgatctttcatcggctcacacgcgtttgcttcctcctaaatccacaccatcaagacgggctcggcgttcacctgggcatcagttgtttaggcaggtttctgatagtcaaattttaggactgaaatccccaattaataattactcaatctcagaaggaaggtcgtcctttgtgctttcgacctgtagcaatgacttcgccactggatcccagtacgcatcttctgaaggtggctggtctatgaacactttttctgagctcgtggcatattctcaaagggatagatggtcctttgatagcgaacacttgggttctggcagacggaaactaagtggtggtagcagcagattctcattctccccttccgttgttgatcagcaggtttgtggagcttgttcaaagttgctaaccgagaggtcttctatagccacttttgagctcccaatcgctgctgttcttgcctgtggtcatgtttaccacgcagagtgcttagagaccatgactactgatatagagaagtatgatcctgcttgtcccatatgcacaattggggagaaacgggttgcgaaaataacaaggaaagccctaaaagcggaggcggaagcaaaggcaaagccgtta

SEQ ID NO: 7000 - DNA, 578 bp, Arabidopsis thaliana landsberg
caccatttcttgtccactgagtctctagatctcggactggcatcctttcgctatttttcgtagatcttctggttggtcctggaaatatgagtagaaacataacagattaataatcattacaaacagacttatttagtgattcaagataatgaggcggtataaatgttttagatcagttacggacttacatcactgcggttaattgcaggtttcagtaaatgtgtagcatccacaaagtcacttaatccagcaagcactaaaacaacgcatcaattacaaatgggtcatgagatatagaaatggcatatagtggtattgaaatctgcattaacaggataaaaaagacatgtttaaagaagttcacctaccattttatcaacaacagccaaggcaaattctctcatgtgcttttcatgttgttagtgaggcatttcagaacattagacaaaattccctaaagtagatcattcaagtatttggtaaaaatggcagccattgatattttacaatgtaaaagtattttccaatgcttgatttgatccctaaccttgctcgccttcttgacagttggtcccatg

SEQ ID NO: 7001 - DNA, 2507 bp, Arabidopsis thaliana landsberg
  unsure (1)..(2507): unsure at all n locations
tgcatacattggtgagggctataaaagctggtgttcatggtgtgcttttgcttgatggctcggaagtgacacatttgaatagaccacaagacaagttcttggactgggtctttaatccaataatggtattgaaagatcagattcgagctcttaaacttggagaaagtgaagttaaatacttagagaaagttgttctctttggaaaccatgaacaaaggatggaagcttgggataatcacagtaacccgcctcaagaaaaccttcgaactgctcaaatccaaggaatcagcagaaggtaaagattgaaaaaacttctcttacaaagaaaagttcaatctgtatggcttctttggttctgcctgaaacttgtttgtgttaattaatctcattaagacaatgatggttntatttatcttgaatgttctaggatgatgggaatggtaccgagcgtatcgaagcttccgacttatagaagaaggttcagacaagtggttaaggctctaattacttattattcagagaacgaaggcttaaatcgaaccggttccatgagctctggagatttcattgaagagggctaacctaggactaggagcaattgttgtagtctttctataatttttagatgtgtttttcatttcttgtagtacaaggtgtaaaaaagaatgtacagaagttgctaagtttgggactcaagaaaacagagcatttaaaaaagaaaatgatttcaaagattgtgacaaagaaatataaaacaatagtctaatcttgatacgcgggccaaacaactcagaactatctcatctggcaaagaagaaaattcagacgtagacggataagacgacatcttcaatttcttcgtacacggtggcccttcgtcggcgccggaattcgacatcgggttttgttttaactctgttttgtttgagagagcataacgaaggcagactcaaactctgttttgttttaactctgtttttatttaaagttagggctcaagtaaaaaagcccatgtttgtttaagttttggcccattaatagcccaatatcacaaacggaagcttgtgaaattgtgtgagacgaagacggcgaagcggataacgaaaagctcgccgagaaagcacaaatggcgggcgtgaaatctctgcaacctagactcatatcttcctttctcggcaacaattctattagatcaacgcaaccacttattcatctctttcgcttcgatttaggttcttctttcttttcattatctacttcttccgctactgctactgctagttttattgatgatgaatgttacattagcatattacagaaaagattaaaactttcgaatgcccagtttgctagtttgattcatagataagaacagaaccgaaatcaatgtgggaattttctcaatatgagcaggaagaagacatgtttcgatgcaattatcaagaaccttttctggattaaccgatctcctgtttaatagaaggtagtatcatctttgttagtttcttatagtttagctgctgagtttggatttaaaggacacaattcatgtggactctgtttagaaaagaatgttgtgttgatttacactttcttgttttttttttaaagaaatgaagatgaagttattgatggcaagagaaaacgtctgagaccgggaaatgtatctcctcgtcgtcctgttccgggtcatataacaaaacctccttatgttgattctcttcaagctcccggaatctcaagtggacttgaagttcatgataagaaaggtatagaatgcatgagagcttctggaatacttgcagctagggttcgagattacgctggcactttggttaaggtgaggaaagttttatactttctgtctcattttgaataatgctctattaattcatcataattttattcttttctatttggcagccaggcgtaaccactgatgaaatcgatgaagcagttcacaatatgattattgagaatggagcttatccttcgcctcttggttatggaggtttcccgaaaagtgtttgcacatctgtgaatgaatgcatttgccatggtataccagattcaagaccacttgaggtgcgcttttttaaaaggtgtttgtaggggctaaacagatttttatctctgtcccttatgaatcttaataatgtattgtttcctttggcaggatggggatattatcaacatcgatgtcacagtttatttgaatgtaaacctttcttcttttgtgtatttcctgattctttactagtcatgtaaattgagtttactctatactatagatatttatgtgggatgcagggttatcatggtgatacttcagcaactttcttctgtggaaatgttgacgagaaggctaaaaagctagtcgaggtattatgttgaacctaaacagttccgtttccgtcgtctagaaaaatcatgtttttgttatagtttgatgagctctatactttgaatgtgctctacgtgacgaaggagtctctcgacaagcaata

SEQ ID NO: 7002 - DNA, 816 bp, Arabidopsis thaliana landsberg
gtcaaaaatcaaataagaaatttgcgaaacaagcaacctttcttcttcttctttttcttcttcttcacagcaaatcagccacgtttgagggaagctcctcaacaaccacattgtagaatttctgaatatcaaacagcattctctgatcatcaagagtcacaaagttaatcgccacaccctttctcccgaaccttccacttcttccgatacggtgaaggtaattctctggctgagttgggaggtcaaagtttatgactagagagacttgctgcacatcgataccacgagccaagagatcggttgtgattagaacacgagacgagccagacctgaactctctcatgatgatgtctctggtgttttggtccatgtctccatgagttgctgagactgtgtggtcacggcttctcattttgtctgtgagccagtcgaccttgcgacgagtgttgacaaagatgacactctgagtgatggctagagtctcgtagagatcgcagagagtctcaagcttccagtcttctttctccacgttcacgtagaattgcttgataccttcaagtgtgagctcatcacgtttcaccaagattctcactggtttgctcatgaattttcttgtgatctccaaagcttccggaggcattgtcgcagagaacactccaacctgaatctttggtgggagaagctggaatatgtcatagatctgcaaattcaccagaaaacaacacaaaaccaagtcaatatcagagataaccacagagggtagattcaaactttgaagaagataacaaacctgatccttgaaaccacgggagagca

SEQ ID NO: 7003 - DNA, 1792 bp, Arabidopsis thaliana landsberg
gttgcagaataatcaaagtagaacctgtcgagacaataaaccagcttatgagacaaagacaagacaatttcccctttttgtgagctaaagacaatgcatcaggtaataatatcataatgcttacttatattggtaagctctgagtccaaaagtagggaagctgttaaacccacaattttcacctgcagtaaagaaccattggaagaaaccccaaaagaagctgaaggagaagaatttccccaagactcggacttgtttcctgatacagagagcacaagtcaataagcagagaactcaaaatgtatgttaagctacgaaagcgaaagtctcatacttggctagctttgccccttgaggagtatgaaagctgttgataagatgagcagttgcagtgccacttgggtatggtagtttgaagtctattatcattatctgcaaacacaaattggtaactgtaagattgcatcagctgctcaaagtctctttggtgtttccacaggagaagaagaggcagaatcaaaacctttctaagaggaacaacagagaagaggccaagaaagctgacaacaaagagaaaagctatcatccaacccaatgaaggatccttaacgccacgggcaacgtctcctgattggtctgctattcgatggctcattgcaaataggtaagtcccaaatcctcctattgcagtttaatttaataaacaacccagaaaagagagaaaagaagggtcaggtgaattatgtgtgaaggaagatgacctcaaagattttgtctttttataagaaaaagtcagaaatcaagaaaaaaacaccaatcttgattcaaattttgagttcttttagatgaggttcttgtttctattaccgctaaaggcaattcctgaggaagcaactacacaagtctgaataacggtgttctcttgtcttgtaaagggctgtttcaaaagaccagatttatgaagcatcttagtccatgtcttgacgaagaagaaccccaaaagaccagcagatacattaagcgaaggaatgattcctgttgtgaggttaagcttcatcacaatgaagctaaacaaaatgcttagcgcaaagctaaccacaaaagccctaattgttaactgcttcttccacgaaggaacctctctgctttcgaatattccctccacggattcttcctgttcctctctatcttcttcctcttcttctctttggtatggtgtagcattaatgttcctctttaacctctctatgtcaggacttatcccagtttcttgcaactcatgttcctcaatctgacgatctctgtcaggagttaaacctccttttctcatggtttttttctctttagatctgcgaaataagagagatggtgaacaagaagaagaagagaagtaatattgtaataaggtacaaagaagattttttcagaaagagtcaacgaaaactgaagtctctctcatcagacaatgagatagtttaacactttaatacttttcacttcattgtttctttttttaactcaaggctctttattttttttatcttggtgggattgtctcccctactttattaaaccaaaattaaagcatagtacaaacgcacccgacgtggaaaacatgttccaccggtatcttctaaaaggatatcccgaacatgctcgggaacacactcaaaagaatgaaaacctaaaggtaaagaaaagacatagttcgccaatccgtccgcaaaacgattagcctccctataaacatgaacaatacgaactatccagtcccttaatatgaagccatggc

SEQ ID NO: 7004 - DNA, 1800 bp, Arabidopsis thaliana landsberg
tatgtaagttttgctaataataatgcattacttggcatatgaaatatacaggaggttttgggacatacctctttggcatgagtgaacgaattgcgacccaatcaggagatgtatcccgtggcgtcaaggacccttctttgggttggattatcggtttcctctttgtcgtcagctttcttggctcttctcagttgtccccctgcgaaaggttggtcgcagtttttgtttcctgctttctctcttatgaaccaaaaaggaacaatgagtttatgagatcttgcattgccaatttctgtgtgtttgcagataatggtaatagacttcaaactaacatacccaagtggtactgcaacagctcatcttatcaacagctttcacacccctcaaggcgccaagctagccaagtactaacctttcacttcactttatgcgcttttatgtctttagttctctgcttccttttgactcgatgctgctctctgcatcaggaaacaagtgagggtgttggggaaatttttctctttaagcttcttctggagtttcttccaatggttctttaccggaggagaaaattgtgggttctccaacttcccaacatttggactcaaagcttaccagtacaagtaagcccaataaacaatatatgtaacttgaaattatagagcattggcttgaaccacaatctggcttattgttttgtcagtaatcccaatgctcgttcctttctggtgagagcctgatgtagaaacaggttctactttgatttttcagcaacatatgttggtgttggaatgatatgtccgtatataatcaacatctctgtcctattgggaggaatcctctcttgggggataatgtggcccctcattgaaaccaaaaagggagattggttccctgataatgtcccatccagcagcatgcatggtctccaagcttacaaggtaactaaactctccatagcattcctttgttaattatctctatggatcttcctgcttcaagttaatctctctgtactggaccaacttttttccctctttcaggtgtttatagctgttgctataatcctaggagatggcttatacaacttttgcaaggtgctgagccggactctttcaggattatttgtacagctccgaggccctactacatctatttcaagaacctccttcacacttgaagaagaccctcatgcttccccactaagcccaaagcaatcttatgatgaccaacgtcgtacaagattcttcctcaaagaccaaatccctacttggtttgctgttggaggttatatcacaatagctgcaacatctacagcgatactccctcacatgttccaccagctgagatggtattacattctggtcatctatatctgcgcgcctgtcttagctttctgtaacgcttatggagctggactcacagactggtccttggcttcaacttatggaaagttagccatattcacaattggagcttgggctggctctgagcacggtggtatgctggctggtctagcagcatgtggtgtcatgatgaacatagtctcgacagcttcggatctaacacaagacttcaagacaggctacctcactttatcatctccaaagtcaatgtttgtgagccaagtgattggaacagcaatgggttgtgtggtatctccttgcgtgttctggctattctacaaagcgtttgatgatttaggcctcccaaacactgaataccctgctccatttgctactgtatatcgaagcatggctaaactaggagtggaaggtgtcccatctctaccgagagaat

SEQ ID NO: 7005 - DNA, 1241 bp, Arabidopsis thaliana landsberg
tctttttgtcagtctcagactggacaaagaaacaaaagctgaatgaatcttttatttttaggaaaatattaataatattcactttcctgtaaaaggaagaacaaacaaaagaaatgacattcacaggtcatactactgtgtaacaccatcatcataacttctcactcaatcagaaaattcttattaaaatgaaaaaaaaaaaaaaaaaaaaaaacttgaaagccaaagcttttgtggtgtgtaaaaagatgtctgttttcatttctggtggttacaaaatcttacttttgatttgttgtttttttctgttgttgctgaattttgaaaaagggaaaaagacacaaacgtatgggttcctttatgcaaagtctaaatcaatagattcagcaaaacacagtttctctgaagggttttgtttttgctttctttaatcaagaattgagaattaaagaaaaagaagatacttaatgaagggtttaagaagattaaccagtgatcttatcattaacaccctcataatgggagctttgagttgaataagagaatccaactccaacaggtgtctctagatacaacatattagcctctgcaaccaccaaacaaaattaaaaatcaagacttaataaagttttttgaaatgttgaaaaaagagtcttgaattgtaattaccttggttccagctatgctgattcttgaccaagattggtccttttggtctaaatggtccgttttctgagaatgccccaacgcccaaagatgaacatccaggtcctgcatttatccacattttcacatttaattttttctaatctactataatgtaatttggtagttgagagtgagtgaagatttgaaacgaacctccattgagccagaggacgagaggtttagaggatggattggtttctgcctcggcgaagtagtaaaacagagctctctgtttcttgtcgtcgacagtgacataaccggagtattgctgaaatccgacccggggttgaccgggtaaacgggtgactcgatctgagtgggacagaacactagaggagaccgtgagagagtggaagataattagagcaaaagagattgtgagccattggagaggagacatgatgtcacttctcggtgtttggtttgagaagaagtgaagaggagactagtgatggactttggtctttgttttcccacttgctcctttgctttatatcaagattcacctttttcttatgtaacttttttaattg

SEQ ID NO: 7006 - DNA, 1864 bp, Arabidopsis thaliana landsberg
ataataaatgtctaaggaaaaaattaaattttttctctgtattcagttcaaaaataattgtatatgtctctgtaactacagtttcagtctaatggatttaccgaattgaagcttctttctctatcgaaacctcgtgatcgtcttgatcccgatgtatcgttcattgaaccatcgatctttctcttcttgctttcgtgcttggactcttctttctcatccatgagagacaagaatctttgcaaacgagtggagcgcatggaggaagagtcatgattctgctgttgatctcttgcaatggcatcatcggttggctttttatagagctgacggatgatctgaacaaagtataggaagagagcgaggaggcacgcgacgccgcatatgagaaatagtccccaaaagctttttagatgaagcctgtctgattcgagctccgcgttctctagagtgcatgcgttcttcattagccatttgtcgtggatcctttgcaaatctccgttctctgctagctctaagatcgctgttgatagatctattgctagaggagagtctctaggaaaggcctacgtaaaaccatttatacataagtaacagaatctaaccaaaccaaatggtgacaatatctttatacttacaaatccccagccacttttggtgaactcttgaccaacgattctataagcgcagttgctggagaggaagagttcgacataaggacgttcgtcaacaatcgcggcaacgcctcctttgcttggtccatcttttaatgccttagcataggcttcaggtgttccaagtgggactaggcgtgactctgatatgttgagttcgttcctcaaataactctctgcaaatgaaccaacctggtaccctattggatcatctctttctctaaggctttcaattcccttgatgggtgaagagagctgctgaaccgtcaatatcgatgtcagactagccgtgtagctcgagttgatgattagtacaacgaatagccatatgatcagaaccaaccgtccaagtgtactaactgtgttctctcctgtcaaaaccaagggaaagagtcatatcagtcaaaagccaaacaataaccagtggcacagtaagttttctttcgacatactatgcgcgaaaaacatggtcgagaagctaaacctgcagatatcaaacaaacaataaatggatcagccaaaagataacaagcagttgtctctaagctacttctctgaaatatatagtaaactgaccagagaattgtgacacattgtctcttaggtgggcctctgaattcatcgttagtcctatgttccaagatccaaacaacaatgccaacaaagagaaagcaacaacccgtgacagcccacataagacggttgaaaggtcgaagaaaagcccaggctcctgaattcagttttttaaaaggtgcaactacaactagtcctgatgctgcatatggttgtgtgaaatctacaatctttgtccggtttgttacaatggcaacatcacctactaccccatcaaaattctgcagtaaatccatttttacagtaagtagaaatggtaaaagtaacttctatgaaaaagaatgtaataagcactcacaccagttgttatcatctcaaccatatgcgtgtagctcggattctcctttccatttccataaggaataaacttgacaggaactgcgtacggtaaaagattcactgcagccgtgaagacatcaatgcaaaaccctttgaacatattctcggttccgcgaatttgtgatacaaactccttgtaactaacgcgaagaggcacgccaatcttgagttctttcccattgttagagaaaacccatccgcgaggtttcgtaaacgtttct

SEQ ID NO: 7007 - DNA, 2637 bp, Arabidopsis thaliana landsberg
  unsure (1)..(2637): unsure at all n locations
agacatttttggcatctgatcttagctcatcaagttgtgattttttaaatagtttcctttgcattgaatacaaactaaaactaaagctgaatcaaagtgacttttactatgttaggtagtttggttattaccatgtctcctaaatcttataaagtccaagaaactcgtaaattctggatagaaaactaaaccaaaccccaaataaaactaggagnnnnnnnnnnnnnnnnnnnnnntggatttggcatttaggaaggtgattgatgagtttcttgtcatcattagccttttttaggacagcaattgctcttcacaggacttgctcagatatatgacaagcgtaggctatattgatgagaaggggtctgcaccttaacatgtccaaccacaacctcgttatatctcttattctctgaatccttaaacaagtcttgaaagtctggttcctcactatccagataagcctaagcatggaattttgagtcaaaagaggtcaaatgagaagagatgactcctttccgaaggtaaaagtgatcctgctaatgcatctactgccgacatcaatctttcagcagagtagacaaagatgaggagagaaacctcaaccccaagggtcagtgagtattgtgtctcttctatgtctggtgatttgatattccaagatcacctcctgaaggaagaaattccaatttccacacaatcagatccaagttcctcataagtcttagaagatcccatgatcacgttgagaacaatctttcagcaaaagagctaagccctagaagctcctatttcagtgaaaatagtctgtgaacgtagaaatcttgttgtaatgcaagcctgtggagaatgtctagatttagttggtttgataccaatgacaatgagtgagtgattcgtacacctgaaattcagcgtttgttgaaatttttaaatcgcatataacatgatgaatactttgatatctattttctttactattctcatacatatccgcatatagtaaaaatagcacattgttttacaaaaatatgacatgttatacacttttttctacattaagacattaaccatattcatttccgtttgtttagttttgtcttaagataaagaaagaaaaaaaaaacaaaagtcggggcacgtggcagcatcggcgttaaaaagcatgtggcgtagactcgctcacgttttgtccttctccttcttcttccaccaccgcctcacgcatctctctgtttctgtgattctgtttctgtctttgtggttatggcagagacttctacgcttctcttctctaccttctcctctcacctcacgatctctccttttcgccaatctcatccctccgccgctcgattctcatctcttctttcccgcgttcggccatcacgattcgcggttaaagcatcacattacggtaacttctccgatgacgatgctttcaacttcttcccttggtccgatgcaaacaacggtaatcgtctgtgatctgaatttcaatgactggtttagaaaattcgaactaggttgatgatctctctgtgatctgaattatgtaactaaaccggaaccggtttacttgggacatttttgatcactagatgaaatttggactaaaggatcaatggagtttctgattcagtgttctgttttgttggtacagagattgaatgggttcctgaagaaaggattacacttttcacatctgatggattagttcagattggtggcaatatggttcctcgccgcatcaaatcatctaatgtatgtaaaattcatttcatttcattgagaggtgttgtaactcttttatgtaatcatatatatgttttgtgacagaagaaacatgggagatctagatcactagaaaaacatcaaaagtttcatgaaagtgcttacatggatcctgctcaaggtctatgtcttggagctctctttgacatcgcagcgacaaatgtatgcaacgcttacttttttggtttgttaaacttgaacatacagatgataatgtagtgcgttgtgtataaacaatgtcagggactggatatgggaagaagactatgtatctttggattctgtcgttctgtcgagatgcttagtgatgttgttgaagatactgtcttagaacacggtggagaggtttgtgtttaccatgaaaaatctttctttctctgttaacattgttgggttattgaatcagtacttttgtgtgttttaaagattgttgctacggagacagagagcacaagcggtttacaagagaagctaacgatgacagtggcggttccatatctctggggggttcctccggctgcagaaaggcttcaccttgcggttcgaactggcggaggcatcgtagacaaagtttattggcaatggcatttcttgtgatatattcacaaatttctccaaaatattggctctaactcacaaccacaagtgtttatatatccattcattgtacagaaccattacatttgctataaatccccttaatccttattccatcaattaaataaaaggttggttacctttgattttaagatctagtataaatgtaaatgtgtaatttagagccccatgttaaagtttacaaatttctcccaaacattggctctaacacacaaccgcaagtgt

SEQ ID NO: 7008 - DNA, 276 bp, Arabidopsis thaliana landsberg
ctctacacttatttaaactttctaagataataaaaaaaattaggcaagttggacgtaatataccaaacactaatcatactcacaacttaagagatgtgcccaattagatggacaacaataattattgttttcacaatatcaaatgtttcactaataacccaaaagtttcaacttttcgtacattaccccccaaaactttcaagatacacatgtcacgacctaggggtactgtatcttgtcaaattttactagctcagatcatacaacacgtttatc

SEQ ID NO: 7009 - DNA, 1764 bp, Arabidopsis thaliana landsberg
caaaggccacaaagaagaagaaaaccttcttcaacgtttaaagtctcttctctctctctctcttaacttctcccattttctttgaactaaagatcaatggctcacaaccattctaatgaagacggctctattggaacctccttgcatggagtcacggcaagggagcaagtcttctccttctccgtccaagaagatgtcccttcatctcaagccgtccgaacaaacgatccaacggctaagtttgccctaccagtggactccgaacatagggcaaaagtgttcaaaccactatcattcgctaaaccacatatgagagccttccacttaggatggatctctttcttcacttgcttcatctccaccttcgcagccgcacctctagtccccgtcattcgcgacaatctcgacctgaccaaaaccgacatcggaaatgctggagttgcatcagtttccggcgccattttctcgagactcgctatgggtgctgtatgtgaccttctaggggcacgttatggaaccgccttctcacttatgcttacagctccagcagttttctccatgtcgttcgtagctgacgcgggaagctacttagccgtaaggttcatgatcggtttttgcttagcaacgttcgtatcatgtcagtactggacgagtgttatgttcactggaaagattatcggactcgttaacggatgtgctggagggtggggagatatgggaggaggagtgactcagctactaatgccaatggtcttccacgtcatcaaactcaccggagccactcccttcacggcttggaggttcgccttcttcatccccggcattcttcagatagttatgggtattctcgttctcactctcggccaagatcttcccgatggtaacctcagtactctccaaaagagtggtcaagtttctaaagacaaattctccaaggtaatatattaaacatgatcaatatttttaggacaatactagcaataatgcatgtggttctaattacaattttgttttgtttaataggtcttttggttcgctgtgaaaaactatagaacatggatcttattcatgctctatggattttctatgggagttgaattaacgatcaacaacgttatatctggatacttctacgataggtttaaccttacgcttcacacagctggtattatagcagccagctttggtatggcaaacttctttgcccgtccttttggtggctacgcttcagatgtagctgcacggctcttcggtatgaggggacggttatggatcttgtggatcttacaaactgttggagctctcttttgcatctggcttggtcgtgctagttcactacctatagctatcttagccatgatgcttttttccatgggcacacaagctgcttgtggagctctctttggtgttgctccttttgtttcccgccgttctcttggacttatctcgggattaactggtgctggtggaaattttgggtcgggagttactcaacttcttttcttctcttcctcgaggtttagtacggcggaaggactatcgttgatgggcgttatggctgttgtgtgctctcttccggttgcgtttatacattttccgcagtggggaagcatgttcttgaggccatcacaagatggagagaaatcaaaggaagagcattactatggagcggaatggacagaggaagagaagagcttaggactacacgaaggaagcattaaatttgctgaaaacagccggtcagagagaggccgcaaggcgatg

SEQ ID NO: 7010 - DNA, 1358 bp, Arabidopsis thaliana landsberg
tagccaaaaaacatatattttggaaaaatgttttctactcatgaaaatgattcttgttaagctttctttacatttctgtttttgtaaatccactacttacatttcatttatttgttaccgagtagaccctaaatatataaattacttctatggataaaagactcaatacatggcgatcatttttcaggttccatcttaagcttcataccgccggtataatcgcggcaagctttggtatggcaaacttctttgcccgtcctattggtggttgggcctcagatattgcggctagacgcttcggcatgagaggccgtctctggaccctatggatcatccaaaccttaggcggtttcttttgcctatggctaggccgagccaccacgctcccgaccgcggttgtcttcatgatcctcttctctctcggcgctcaagccgcttgtggagccacctttgctatcatacctttcatctcacgccgctccttagggatcatctctggtcttactggagctggtggaaacttcggctctggtttgacccaactcgtattcttctcgacctcaacgttctccacggaacaagggctgacatggatgggggtgatgattatggcgtgtacattacccgtcactttagtgcacttcccgcaatggggaagcatgtttttgccttccacggaagatgaagtgaagtctacggaggagtattattacatgaaagagtggacagagaccgagaagcgaaagggtatgcatgaagggagtttgaagttcgccgtcaatagtagatcggagcgtggacggcgcgtggcttctgcaccgtctcctccgccggaacacgtttaagagtttttaaatgtgttgtatcagtttctatatatttctccaaatgtgtaattagttgatcgaattgcatgctttaatttcttttaaaggatatgctactcttcatgtaatttcgtaacaattatattgtttttttaaatttcgtatttattttcagtatcacgtcgattaatttgtttgaactataacctcaatgtgacaaagtgtggtctatatcagtctttgtttataatcttcgttttcctagttttaatgtaccataatcaaagttcgaaatagcccagcgagccaaattagatcacttctctagatcatgtggcattttttgttttagtaaaactctatgttcaaaaaatgatacggtctgagtgatatagacttttcagaaagcccatttatcccaattagatttcaatttctttctcagaatttgatcaacatattagcccattatgatttgttttacttttcttaaaacttgttttacttttgtagttttgttgcgcgattcct

SEQ ID NO: 7011 - DNA, 1595 bp, Arabidopsis thaliana landsberg
gacttgttaaactaaaaacagcttttaagaatttcagtttggtgttgtgtaaaaatggttttttttgtttctttctcagaaaacaatatatgtttggtaaatgtttcgttattagtctcttttacttgatgtatatggcaattatggaaacaattaaagttcttttatatgtgtatctacatttgaaaaccacattcgaaaggaatttcagaagaaaaaaacaacaacttcaatttctcaggaagataggatctttacatgttcttctcttcttgtctctggtgcgtttttaaaaacaaaacccaaagcacctctcctagtaatctttcaaaaaaaccaaagataaaattatgaacaattataacagaacacaaaggtattactatcttttgtgtcatgtcctaaaacgcttctttttctttcttctttctctgatttaaggtcagtgccataaactgtattcagtagctgaagaacgttcagggaaatgatgagaagaagcctgaagcaaaagcttaatggtatgactcggtgtagttctgcagacatctacacactcttctacatcttcgtcgcaagtcaacaaaacccattcattgtcttcgtctaagtactttagatcatacctgctcatatcctctatgctaaaccgcttcccaatctcccacaatagatctgttaacctgcgcgaattccgcatccgtaatctgatcttctcttctccgtagctaactttaatcctcagaaagtcatcatcttgagatgataacaagttggtgccttgagggatgttttctaaactggagagagtcaaaattgtctcgtcaagactcgagctttgaagctcgatttcgctgctcgtcttcttcaatgcacctcctacatcagttgaaggaggatcggttgttgcaccgctgtttagttgggtttcactggagcaacattggctagagtttgaactgtgactatacgaggatacaggggactttgcaagctgcactggcggcggaggaggaggcgtggtcttggcttgttgtgatggttcttgtgactgtgagactaaattggggaaatttgcatagaatgagcctatgggaagaggaccagaaacaccttgaaccgaatcaatcactcgttggatcttctgcagagaatgtcccactttttttatctttcttgaaggccatctttgtataccatgctgtctgcatattctcttcaaggtcgttggacaaactgaaaatttccaagacaagaaaagggcaaaaagaagagatcagtctcaggactttccgataaattgaatcgagaagataaaaaaatgctgcttaccaccgatattcttggctgcatctttcaagctcccagcgaaatactgtcgaagaacatccaaagtgatggttttatctgcttttgtacgctttttctcggccatcatactgaaaccaccactagagaaagtgctgctctcattgacattagaatccatggtgtagtcaaaacctctttttaagccaaaaccatcatttggtttgtctcctccatcaaataccagtccaagattctgaggattactagtattatagctccgctgg

SEQ ID NO: 7012 - DNA, 500 bp, Arabidopsis thaliana landsberg
gagttcagatgcgttttctatctttggcgttactatctcttccctctctatcacttcactctcttcttctagttctttgtctgtaacagtccttaagcttctaggcacatgagccataatagttgaaagagcattcaacattttcctctgttcctccagatcatcgcagtctttaggcaaaaagaactctaagacgaaatcagcagagcccgtgtggatgcaccgcaggcgaattgcaaccgcgccatgtaaaccgtacatattagcatggtgagagagagggtactctgatttcttgtagttagatacatcagatgaaaagcaaggtccattggtcaagaaggcttgacctgcaactccttggcctttcaagaggtgatgctcagagcaagcttcatggaactcacgaactgttggatcaccaacgtagcaagcatcatcaatggttgatacgcaatggatgtagttctcatcgttgtgacggcacccgcttttgtttt

SEQ ID NO: 7013 - DNA, 1156 bp, Arabidopsis thaliana landsberg
  unsure (1)..(1156): unsure at all n locations
tttgttcaataatttttggcatttttcacgccgtattttagatagtggaccagtggagcagtatttctgatgcaatttgataattctgatgcccttttgtgaagatcaacgtggtttgttaacattagttgaatctcataaatgtattattagctgatacgacaacaaagcatatacagaacgttgataaacgttagcgcaccgatagacgagattatacttcaaggaaaaatggacagttgtaagaagattatcaaagtttggtacaacaaaagcttgataatgaactcgggaactcgcaatggtcgctctaccaatgaaaatgtatccaaccgagataaaacacgaagaccgaacgaatattttacaggatttaaacaatcaacagaatcaaaagtgaaaacagataaacgaaaaaactttttttggttgcagtttttttgagaaaaggtgtcaatagtcttcaccttcatcttcttcatcgtctccaccttcagcaccaacttcttcgtaatctttctccagtgcggccaagtcttcacgtgcctcagagaattcaccttcctccattccttcaccaacgtaccagtggacaaatgccctcttcgcatacatgagatcaaacttgtggtcgatccgtgagaacacctctgcaactgctgtgttgttactgatcatacatacagctctctgaaccttagcgaggtcaccacctggaacaactgttggaggttggtagttgattccacatttgaacccagttgggcacctgcaaaacaaaacccatgccaaaggagttattatataataacaacatgaaggtagaaacagtagcagctttatccatttctagatcataccagtcaacaaactgaacagtcctctttgtcttgatggtgccaacagcagcattaacatctttgggaacaacatctcctcggtacatcaaacaacaggccatgtactttccgtgtctcgggtcacactttgccatcatgctagctggctcaaaaacggcattggtgatctcagggactgatagctgctcgtggtaagccttggcggctgagatgactggtgcataagatgacagcatgaaatggatacggngatatgggacaagattggtctggaactcagtgatatccacgttgat

SEQ ID NO: 7014 - DNA, 643 bp, Arabidopsis thaliana landsberg
gcaacaagaaaccgagggtctccagcttccttattcgtggccccttgtctctggattcaaccatcagattccattggcttagggagggggagaaacacatggacatctcaacgatcactactcaaccgatcaacatttgggtcttgcagaaattgaaagacagatatctgcgtccctatatgcaatgaatggagctaacagttactatgacaacatgaatgcagaatatgcaattttcgatcctactgatcccatttgggatctcccttcactatcccaactcttctgccctacgtgatttccaatttacttttcctgatcaattcatgtaatgtttggatcaatgatccatgattgtaaagtagaacacatctctacaatgttccaatagacaagattgtacctaaagaaaatggacaatgtaagaagataatgaaggtttcgtacaacaaaagcttgataatgaactcgggatcttccccaatggtcgctctaccaatgaaaatgtatctaaccgagatgaaacacgaaggaggatcgaatattgtacaggattaaaacaaacatgtaatcaaccaagaatcattaatgaaaaccgataaaccgaaaaaacttttttgggtttggcggctttttttgagaa

SEQ ID NO: 7015 - DNA, 528 bp, Arabidopsis thaliana landsberg
gctcgatattaacaagacagccctagggacatgcttcccagcaccagtctcgctaaagaaagcattgaacgcattgtgtgcaacaccaactgtagtatcactgcagcaacgcaaaagactcgtatctcaaaaaatcttccgatccacagaaacagagttcaaagagtgaattaggggttataccttgacgtcattccgtccggctggattccatgttcgagacagtaaagctcccaacacgaatttccgacctggatcccagcttgtccgatgtgaatgcttatgatttctcgcatcttctctcagtagaaaccctaatttcgagcgattcgcttcttcgaccggacggagaattgaggaaatgagagcggggagcgagatcttctttttttcctaatttccatgatttttgtgggaaattgattatttattgaatgagaattgataaatggttggggtccgccaagttgtgacagcctgcctttgggactgggcatagacaaaatacctgagattcgatctggatct

SEQ ID NO: 7016 - DNA, 514 bp, Arabidopsis thaliana landsberg
  unsure (1)..(514): unsure at all n locations
gcacacgttctaccacgcatccgcccacgcatccgtaataaagtggatgttactgacttccacaccaagggtntgtcatacttacgtattcatttcatgctttcctcatatgcccctgtaatatctgctgagaaggcctaccatgagcagctctctgtgcctgaaatcaccaatgctgtatttgagccctcaagcatgatggccaagtgtgacccaaggcacggaaagtacatggcttgctgcttgatgtaccgcggtgatgttgttcctaaggatgtcaacgctgcagttgcaaccatcaagaccaagataactgtccactttgtggactggtgccccactggattcaagtgtggcatcaactatcagccaccctctgttgtccctggaggtgacctgacaaaggtccatcgtgccgtgtgcatgatcagcaacaacaccgacgttgccgaggtgttctcacgcatcgaccacaagtttgaccttatgtacgcccagcgcgcattcattcact

SEQ ID NO: 7017 - DNA, 1299 bp, Arabidopsis thaliana landsberg
ctctgagtacactcactcaactacttatctcctgagtaaacttacttttcttcatgtcttgggacttaacccctctggttagttctcagtaactctgagcaactctagagcttcctgaagcttgcccaccggtacgaccttcgtgaagatatcagcaggattggtttctatagcaatcttcttcactcttactaagccattgtagatcagctctctaatgaagtgatacttgatctctatatgcttcgtccattcatgatggactgtatttttagctaatgcaatggcactctgcgagtcactgtaaatatccactgcttcttgctcaaaaccaagctcattcatgagccctaacaaccaaactgcttccttagacgcatctggtaatgccatatactcagcttctgttgatgacaatgctaccactttctatagactagacctccaactaacaacattacccacctacagtgaataccactcctgaagttgacctcctcccatcttgatctgcaccatgatctaaaacacagtaaccttaaaattatgaaatcccctttgttactgtaacataactttcgcttgagtgaaccctgaatatatctgagaacccactttactccctgccaatgctctttaagtggtttactcataaacctgcaaactagaccaatagagtgtgctaagtttggtcttgtacctatcatggcatacatgagacttcccactacgctttgatatggaacagctctcattgattcatactgactcttagcttcctcatctgtagcagacctcaacttgaaatgtattcccactggcattaaaacaagcttagactgatccatgttaaacgttcccaatagttttgaaagataaccctcctgagagatagaaaggggacatttaagtctgtttccatacccaagatcttctttgcttcacctaagtccttcatttcaaactcagatcctaacagtgctttgagttcacttacatgcttcatattcttggaggctataagaatgtcatctacgtatagcaacatgaaaacataatcaccgtctgcatatttcttaaagtacacacaactgtcgtatgagctcctctcatagttatgagcctccatgaaatcattgaacctggtgttccattgtctgggtgattatttcaagctatacaaagatctttgtaacagacacactttatctggattcttctcattaatgagccttctagctgctccatgaatattgtttcatccaaaaatccatggagaaacgtcgttttgacatccat

SEQ ID NO: 7018 - DNA, 948 bp, Arabidopsis thaliana landsberg
ttaaatttccatgtcaaaatgagttaccatactcagtaaaaatctgatggagacatgtttcactatataggaaatgatctcttgatagtctattccctttctgtgaataccctttagctacaagtctggccttgaacctgggaccctcaactcctgctattccagccttcctcttgaacacccacttacaaccaataggtttctgttgtttgttcctttccaccaatatccaggttttattcttcatgagagattccatctcctcatctgacgctttgatccatttatcttgatcagcatcttctaaagcttcctgaaaacttcctggttctgactttcctccatcttcaatgactaaataagcatacccagcaacttcttctagctcaatctcatctgtaatgtagtcctctaatctggcttgtctaacaatatgttctttccttctatacatgtttcatcatcaatatacacgaagccctcggcaacaaatcatctcataagaaagcgaaactgagaatcaataagaaaacagaacatgaagcaaaacagagaagcaaacaaaactgaatcgagagttgagacacatatggggcaaaccgagtaccccaaaagcaagaaacaaatagccattttacacatgttttcattagtgtaataatttaacataaattagaagtatctaatctctaaccccacacctcacagacacaatgtcgccgttgagacaagagagaacagcacgaccaagtgtgaagtatgaacaatgtattaattcctcactttataacgacgccgtttaagactttttcaagacagcatgccatactaagcattagagttaataatataagaaaaaaatacacgagggtaaggggtaataatccattttaagctgtctaaaattttctaaatgtttataaagtaaaataaaaaaccatatggaat

SEQ ID NO: 7019 - DNA, 1003 bp, Arabidopsis thaliana landsberg
  unsure (1)..(1003): unsure at all n locations
taacttgtttgatttatctactgatgagtttgtttgtgtatagttcaggaacagatagaacaaaaagggactgatctcagggcggagctattgatcaaggtggagaaaacacacctgaacagaatacaaatgagacaacaacagaggcaagaatagggactccaattaatcgttagatagcaatacacaaagcaaaaagacagattgtcagacttgccaaactagaagactatattacagatgaggctgagctagaagaagttgctggatatgcttatgtggtcattgaggacgggggaaagtaagaaccaggaagttttcaggaagctttagaagatgctgatcaagataagtggattaaagcatttgatgaggagatggaatctctcatgaaaaacaaaacctggatattggtggacatgaataaagaacagaaacctattggttgtaaggtgttcaagaggaaagctggaatagtaggagttgagagtcccaggtttaaggcaaggcttgtagccaaaggttattctcagaaagaagggatagattaccaagaaatcttttccccagtagtgaaacatgtctccattagtttttttctaagtatggtaacccattttgacatggagcttcagcagatggatgtaaaaaggcgttttttcatggttttttggatgaaacaatatacatggagcaacctgagggctatgttgatgagaagaatccagaaaaggtgtgtctgctacaaagatctctgtacggcttgaagcagtcaccaaggcaatggaacaccaggttcaaagagttcatagaggctcatgattataagcggagctcatatgaccgttgtgtgtattttaagaagtctgtaggtggtgattatgtgttcctattactatacgtagacgacatcctgatagcctcaaagaacatgaagcangtaagtgatctcaaagagttgttgggatctgaatttgaatgaagggatctcgggaggaaaaga

SEQ ID NO: 7020 - DNA, 1795 bp, Arabidopsis thaliana landsberg
gcacctcgaatctagacctgaaatcttttccagctttcgttaaaatttcgagccctttaatcttttaatcaaaggtaggaagtggagctattcggatacaagccttaaaatgtctgaaaatgcatgcatttgaactctaagtttgctaatacatcaaatgcatgcatttttcagatattttcatcttcagaaaagcaaaggtttggtctttctaatggttgcttcttagacatgttttttttttttttaatggttgaaagtttgctttaggattatagaaagcatccgttgagctaacactaagacaaacaaaaatacatacacacgaagatacacttaactccaacaaaaacatatacacaaaagtaaacacatacacgaaacacaaacataaacaattctctccctaaagggtgaaaagttgtttctttcccagccaaccttcggtgtttgcaacagcgccggctaatactccttcctacttaatcactaggccctcccctccttatggggaagtaaaagcgtctcaaagtgtcttcgggtgcaccggtcactgttgttgcggcgaaccgagaagaaattgaaaagaataccacatctgaggaagacagatggtgtgaaattttcaaaggaacatcaaaaagggcactgctttcacgcttccttctggtgattggtgttaaaacttgaatcgaaaacagggtacacatctgtataataaaaataaaggtcaaaacgttcccatcacaaaactactacgtgaagtgaataccagacttgttgaacaaggaaagacgatacaaaaactcttgttgacttgttgtgatagctttgaagatctcttctcctcgaaaccacattccttcaacacatctataactttctccttcacccccatccatctctatatcatcgtcatccattttgttgtcgtcatcatcttccattcccacgctctgcaccaagatctatggcggagttgtttaaagcagcagcatctccattgttttgcaacgacgctagtacggcctgaagagtcttgtagttcttctgaacaatcgaatccacaagcagaggttcttaaggatatcgatttgtggaatgatattcctcctcggtaatggttcgacggtgctcgattcgaagatttgggtttttctttcagttaaacatatgtgggccttacgctgaggggaaaaaacaacacaacttgtaatcttgtctttgggcctacatgttttttttggctattcctgtacctgtacaatgaattttagttgccataaatttctgcgaaacatgctcttttattctaatttggctcgtttacaattttacggatgattcacattggatatgaatcctttcgtgctccaccaagtgtatgattttacagtatttctttttagtttcaaccttaatacataaagcaaaatacggtcgccaaattctcaggtataaaggactcttgtgtcgtattgagggtaaacaaaaacgcaacatggatttggggaatacaagaaatgcggcgcagcttaagttgaagactggagaagcttcttgtagtcatggaaggttccatggaatggtgcaatcctgccgtctgacacaacccacaactcgtccacgcttcccgatatcagatgctcgtcgtgactcacctgcacaaacaaacaacaacaaagattgcttcttacttgtgtatgaatcaataaacccaacccggtacacagatttatatctaatcttgaaaaccaattaagaggattgagtgagtaccatgcaaataccgcct

SEQ ID NO: 7021 - DNA, 299 bp, Arabidopsis thaliana landsberg
acggacagacacggttacacttttaccgcctgctgctccgcacagagaatgggctgaacaaacggtggatatacccgattgtcctatacaaatgcacattgcataacctcaaaaacaaccaacgactcaatcaattcgttctttgaactcgagggatctactgaatcggcgaatctcagtcagccaagcgaccctcacccgacaactctggatcccgaatcgcctgaacacttaggtgcgaaactatctcctaactagacgcgcttacaactatagccagcgactcaagaaatggatga

SEQ ID NO: 7022 - DNA, 577 bp, Arabidopsis thaliana landsberg
gtattatttaatggtgaaatgcaaacttaatttatttttgaatattattgatttaaagttgtggaaaattatcaatcatacaaaataatatatatgtacaatcaactttaaatatatctacttaatatgtgtgaaaattacaattggattaataacaaactgctataatatgtagtaccgtaatatatgacttatatatatatatatattttatatattccctgagaaatgaatattttgtggtttaaaaaaagttattacaaagacttttacagaactactagaacacaattattatatatgcatatatatgtaccatacacttaaaaaaaattactagaacaaagattgacgatgcttttagaagagtagtcttatccggtaataaaacataaaatctgttattgtccaacttcatatttgatttctcttggttacgattgtcatgccatcaacttctggcttaacttctttttgcaaaccatatctttaaaactgatgtgtccataaatatctctgaaatgtataagacctttggcaaaatcagaattacaaattttcatcgtttacctttgga

SEQ ID NO: 7023 - DNA, 581 bp, Arabidopsis thaliana landsberg
tataatttggtgtgttctgtgaaaaaaaagaatcttgaaggtagcaaagtgattagcatacaaattgtgtatcatctttatttattacatagcatataagtacctttgaaccataatcaagaaaccacaccaaaaacaatcttaacaatcttaatcacaggttatcaatcaaaaaataacgaaaacactttcaatagtttatatcgtattaattatcatcatatcaacaagtgttaatgtcaaaccagtatctaacataacatgcaaagaggcattaggttatgtggaccatgtctaccacacgttacccaacgacaatctatcaatcaagcatattgcgaaggttttcaatctgtgggaccgtctacaacacaaaatttccaaaacctatgtaaatgtttccagacaactatgtggcatagctattgcatttccattcttctaagcttgaagatggcttgcgcattaggctcgcgcgtctagtgctggtgctctatctccgtttctttctacttacctttcgtccaatttctacttgtttcaattatttctctatcaaaggatacatataatgtaaatat

SEQ ID NO: 7024 - DNA, 814 bp, Arabidopsis thaliana landsberg
gatctttctgtggatttggtaggggagatactctctagggttccgctaacatctctgagcgcagtgcgatgtacttgctaatcgtggaacactttatctaagcatcagatttttggtaaagcagaattagcagcgactaagcagtttttggggttcactgtgatggattataaggtttgttccttgagattcgatctccaaggaatccgcaacgacggtgatgactttgttgatcacggtaaatccggtttaaaaataaggaataaagcggttaagaaaaatcacggtaacggacttcaccggaaaactggccgatgccacattgtcgaaagaagtgaacttaaccaagttgaagtatatgacgtctttcactccgacggcttattgctatgcgttaccaaggaccactggaggctcgtggtatggaacccgtatttggggcaaatcagatggatctgagccagaaaacaattcggcttatctaacatgtttagtctgggatacgacaacagtaatcgtaaccacaaaatcatgaagtttcttatgtttatgacaaaacagcatgtccacaatactcagaaatctatgattttaactccagttcatggaggctggttgagatcaatcccgtctggtttttacatagcgaccgcgtgtctttgaagggaaatacttacttttttgctcaagatttactaaaggatgcaaagattgagaattatttactctgttttgatttaacagcagaaagatttggaccgcatcttcctctgccggttcactcttatgatgacgtgactctatcttgtgtcag

SEQ ID NO: 7025 - DNA, 349 bp, Arabidopsis thaliana landsberg
taacggtaactttgattggacaaagtgtcttgtttttttaaagtgtctcatcatgtaaattgttttgaaaaagtgcctgacagggtaactatctcttattgtttctttttctttcttgtgtctatttttgtgttgcgttagagagtattatgagtttcattgcatgtatgggattgctatctaccaatacgttaatacatgttactaagtccagccaatgtaataacaattttcggtgcgttctaacgggcctactttaaccatacgtactagaataaagctcacatgacctaagttacactcgaccaacacagttcgttgtattatcactgcctgcggtcgagtgaca

SEQ ID NO: 7026 - DNA, 1006 bp, Arabidopsis thaliana landsberg
ctttgaccgagtcagtgggcaatactagctccttttttttactgacagcatcttcttggtctggtcggggggggattgtagacttgacagcctcttctcggtcttcggcaccttgagggcgagataggaacaccaaatattggttccaaaaattctgtccataccttcattaccttatctaactgttctgttgaacacatttctccacatgaatacttgatcagctgatacagatcttcgtgaagatcaggatccggataatcaaaactcatattggaagaaatagttcgtctatttccagccgcaagagcaagaagtgcatcatcttcgcctcgcttcttttcagagatctcttttatctctgccagcaatgctgcagtgaaagatagtagtgcataagaacttcataagtagattttttctaggagcattttctcttataatatgtaaggagaaaaaaccttttgtgctcagattctttgaatcctgctgtttgaaataaaaactgcgatgatcaagcgacctgtggtagttctttgtatatatgtcagcccagactttgttaaactcagtacgacaccttgcccattcttcttgcttttgtttcaaacgggttagtattaccggtaaagcaagatatgcattcttctttaacaaatccaacacatcgagcccatggtcactgtataaccgttctatgcatcttaggtttagagctacaagacaaaaacaaaacaatatacatcagttggaagaaaaaaattcagaatatcagctctgctgtaagagaagagctcaatatacctgtgaggtgatcctcgatacagatgggagtatcggttttcaattcattactgttaatctttgccaataactctttaactcgattagtagccgaaatcacagactctaataacatgtttagcttgaacctaaagcacagcaacaaacaaatatttacctaatcaaaactttttcaagaaagcactcaacaaataaacataca

SEQ ID NO: 7027 - DNA, 1729 bp, Arabidopsis thaliana landsberg
cgattacttcttggtgaatggggtgcaagagtcaggtacttttccttctgcactatgtttcttggttcggtttagctagtgcttcacatactcactgataattactctatttcttctagcttgcgaccattggtttggctgcagatgaaaatccactcggcgtggtccttggcggaattgtgtaagtgttcttcacataatgatttgtatcaaactgatacccctttctctactgctgactaatctctctgtttgcacagggcacaaacattgtgtaccacagctgctgtgcttggtggcaagagcttagcatctcaaatatccgaacgaattgtaatgttttttttgatatgccctctctttattgaagcaacgttctaggggggtgagtaagagttttgatcaaatagctcttatgttgttgcaggtggctctttccggtggaatgcttttcattatcttcggcattcagtcgcttcttactccggttgatgcttgatacatctatatggtatcccatcaatgtcttgaaactgcaggtttcttgggtttgaatgcttttttgggcgagatgaaaccgaaacacgtcactcccttacaattgcttagatacatttacattagtgattacagaatcagaaagattcatctgtaacaccatttgacttcaataaagttttgtttatttgcattctgaagttccaaatgaaaacacttaaaactcacaacagatctatgtaggggcaaggttcattgcatatagtaacagtcttgtaccaaatttctgatattatatacattaaaacaacaaatgtttttgactaaatagagagtcctggaaggtgggaaaatctatactgagtttaattagtttcagcagcctccaccatcaggttcaacagaactgagaaggccgttaccgcgcagctgcatacagtgttgctctgcatcagcctgagcacaaacaatcacaactgccaaaccgttgatatgagcttcttgcataatgttaaccgcgttgtctacagtcatgccgggtattaccttcatcaacacctgaaccacatactccctcttgttgaagttgtcattgtgtagtatcaccctgtaaggtggagctatcttctttgatttcctgaatcaaagcaaagtataatcacaaataagcatatgaatttgatcatattgaaaggaaaattcagattgttgtaggcaataataccttaaatcaaactcggattcacgaccaggagtggttttctctataattggtttgtctaagacaccacctcctttacccaatgcagcagatgtagacaaggtcatgagaatgctacgattcacacatggtccttttgagactaaatgtttgtcccctgcacacaccaagttagagagaagagcaaaccaaatcacaactagacaagccacaaagataatctttttagaaagagctaaacatcaccatgcctttcataaaacttatctttatcaaacttcactaaaattatctgtatgtaagaaataggtataaaacatcaagaaccctatagttctgttctgtttttgtttattcaattcactttgcttcagacagaagagtttcagtttcagacaaggtaaaaagctaaaaagcctatttctttctgcacctaatcatctcacaaatcaatatcaacaaagaaaatatgtatgtaaatcaactggcatgagctgattatatcagaaa

SEQ ID NO: 7028 - DNA, 1263 bp, Arabidopsis thaliana landsberg
aatggtaaatctccaccccacagtagtaaggtattgaaccaaaacgacaagatcagagactgcaagtggaaattgcctgtgctaagttttcaaatcatttgttgtccttgtagagagaagatgaaaacaaaaagcagaatagggcgttcctcacgcaatttttctctccaatttttctcaaggtaactaaaacagaatttgctcacaaaagcagtagacttttctgaactaacttcatatttcccctctctacttgcaggctttttcgattaatttctttggagaatggggtgacaagagtcaggtaacttttacttactcgaattgattcaatcttaaatgcttcacatactcaccataactctcttgtctagcttgctacaattggtttagctgcagatgaaaatccatttggggtggtccttggtggagttgtgtaagtttcactgcaaaactgctacaatcattttgtgtctgcatcacaaaagtaatatgtttgaagcgacgttactgactaaatagtatgcctatacagggcacagtttttgtgcaccactgctgctgtaattggaggaaagagcttagcgtctcaaatttccgaaagaatagtaaatatctctcattatccctttctacatttgagattaaacgactcatcaaaagctaaaactcgggtcgtgtaatgttgttgttgcaggtggctctttctggtggaatgcttttcatcatttttggcatccaatcgtatcttacttctgttgaggcttaatgctttcttatggtaatgtttctaaatcttaatctatttctgatgttcatcaatttcttttccaccacagtcttctgtcttacgctatagtttttgttaaaaaaagtgcaggtttgtagggagactgatgaagaggaagaacgttactatccatagtttattagacatttaattttgtttattagacatttacacaagtgattacaaaacaaatctgagagtttgattgtctacagtgaaaacattgaaatgtgctgaagcagccatctgacttcaataaagtttttttggtaatcagttttaatcctcttttgttttttggagtcatttggattttgaaatgttttgcaaggatttgactcaatgagatacaaaatgcggctttgttttattatcgtataacaaaattatttgtaagataagataatagaatgactaggacaagtgtagaggatcttaagtttgatgttaagaagaccacatatgatgccaca

SEQ ID NO: 7029 - DNA, 2426 bp, Arabidopsis thaliana landsberg
ccggaacacctaatgagagaggaccatttgatatatgcagcctccttctcatggcactctgaaaaattgtacatttttagaaagatgaagggaagaaatgattaaaagaaaaggatttcagggctaaaatggaagaaacatacattttctggattacaaaaccgttggtttctgcacaaacccagactatgagacaactgcaatgtaccataaagggccatattttaatcagattcaatgtcttagccagtaacgttagtggcaccgatcataagcctcacagcctaacggaaagagactaatgaatgccaacacaaactctgcaccatagaaatgaagcagaccagttaaaacctgtgtgtatgattaagatacagcaaacagcagactattgaaagtctagcatcggtgggtggaacaaaaagcagtaagatttgcatttcttaaacttccaaatctctcattcacaaaactgtgagaatagttgaagcaattataacctatggcagtatgatccttaagattcttagcaatcaacaaaatctgcaactgaactgagaacgaactagagcttacgaaaacacaagaccattcaatttcgtcggcgtgccatattcattaccagacagtaacctaaaatctacaacttggattaaaattctcgatcacaatcccaacttaactcaacttataacagctacttttaacctaatctcgtctcggggaaacatccaatatcaaaacttacaaagctaaaccagacgaaacccgaattcaaaaatcggagtttacaatcgaaactcggtaaataaccataaacgtattcagggcagaaaatacttacccagtgaatcaaaaatcgagggaacaaacaaaattctagggtttgaagtcttcttcagggagattcttcgaagacaggacgaacaaggggattcacaattagcagacacaagaaacgatgccgtttcgtattgagaaactttccgtgtaaagtggaaagtggtgaacaaattgccacgtgtttcgacacgtcagacttgttgcggctaatagattcgtatataaaattgatgcttgggcatatttatttacaaaaccatcctcataggaacgaatttagaaagaaaaacaaaaaacaagtccatggtgaccaactatgaaatataatgtacatatcttagaaatatcttcttaatggaatgtctatttgcttttgcactgtccatggtgatttcaggaccaactatgatctcacaatctaatcttaaaatagaagccaaaaaaaaaagaggacgagactagtttgtttccgttaccgtttaattagtacgagtatcaatgtatcatcaatcaaccagcattatgctttggactattattcagatccaatgttgcatgtgttttaaatagcaacttatcattaatactatgtatcaccgaatctttctctacgccattctctatcaacaagattaacaacaataataacgagaaaaaaaaaacacatctcctttggttgtcatgaacgaaacctccagaaaaagatgagattttgttcaattgattgaaatttttttcaagaaaaagattagagaataaagatgctacgaagagctgcgagcaatgcgtactcctggtggtgggcaagccacgttcgaaccaaacaatccaaatggcttgaagaaaaccttcaaggttacatatttttacattccatattatcatcatttttcacttcttccacatatttttgataaaatgtttatgtagatatcgaggagaaggtggaatatgcacttaagcttttggaagatgaaggtgattcatttgctaagcgtgcagaaatgtattacaagagaaggcctgaattgatagttttgtagaagaatctttcaaggcttatcgtgctttagcagagcggtatgatcatatctctaaagagcttcaaaacgccaacaccacaattgcatctgtttttcctgaccaagtccctgagtttgccatgaacgaagatgacgacgatgatgctcctgtctcacctagacaccataaaaataagacatcaaataagaatgttccaaaagttcctgatttgcccataaaagaccctgaggctgccaagaagatgttcatgtcaaggaaagctattcaagaacagaatgcctcgtccgttgttaacaagtccgggctgagtaaaaccgaggcggtggaagagattgacaagttgcagaaagagattcttgttttgcaaactgagaaagagtttgtgaagacttcttatgagaatggacttgcaaagtattgggagattgagaaatgtatcatggagaaacaagggaaagtttctagtaagcaagacgagtttgacgaaggtgctgttgttatagaagataaagaagctcagatattgatgactaccacag

SEQ ID NO: 7030 - DNA, 1931 bp, Arabidopsis thaliana landsberg
  unsure (1)..(1931): unsure at all n locations
aggtatgcggaaacggatcctgaatagaggcatgtggaaccttatggacatccctatggttgtcactaaatggactccatntgcagaagaagctcagcccgcgttgaagtcaatccaactttgggttacgttaaatgacgtcccgccatcgatgtttacggataaggggttggagtttctatttagcgcagtgggtaaaccaattaggttgcacccaaaaacagaggcttgttcaagctttgatgaagcataaatgctagtagaagcagatttaaccaaacgaatacatgtttactggagaggaggagggtgaacttgatgttgttgtcaagtattcgtacccttggctgccacctaaatgtagttgttgtgggaaatggggccatttaaaggactcttgtcttgtggaaaaagattcgatctctaaaactcattccaactcaggggcaaagctgaatgtggaaacagagcctgaaattccttgtgcagttgttgtagcagaaggtatcgacacacaggtttttgaacatcatcaatcagaggaaattatcaacaagggcaatgaggatgtgaggaaaggtgatgataaaggctggatcacccctccaaaacatcaacgtagtccgggaacaaaaaaacaagagttaaaatttggtgaagtctctcttttgtcaaatgcctactcgattcttagtgggaaggatgagtcgggggaagagacatcgaaggaagaagttgcaggagatgtggaggggaccaacacgacgtgttttgactcatctcaagagacagattcgattaaaccagtggaagattcaagtcaaccgatagagtttcaacttcgacagtctttaccaagaggttctaaaactgctcacaaggtggtatcagtcccgtcttctcaatcaactaggtttatacctaaagatcagagtaaacggaaacctcataaaaatcattaatgtctgggttcttttggaatgtccgcggtttaaacaaatcaactaaacattccgtcataaagaagtggataaaagaacaggattttcagtttggaagtttcatagaaacgagggtgcgagagcgtaaggctcaagagctgtgtcataatttgttcccggattggtctgtgttaacaaattatgaatatagtagcagagggcgcatatgggtagtgtggactggtaatgtacggcttacccctttctataaaagtgatcaacttataacttgttcggtgaagttggaaaatcaagcggatgagtttttttgttctttcgtttatgcgtcaaactatgtagagaagaggaaagagttatggaatgatcttagggatcatgcaaattctcctatcattggaactaaaccatggatagttgttggagatttaaatgaaattctggatggggaagaacactcgagaaaggaggataacccgatagtaactccaggaatgcgggatttccagatgatggtaaaccattgtagcctatcggatatggtctctcatggtccgttatttacgtggtgtaacaagagagaaaatgatttgatcatgaagaaattagatcgagtattagtaaatgatgcttggaatcagttttttcggcaatcatataatgtgtttgaagctggaggttgctctgatcacttgaggtgtagaataaatctaaatctgaatgctggggaagaagtaaagggtcgacgaccttttaagtttgttaatgctataacccaaatggaggagttctcgccaatggtagccgattattggaaagaaacagaggaaatctacatgtctacttcatcaatgtttcgttttacaaagaagttaaaggctctaaaacctaaaatacgtgctttggctaaagagaggatgggaaatcttgtgaagcaagcaaaagaggcttatgatgcgctctgtggaaagc

SEQ ID NO: 7031 - DNA, 2782 bp, Arabidopsis thaliana landsberg
tattaaaaggttgatccgattctacatctctttttaacgggctattagttatgatcttacccgtttaataatgctaaacctaattgaaagttgacctaataataagaaacttaattattgtcccaacatattcaaaataaatgattctcgagtcagcaaagcatttcatcctactcctacctctcgcctatgaaaattgaaatattttcaacacttaagtttgattttactattaggccaacaactttcggtcatcaccttatgcttttcatgtacggttcaaaaaattcaattttatttttattttcttctattcaaagtaagaaactatacgtctatacgtactattaatggatcgaaggagatacgattaaccttttttctgaaaaagagcaacaaactaattgtacgtgaaaaaagtaaaactaatcatctaaacttatgtattattaaatgcaaagcaccaccttgttttagcatctaaacatatgtattatatatattaaaaatggcacaaccgtgagcaactaaagcaatgattaataaataaatcaagaccaatctcaaatccattgaacttgaattataattaatacaaccccctaatttgttatttgccagttatacatcttcttcattagacaataagacagtccaaccataatacgtatataaattatacttttcagacagctaaaatgttatgtatcttcgaatactttaataattgtatatacgttattgctcatcacaaaaaaaagtctaatttatctaacaaacattatactcaacagaagatgacaatccgaaaaagaaaaaaaaaacgcttttgcttttcccccgaatcaaacaccttcgctcgaataataaaattatcaaacactctttctccttagtggaagccacaacacaatttatttatcaacaacattagacataaactatccaaaacataaatgtcatcaaaatattattcggccatggaccaatatcatctttgtatatctgtaccacatttgctgactcagagtttgttttaagtaacacaaatattataacattgcttttgtaatcatttgtttttaaatttcattcataaaaaaagtactaaaaacaggacattatatggaccaaacccatgtgctctcgacgagatcaaaataggccactcgtgcagagaacatgtcccaccactcccacacgcttctggcctccaaactcacacgtgtaagcaagcataaataaaagatcgtcaccgttggtcaaagtcctcccatcaacaacacatcttaacggttacgacttgacccaatcccctgactctgaaacgttctttgatttttgacccatgaccagaatttttgttgattctttaaaatttctgacttgtcatcaacattaacatctttaatacactactactatagtatatagtataatcttgctacggtgacgcaagcgtgcgtttgactctctcttaaaatcccacctccactcactttctctcttcacctttcacttagcatcatcttcactttcccgcattttctctgcccagattttctctgattcttttgttgttttttttctgatggggagagatgaaacagagacgtacattacagtgccaagtttcttcaaatgtccgatatctcttgacgtgatgagatctccggttagtctctgtaccggcgtgacttatgatcgagccagtatccagagatggctcgatggtggtaacaacacttgtcccgctactatgcaacttctcaaaactaaagattttgttcctaacctcactcttcaacgtcttatcaatatctggtctgattcaatcggccgtcgtcacaacggtgattctccggttctgaatccgccgtctggtagagaagttccgacgaaggaagaagtgaatgtgttgttggagagattgatgagtctggagaatttgatgaagatcgttcgattcgtgaaggattcggattcgaacagagagtttctctcgaagaagatggagttcgtaccaatgctcgttgatattatacgcacgaagaagacgaagatcgagttagttataatggcgattaggattttggattcgattaaagtagatcgtgaacggttatcgaatctgatgttggcgaatgacggcggagattgtttaacggcgattctcttagcgattcaacgcgggaatctggaatcgaagatcgaatcggttcgggttttggattggatctccttcgacgctaaatcaaagcttatgatagcagaacgtgacggagttttaacagagatgatgaaatcgataagtatcactgagtcgtcagatccgagtttgatcgaagcgagtttatcgtttctaatcacaatctccaaatcaaaacgagtgagatcgaaactaatcgctgcaaaagcaatcacgaagatcaaagacattcttctgacggagacgttaacaaacgttgccgtgacggagaagtcgttgaagctgttagagactttatcgtcaaagcgagaagggagattggagatttgtggagacgacaatggtagatgtgtggaaggagtggtgaagaagctcttgaaagtatcgacgacggcgacggaacacgccgtgacgattctgtggtgtttgtgttatgtattcagggaagataagacggtggaagagacggtggagagaagtaacggagttacgaagctgttagtggtgatacagagcaactgttcggcgatggttagacaaatggcgaaagatttgattaaagtgttgaagttt

SEQ ID NO: 7032 - DNA, 576 bp, Arabidopsis thaliana landsberg
gtccgttatttacattgcacgtctctcaagttcacattgatatgccaaccctaactgagaaggataaggaggttagtgttgcttataatttacatatctcagtgactgctttgctctgtctctagtaatattctagcttatctgttcgagtgctttaactattttgttctgttttggttctcttctaggttataagtacatggggagttcagaataagatcgactttctctcattatcttattgtcgacatgcagaagatgttcgccaggtccatattctttttcataatatattttttccaccttagaagtatggctactttgtttgggttctttactcactactaattctgagcttctgatacgcttgaattatcatttttctgccacaacacaggcccgtgagttgcttaacagttgtggtgacctctctcaaacacaaatatttgcgaagattgagaatgaagaggtaagtgaaatgcatttattttgcccttacatgtttcctctgcaacttttctgtgatggtgctgtactgcttgttatatttaccgatgtgtatttgatttagggact

SEQ ID NO: 7033 - DNA, 1594 bp, Arabidopsis thaliana landsberg
aattattcacataaaaatttctacaataaacaaacttgagtgaaattggaccaatcttataaaatttacaactagaatcccttgttattgctttagttaagcatttgagataaatcttagcctaaaataacgacctacctatatttcaattatttggctttaaatagcttggtaaattggacaaagcagaaatcgattcgatcgtctagctcaacgtgggtgctaccttggtttttaagattttagcttttaagataaaataatactattcatactggtgaaatgatttggattttgtctttggataaaatatactactgtattaatcgtttaccaaccacgagacactaaactttcacctaattgatcgacttctatatactcaagataatgacaacgatatgtaatcaatgtctacatttgataaagccaaaatcttttagtttattaagtcaaatattggtactttaacatctcaattaccaataaatattcgaaatgtggtgtcacctaagatctagacaatgacattaatagttttgatgcctagatttggtgaaccactcatccatttttatttgatatttagaccacgaaattgttactcaagttactagacaataatagtacatagcgacaaatcttcacctaccgctagtattttctactaaactattcttgtagtatcttttactacttatacgaagatgacaaaaattagtaactctcaagtaccacatgaaacgtgtgtagatcaaaactactctcaagttcgtctcagtagtcatgtttataggatttttgtacgttttcactagagtccatataattagcattaaaactcatgaagaaaataacataagtaattatgaaagtacatagaaaattaagggaagtaaaactgacctgaccaaaaatggcattaggaaacttgagtcgcacggcgtcttcaagctccttctttagtgtagctgcacctgatagcataattctcaccgagctcaagtcgtatctctccgtctcaggggatttaatgaatgctaaaaccaccggaggagccaccggaacaaccgtgactttgtacctttgaatcagctccatcaccagatttaactcgaacctcggcacgatcagtaacgctgcaccggttctcatcgccgaaagcatcaacgcgtcgagagcgtaaatgtgaaacattgggagaaaacagaggatgacgtcattggccgtgaagttgaggttagggttttctccgtcgactttctgagcgatgcttgtaactaaacccttgtgagtaatcatcactccctttggaagtcccgttgttccggaagagtacggcatcgccaccgtgtcttccggcgatattttaggttttagaagttctgtttcgtccgcttgagtcagttccgtgaaactcacgcaaccatcatcactcgacgaaacaacgccgttgtcaccgtcatcgtctaggcaaacgatcaaaacgccgtcgtttttgaggtttgttagtttatcgactaaacatttcttcgtgatgatcatcttcgcggcggaggctttagcctgtttagcgatctccggctgagtgtag

SEQ ID NO: 7034 - DNA, 1284 bp, Arabidopsis thaliana landsberg
atgaatacatccatgatcggtttaacaagttgtttttaaccacgtaattctggacttaatcttcctgaaacagaaatatatttcagcaatcacatggctgtcctagaaacatcctgatgagctatttaacagtcatgatagcgccagtgcagaaaaaatggttgtcacaagcagtttaatccgtcacagaaagcctacgatatgatacctaccactagcaaaaatttgggcaagtaggataagtttatctaactattttagcaaaaatcatgattagctacaccaatatgcctcaactttttagctacagggagcattcaggaactatttcagatgactaaaatatatcgtctcaggttcaaacaatctactcacatggacagagaggagagtacggacaaatcgtatagcagcgaccactaggtatttttcctttctccgtgtgagatgcaaaaccttttcagtcacattgttttggagaaaactgcatctgcagacaagaagaaattgcacaataaaataaatgccagcatgagaatgaatcagaaaattaccaaactgaggatcataattactttgtcctggatgcatcttgcataatgcaaaagcacaacaattcacatatgttcaacaggacttcaggctttgtgaaaatccttctggcagcaccttcagatgcgttgctcgacttctcaggacatgaggcagtaataacatccactaactcaggtagatgcttctcgtagaaaatatccatgatatttgctctctgctaaaacggaatgcatcaagtacacaatagatataagaatgtctatctaccagattcgaggagacaaatgggtaagggaacacaaaattccagggccttttaaacattctagcagatatcatgatgtacactgaatacaaagtattagtaacgccaacattttaaaataatactcttgaatatagtctcttctacttattcaggaacatgcaagaataacaagaccatgtggaaagtaagagaaagacttggaacttatttttgtcaagcttaactatgcacagattcaaaaacggtacacaaatcaggggaagaataccaccccgttcaaattatcaaaaaataaggtattgaaaggaaacaaggatgcacctgagctccaccagacaatgcatttgcatctagtaaggtacggataatttcttggaattggcagtgcattttatcaccaaagtctttcatgatttccttgaacctattacccaaacaagggagccactttttattttctg

SEQ ID NO: 7035 - DNA, 626 bp, Arabidopsis thaliana landsberg
gaaatcctattaaaaaacggaggagacatatacaaatcttagtagtcacaaaagtcaatttctcataaatattttttttacgttacatatgaaaacattacacaatcacaccattaccatacataggaaaatacaaagctgggaaaagtcaaagcttaagagagttgatacgcaacacaacggtcacgtctttattccaacaacacacacacatctcttagcataaaacacatattttccccaatttttctgccatatatatgattttagaccataataatttcatcaacagttacagtttgacccacagctgcagtttgatccacagctacagttgtcgcactccttgttgtagttcttctcgcaactttaccacacacaaattaatcaaacaaacaaaaaattagtaattaatatgatgagattaaagattaatcaaccacatgcatctgatcagcatatatacaggataggcccgaagtgttttgaatctaaagtaaacaaaactaatcttttgtgtctattcacaaacacatttgtgaacgaagtcataagaagagtttatttgaatttgtacaatgaagctcgaactacatagtctacatatatgcatataaatgtaaaga

SEQ ID NO: 7036 - DNA, 2619 bp, Arabidopsis thaliana landsberg
  unsure (1)..(2619): unsure at all n locations
taaagttcattcaacatattagagattacatgagtacatttcaaacccttagctctcaagttctggtcccaaatctcatggcacaacgtaacctgccacattaggaacatcaaaacattacgatcatcatgttaatacaaaaaaatgtatcaaagatttacaagttttgtaatattttttttgcaaaatacaaacaatcacaacatagctctagcgagaccttcaatttgttacaagattaaaatcataaaagaagaaaacttcttaatatatatatagacttacttccacacttggtaccatgagcgagaggcttcccacaaaaggcagtgacatgaacaaccttatccatgtctatcatttgttgcaccgaagctgtgatacggccacatgcgcaagggatgtctgatctcttaaccactctgcagcacgcttcggacgggtttacctttgggcctggacgctgcacgtagacggcgcattcttnnnnnnnnnnnnnnnnntctccttggcacgttccttgccctggaactggtagtgttcctgagatcacaaggatcattgttagaccaatcaaagcacgagaaccgatcaccattttagtttgaatctagtgagagtatctttgagtttttggttgaagagaagttgtttaggggtcttatatagtggctttggaggttttaagggtttgtgttgcatgcgaggttatcttcttcttttttttcttttttttatgatgagacttaattagtttgatttttccaattggtttcatgtgacaaaagacttgaatttttctaagagattctgaagatgtttcctcgtaactacaactacatggcagccaatgcatgaaacttatatgttatgaaattaatgtactattgatagataagtaaacgacaaacaaatccaaagatgaaccaaagggacaagctattttaattatcaaaacatatcaattttcttcaaaagtatttattgtaccaagtgaatgatatgtttcttactttggattctctctgttattcaagaaaatacattcctttaaatttagtaaaacaaatctacaacttttaatttaactgaagaaagaaaataaagagaggcgcttcgaatctttatcattgctattaacttcatcaaaactgtatataaagatctcgcactctcatgacagaacaaattatttgatataaccaaacagaacaaaacaaattctataaatactacaataatcataatacaaaatcgctattacttgctttgtaatcgcataaaaaatcttggagaatacaaaatcgcgtttcttacttgctttgtaatcgcgctcagcatttgcgtcgagctttacggttttgacgtcgtgagggttctccgttccaccgcagattcaccggaaaatcgaaccgtcgaattggttcccaagaaaatctctttccatgagtccctttacgtgtcaatctccgaagataaagtcaatgaatggcctctgcaagactatttctatcgagatacttgccctaacgcgaaggtaaccgttggtaaagcaatccgagaaatctacaaggccaaactaagtatcgcgccgtctctcatccggctcctctttcacgattgtttcatcgatgtcagatttttcttactttctcttgatgcattgagttttctttggaaattggcttagtcaatcgattcatgtatgttaaatctgactcaaattagcatttcttggaagttactgtagtagaatcttaatttctaggtcttagccactgatatgcagaaataaggggtttgattctttgttattagagtcaaattcagctcttgttggagttgtgttctattattacccaaaaaagccgccaaagcaatttccaaatgtgaacagaacaaacatgagagtacaaaaaaaaaagaattagtggcaaggcgtaaactgagtcctaaaaaagagaagacttggaggtaaggcgtaaactaaaaaggacaaaaattggaggcaaagtgttgcaaggatggacctgtacccatagaagatcactcctagtgtccatgtggagaagctatatgattggtgggctgcctattgatatgtttaccaagaaaattgttggtatgttaggggaaagttatgcaatgatacattgatacctctagtcgccttgcaagtagtctagacgggcgatagaggcttcgtctatatgggagatatatacttggatccaaatctgttccctaaaaaaacaagaaacaatagagactatcttgagatcattgtgttttggctttaactcatcatcattcatcatacgaattccatgatgggactattgacgtgtggaacaagtaacggctgagagaagttgattatttccttttttttttattgatcgataagtttaaaaagatatatacaaatacaaatacaaataggaaaaaccttatcaccgattctcctcctctatatataaagacctaataagcacaaactctttcttcacaatcaaatctcgatctattacaccataaacccctaacgagtctgtctcttttgattcacaactatggtgaaagcttcagcaacaatcatcattcttttgatcttgttct

SEQ ID NO: 7037 - DNA, 1720 bp, Arabidopsis thaliana landsberg
aactcctccggtggtggtgcaatcaccgttaaaccctaacttcgccgtcgttgatgactccacaacgtgactggagagatgagtaccaccgatgttggaagttgttgagtcatcgaagatttctggtcccgagtttatcgtcatgaaatctggctgatgatgatcagagaagaaccctgtaactccttcggcaacggtgcggtgacgtggatcgtagaatggagtgagagaagaagagtcttgggtctctgtttggttatcagagtaacggacaaaggaatcaccgaggaaatcttccagctttggaatctgagtctgagaatgatcgaaaaaagtagataaggttgttgaatccgccattgaagcagcagcagcttctatctcagcttcttctttgaaagcttaaaccaaaacaaacaaacaaaaaagttagcaactttaactaaccaacacacctgaaaatcacactaggagcaaaatcaaaagacgtctctttttttagttcctaaaatttataaaaatctaatctttttgtgctttcttctgtatttttgttttcctttgtggggaaaaagacaaattcagcaaccgagaaaaagaggagaaaggaggctgtaagcaacttgtgttgaagaagataagtcggctaacaacagagcctatatatatacgtcatttggtaaagaagggatttttgaagtttgttgttgttaccatagaagttatcgatgagataaggagtagaagaatcgtcgtaagaagaagagaagtgagactgatcagttgatttcaacatctccattggtgacagagaaaacgttaagcaattcgtcattggaggagccatcaaaaaagattgtaacttttttcctagttgaaaatctgcagaaaatgacaaaagatgggatttttaatgaaagcaacttgttaaataaagcgaagagaagaggaaaaaatggagacacaaaataaaacctgataaaagcagttacagtctctaatctttttttttagctttagaggttcaggttttgcattttgtacgaaagttctaaagagaatgccaaggaagaagaagaggaagatgtacaagcaaagaagctctttttaaagaaatgagacgagagaaaaaaaaaaaaagtaaatgatttttaattttactcaaaaaggataaaattaccaaaatgtaaaaaaaaaaagtagagatatgtgagacagtgagtgagagaagaaagtcgaacggtttcttctgtgtcgaccggcgtgaaaccggaggggtttttcttataaaataacatttttgctttttgtatttgaaagaaatgataatgacaaaaatgatttgttgatttactcatcgtttgattatgagatgtggtaaaacaatttgaatggtaagagactttaagcggtaattgatagggaatcttaatattctttttatgctagtatggactatcaactatggtagatttttttaccattatgggaaataatttaccaatctaatccattaggataatggaattaagattgagtatgaattgaaccgaaccagatatataaactaacacccaaaactcaatctagtcataactttgttttactttcttacattacaaaaatgttatcactaacttggactagaaaaagtaataatttgaacaacgtttttttcttttgattcttgtttttaaacaaaggtgtgtacttatttggg

SEQ ID NO: 7038 - DNA, 1021 bp, Arabidopsis thaliana landsberg
taaagaacttgcctctagatgaaatctcatttactgcttgcagtaaggagtacagagaagcctgtaaaatcatgaatgttagttgaactgagaaatactgtaatcatcaaactaatgtaaaacaagagagtgcagctaaaaggcacatacggacctgatacgaaagagtcttcacccatgcatatttatcagcaccaagccaagtcgaaggaaaccacgaaaatctggacggagtaatcttctctttaacagccaattcaatagatctagcagcatcatgcaaagactggttaagtccattagaattgttttcgtcttgtaatgatccggtgaaactagtcctcatgtcctccaaattactactagatcttggctgaggacttccattaatagctactccatcttcagcagatgccaagaccagcctctgtgatttcttcttgttgctcctttccagaaaaccatatctaacaaacaattggctcctcggattgctcaagcaatttgataagtactccaagtgtacagtccttttgcaggatatgaaagtaacaatggacatccttggaagacatggttttgaagtagagctacaaaaggcgagattcagttattaagcagccactaaaatcaaaagaatgatctaccgtgaacaaagtacaaaattgaatcattcgtctaagtttcccttttctgggtttgacttaaactaagctgcacctactctaatgattgagctaagcgagtgtataaacggaatcgaaaattgaacactggtgaagatggacgacggagaaaaccccaaatttgattaattccactaataaatttctgggaatgatctgaaaattgtagtgagtttgatttaccttgaggatacaagcccaggtcgttgtagtctagctgccatctacatgaagcgggaaaatattctttcacgattttggtttggtgagaaaatggagaagattgaggagaaaatactgaatcatttagtgaagaagacgaagtagcagaagac

SEQ ID NO: 7039 - DNA, 492 bp, Arabidopsis thaliana landsberg
ttttgggccaaatgacggtgagtttgttttttctttttgcttgtaaatgatgaatgttcctgaaatatctatcttttaacattcgagctactaaagattttagatattgtatcaatcgtcaatactgtttagccacatcattgaactctctagggaatgaaatcacaaacctccttctttatccatacacattttctctcatgctatccaatggatcctacaatctcttccattagaactccaccagtaattaaaaattgcactcattgacttagttattaactcttgaggaaatttaaaacaagacatgacataagtaggaagagccaaagcaacttacttgatcattgtctctttcccaatttttgacaaatacttagctgactaaccattaacccgttcattaaatcttcccaaaatagttaacaattttactgtttgagccctttaaaacttttaatatacttaataggtacccattccacattccta

SEQ ID NO: 7040 - DNA, 930 bp, Arabidopsis thaliana landsberg
caaaacaagatcctattaacaagaacaacaacaacatctcacaggtctcgctaagacggtcctaaacaaaaaccaaactgtttaggtttcgtcgtcgacgcgctctcatcaacaaagtcccatacgaaatttaaccaaaactatatatcgagggacgaagcgcgtgacgttagatcggagatctcacctgagatcgccagtgaattagggtttctacttcctttgtccttgttaacgttatatgaaagtttggaattcaagatgactcaatctatctgttcgtcgtcacaagatcaatcttcttctcctcgctctttgatcacaccacgcaaatcggcgacgaagtttcaccgccgcaggttcttattgatacctttttgtgctttgttgcttctgaattatgggaaaaggaatggtattgtttccgttttaagagatttgagttcgatcaagacatcataaaagcttgtttagggatatcactgagaattttggttagcttcagccatttttggaaactggatctttgagttttctaaacctgaaattggaaatttgttgtttagggggaggagtgtatttaacatgctggttcagagggaaatgtcaccaaaggctaagtttgtgccaaggaaacgatggggtaagagtagatggtatactgattcttcatgcggaaccaacaacgagtctatgaaagagacgggacaaagtcttacctcatggtacactttatgtttcttgtctctttatttgcataggaccttgtttaagctcattgtaattggtgattctttatgaagggttgaggcagagtcattgcagcatttatctgcaaaatattgtcctcttggagctcctccaaggtcaactattgctgcggcttttagtactgatggaagaactcttgcttctacacagtgagtgtca

SEQ ID NO: 7041 - DNA, 2308 bp, Arabidopsis thaliana landsberg
  unsure (1)..(2308): unsure at all n locations
atcctcagggtcattttctttgaccttctggatctcaaacacgtgtctcatgaatctaaatatgattctaaacaatattattatcatcttagagatttttagatgaagttatacagagagtaaataggtttaaacatttttctttcttttactctacgatacctaaataacaattttgttttaacagtttttgtcgcttgagtttctgttgatggacaagagcttgctaaacatcttcttaggacggccagggattgcacaaaaagccttaaaccgagacggagttcttcctccgtccccattcatgaacctttcgtctacctcttcatcttcagctagcttgcttcttagtgtacctgatagctttgatttaggtgatttgagacccgagacgctccatcgatcttctggtgcagcgatacttgttgtcgtgctgaaacnggctgcatttggattagaagggtcgatgttgtgtgctgctaggagtgctttgatgttgctaggaagttcagtcgtgttcttttcaccgttgttcgtagctgcagcggctcgtgcttgctcgtaaaagaggacttggaccactactctaagcggaagcatctcgttttgcgctgcgtgcatacatgcttccattgatagtttcttgcagtccaatactctacaaactctcttcctttctgatttattcaaattcttatgagcctacaacaacaatgtcaaaacataaattagataagtcaaagattaatattcatttagtctaaacaaggatgagaattgaaccttgagatatatgtcaatggctctatagagatcatcatgatcaagtcttgaaaattcagggacactttcagctaaagtaacaaactttgagagcggtaaattcacatctctagcaatctgttgaagatatccatccacaagcttagctaccttaagctttgagctatgagaagcagaggatgatcttctactttcttgaaactcaagatcaatattctccgccgaacgagatcttcttcttctatccatcattccctttttacctcttaaaggacttgttggtggactagtctgtccttggaccataaactgttccaagatagtcgcgacaatgtccacatcgtataacaattcggatttgtatgacattggaggtattaacaagtcgctaaccgttgcttcttctagttgaagagctacccttcttgctaattccatcttagaagacgttgatgcgtttaagatattggctgctttcaagagtttaagcaagaaactgcaagaaaccgcgcctttctcagctggaagcaagcttataatggactccaacaacaatctatgcttcgatgaagtatcggtatccgaatctgagtcagaatcctctttctttttgactactttccggtttctttgtaaagtaggaagccatttagaggcgtaaactctaagagcatcaccgataagactagcgggtactttgccaccggatttaatagcaatcatagtcctccaataaagatctatccccaactccgcgatatcttcagcccaccatcctctactcgaagcagcagctctgttagaagacatgtcatcatccctaaccctcctagaatgactatgtgagagagacactttggatggatgagataaaaccttagaggctatggcctcaatgcacctactagtgatagcgagatcttcagaccacaaaggaaacgctttcgtggtctgaagtgtgactatggagtctctccatccattaaggatgcaagaattgaagaaaacttcaagcttgtacaccaagttacctttctcaacctcctctgacatctgaagatactctgctgcacatctcgctgctacgatgttatacgcgctgatagttatcgttattccgtagcagaatttggcacagagctcaaaggcctccacccctcctggaaactctggaagttggatgatggattctggagattcagagcacattctttgaagcctcaagcattttgagagcagtggaaactacagaacaagaagatgaccattcaaataaactctaaaactgaagaaaaaaaaatcatctccaagtacaagaaagggtttagtaccttgtgaagaagatatctgcttcctgacacttcaatagtaaaatcactggaaacttcagaggacacacatctgcaacaagcaaacaatttttagcctttttttaactcaacatttatggccaaagattttactacttttaagaaattactattttaccttaaatcttcagaagtgtagaaagtgtcaggacgag

SEQ ID NO: 7042 - DNA, 2524 bp, Arabidopsis thaliana landsberg
cgaaaccaactgaccagattcatacctctttcactatgttcatggtatcctcaacttgtttacggtgtgcattcacaaggtcttcttcttcctgaaaaatcacatgaaaaaagattcttgtgtcaaggatgatataaaacagaggaggcttttttctgaagaagaatgaaattgctgaataatacctgcagaagcgcatttagattgtcatcagagtttgacttcttcatatcgggccttggcatgtctcgtgacttcatctgaatagtaggtttcgggattctctcctgtgccataccgttataggatggctctagcttcccgtttttcttccacatttgtttatcttgctcataatccgatgcatcaaattcatcgttctcttcagtccacatctcattcacgtcatcatcaaagttagatggagttggaagtgcagaagacaaaggaattttcgtggactcccttaagttcatggtcgaagaagatacatctttcttagaggcgtttccctttgagagactcttaaccctacaatttgcatagtgaatgcaaaattatacgagacgcacacataacgaataaagaaagtaaaagggaacatagtaaaaccaacctgtccgcatatcttagggtgttcagggtgtgctcacatgatccagagcttggagatatgcacgatatcattacagtacgagaatttcccatgaaggagtccctgagaacttcagttaacttactgcctctaaaagggatatgaccttggtcattatccagagctctaatgcattcctttaaggcgagtaagctcttattgatctctgctccttccaatctgtgtcatatgatatagataactcatctaagcaaatagtcggaaacatcattcacaatgaacaattgttgcgataagaaataaagtgttaccttgtctgcttgtcattgtctgttgtatctgcaccacgttcacttccagcaagatcaatgaaagaaagcttgccaacaaagcgagggggctttgactgatttccctctactgatttttttatcgcgagctgtagtatagcatgtgaacgagaggattcttcatttgcaccagtggttccagtacttcttgttgcacttcctctctcaataagctccataatagcatctgtatcagatactctgtactcttgtaaaccaacgatgcacacttgctgcttaccatcctctctcatgcacagcttcctatcaaggtaaaaaacgtttgaatacaactacatactaagtattgcagtcaagatatataaccatataagatgtctttcaacttacttcctctcactgaggagatcatatagctttcctccataaatctcaaagaagctgacaaacaactgaaacccttgatttctgtatgtgtggtgcatcaaccgcaggatgtcccttgaagccttaagaggcaaaggcttcatagtataggttttaccactacctgaaagtcaaatataaaagcgaaaacggttcacttagagaaaatggggaaaaatatagttaaaccagactagtatttgcttctgaaaagtggatgttaattatcgattcaaataatctttacactttatttgaagaggctattacatgcacagtttgggaaagtagagtaggccttaacctcatgccaaatactttagatggatttaaggtgttgctattagcttgttagattttccaggaaagtgatcttgtgtatctatgataccttcgaaataatttacctgtttgcccatatgcaaagcaagtggctttgatgcgctgaaaaattagggggactacaggctccacagtctcacgatatacctacagaaatttgggacataagcggcacaatggttactgattattttgaaaagaaggcttcctccaaagttatagtcagtccagtaacttgcaaacaaaacttacctcatcatttgatacttcctcatctagcacggcatcaaacacaaattcatgcttttcaacataagctgttaagtcgacctgtaataatgtaataatagatcagtcttagtgtctttccacgttgataactcagacgattgggaatgcatgaatccaagccatcagagactgaccttaagtttagtttcatgaactgttaagcaattggcatgggtgtcaacaatatcttcctcgttttttgtcgactcctttttgttaagtggtcgcttacgcacctgttctcaaaccatacggtaaggattagtattcacaatatacaaggctggaaaaccacttaattcaagtagaaaaactcaagtggttagttatagggactaaaggaaagaaaaacatacaacgactttaatctttgcaacagcattcatcctctccttctcagcagccaagttttcagccaacacgcgactacggttaggctgcttgttgtaagcttcaaagtcatcaaagctttgaccttgactaggattgaaaagtgagggaccattcaattggttagagactggaatctgctgaaaag

SEQ ID NO: 7043 - DNA, 1652 bp, Arabidopsis thaliana landsberg
catgtcgactctaactgatcccctcaccaatgcgagcaaaattttttttccgattactgatatttttctcgattcaattctattttctttgaagaccgtttctcttccttgatttccaatcctaatttcttgacttattgatgttgattactttgtaattgtcatcaatactatcgaaatgctacgaagatattttatcatatttcatttatagaaacccccttgtattttaattaggccaagggaaccttcgtacttcacttaagttaactactttatcacgaaaatcatttttaaaacaatgggctgagaaaaatgtttaatgactaaggcccaattataagattttgggccggataatataatcttcaaaactcatcgtattcgaaggatattcttcagaataatgaaatggacttttaacattcattactagaatcttatccgatttttctttacaacaaaaaaatgaaaaaatataggtatgaatatgatccacatcaaattcggatccgaaacgaaagaagttcccgggtcattggagctccgtgttacaaaaaatctccagatttctccatgactccaaggaaaatctcacagttcgctctaaaaaaaaaatatgtttgggaattcaaaaatcccaaagaatcaaagattcatctaataaactctctcctccgtaatcttcgatgggtaaaatctctgtaaatcgatcaccaccggagaagccagagaagtcgtcggagaaggaatcaaacccgaaattcatcggaagcaaatccaaaaacgaaaaatcataatccaccgtcgatgtagcaacagatgcagatgtagaaggagactctggtcggatctcggatccgggtactaaacccgattcttcttctcccttgacaatgtcttggaatgtgttagcgaatctagcagcagcttcctgaatctccggaggcgtcaacgacttttctacggagatcgacggtggattattagggaaattgaaattagcatcgccgccgcggagacaaaattgagcggcgtcgaaagcacgcgccgccttctcgggagtgtcgtaagagcctaaccaaattcgttctctgctgtgtggaagtctgatctccgatacccattttccccatttcctcttcctcactcctttgtactttgactgcatcgccgtgtttctcttcttctcctcttccttcatcgcttgcttcaccattggataaaaactccggttcggttcgattcggtttggttgaattggattctgtttccggttcttaactcgagtttcagttgtgtaggttaattctgttatattctggttgatttcgaatttgcggctgtgtgggatttatatatgaagaagtggaagtggcaagtgaggaagaagatcaacgctgactggcgcgtgaagatgggacacgtggcggattgtattgagtggctaacgcgggaatagtgagactgttctgctttgtcgcgttccttgttttccacgtgatttaattcaactctcttttgtctttttgcattatatctgaatgattatctctatttgtttaagcacgttttgtttaaatactgagattttcgtcgcgacttctgttctagaatttaagactactctctcttttgattttaaaaaatat

SEQ ID NO: 7044 - DNA, 175 bp, Arabidopsis thaliana landsberg
  unsure (1)..(175): unsure at all n locations
acctctcatttcatggatgttctttctttcatccggctcctnnnnnnnnnnnnnnnnnnnnnnnntcaccttttcttctgtaatggctcatttgctctcaatgaggggacttcccttgttctctttgaacctctatgctttgagtcttgctgctttgcagcgatgccctgtaaac

SEQ ID NO: 7045 - DNA, 640 bp, Arabidopsis thaliana landsberg
  unsure (1)..(640): unsure at all n locations
catcctcacgtgcccattcccctgacactttgcggcgttttaagttcaaacgcgctccctttgacctttgaagctgaccttctttcttcttcacgcgccataaaaagtcaaaaactcactcttcactcttttatttcactcgtataaataaatttctgaagcgccaaatacaattatctcaattcaaatcaacactaacactgaagaacagagctcactgaaaaaacttaacagaacaaaattaaaccggaaaacagagaaatcataccgggttggttcaatcgcgtctttgtttggttaaatcgtgatggaaggatcgtcttcttcgatgcagtcaaagtacaaaggagtgaggaagaggaaatggggaaaatgggtttcagagatcagacttcccaacagcagagaacgtatttggttgggctcttacgatactcctgagaaggcggcgcgtgctttcgacgcggctctttattgtctccgtggcaacaacgcatagttcaatttccctgataatcctccggtgatctccggcggacgtaacttgtcgcgatctgagataagagaagctgctgcgaggttcgctaattcngccgaggatgattcacgtggcggagcatgatacgagatactgcaagaa

SEQ ID NO: 7046 - DNA, 1067 bp, Arabidopsis thaliana landsberg
actaaattcttattagcataattaatataattagttgggacgtggggattgaaattgtctagcttttgtagagtaaaaataataatgaaatttgtccaaaagagtgacccacattaaaccaaaaaccttacaaattttcataactttatagtatattaaaagaactcaaaaatcatggaatctatcaaagtccaaatccctaaatgagatcatctctcttcccaaaagccaagtccatacctttcctccatggcttcttcattgctttcccaaactagtaaaatctcctagctttccatttccacaataaacccgtgatccaaaacttgcctttttctcctaaagatcttctctttttaagttttggtttcagatacatacataacaaagtctcttcctttattcatcaatgactacagcaatatcgatgaatccatctttgtttcgagtaatctgtatactccattcgataattgcgcttactagtggaaccttaatgatgttctacacagagaaagcttcaatctttggaccaggaagtgagattgctagcaaactaaaaggatcaacaccacacgatgaactactcatacagatttctcagtcattctctggtttgcttctgtttgcaattggtttggtactgttcatggtttcgtttgtgaaagacaaagagtttcatagcttcttcgctggtgggtccgtgattctgtatgtgttaatggctatgtggagggttttgttcgagtggaaaattgaagatcttgcttatgaatggcctaaacaagctcttggagacattgctttggctatttcttgggttttctttcttgtttattcttggagagagaagtatgattgatgtttttgattttctcttttctttaaaaaaaaaacttgtgggctaagcaaaaccagatgatgtattatgatattgtttttgatcttcagatccgataaaagaggaaatgtgaaaaagctttagattcagacaatatcagaacaacccaaatcatagtttgggattcatgaatatcagaagatcaagtgttttgtctgaaattaat

SEQ ID NO: 7047 - DNA, 927 bp, Arabidopsis thaliana landsberg
tgaacttattacgccttattggaaactgctgtagtttgctcatctccatctttgtttctagattgtagtaccttgccaacatattggaatactggcagaaaaaaaaacaatgtttcacaaatgagaatttcactcaaacagaggatttacacagatttacaaaataagttttaagaatgaaggaacctaagacttgtgatgttttcacagttgaaaaaacaaaccatttgcattgacaattcctttatttcattgacacttgatcatgtgaatctataaaaaccgacgatagtttatgaaaaaaaaaaaaaacatcaatcatacttgtctgtccatgtataaacgaggaagaaaacccatgagacagctaaagcaatatctccaagggcttgcttgggacattcaaaagcaagatcttcattcttccactcaaacataactctccataaagccataaccatatagagaatcacagaaccagctgcaaagaagctatgaaactctctgtctttcacaaacgacaccatgaaaagcaccaatccgatagcaaagagaagcaaaccagagaatgactgagaaatctgaataagctgctcgtcgtgaggtgttgatcctttgagcttgtttgctatatcactaccatgtccaaagatcgaagctttctctgtgtagaacatcatcagagttccacttgtgagtgcgataatcgaatggagtatacagattacgcggaagagatatgaattcatcggacctttgttgattccaatagaaagaatctgacttttttgctgggttttcgaagaatcacctgaaaatatcgagacaaggtcaaaaacagatggaccccaaccaaaaacgcatattattggaagttacaaacaatacagaaagagaaggttaaaacctgaggcagccgtggggttt

SEQ ID NO: 7048 - DNA, 1024 bp, Arabidopsis thaliana landsberg
aacacattttttaatatgtactaaaaaaaaaacttagtgtagatgaaatatttatttgtaattatgggtcaaattattcttgaaattaatagattaatatttttgtagaactcttcaagataaattatggaaggtgaagcaattaattctttggcagaggaaagcattagagcctaattgttacgagagtagcgttgaaatatgtcgaaaatgtaaaaaggatctttgttctttttttgaataaaatgttaaattatatttttcttttaaataactgttttataatttttgtaactgttttattgataggtaaacagggctggaaaaattaaaactaaagagtgttaagatcgataggcgaaccacatttgaagtcccttgtcgtatctcttatctcccttttggtgaataacagataacatgttccgaatgtgtttatcaatccactgaattagtcgagctgctgggtttggggtttccccatgccttcttccatttctttctctccaaattgtatatattgatgcttgtagaacacttcgagccaaaaaacaagagaccctgtcatggcattggcctaaaacgtagctgataatagtttgccaatccgatgtctaactacgctgcaacaagttcttggctaatgcttcccagattccagaagtgtaggcgcacttaaagaaaagatggtctggtgtttccaaattgttgttgcagagaacacatcccactgaagattggagattccaatgttgcatacgttgccctgttgagagtctgttccagattgctcgccaaacacagaaagagtggtttggagtttcatgggcaaaccatactgctttgtgccaagctacctcaggagctgtagttctgatattgtaccatgtatcctttgtagaaaaagttgtgagaaacacatcattttcccctcgccatacgacaacgtcttgagcatctcgccggttttgctgagctaaatggagagcgtattctatttgattcagagttgcagttcggtgtc

SEQ ID NO: 7049 - DNA, 2737 bp, Arabidopsis thaliana landsberg
atccaaaatctccatccagatcgaaacccatatccctgagaaagagacaaagaaacagaactatatgagacactaggccttgttgccaagcaacagaaacttatagtagtaatcatgataaaggaggaaaaatttcacgattgaactacatttatttaggtgcaaacatggtttaagaaacttatcatattggttacactcacaacttgaaggcattcttcttattttttgctggtgagccaaagccaaaatccattggatcatcatctgtcattgacttgaagttccatgtatccttttccatgtctttatctgcagctaaccatggaaattaaaagacaacgaacctttgaatcacccattttaacaatgggaacaacatcttatggtttctatctacgcccaaaaaattaaaagctggccaaaattgagaaatagaacaataagaagataaagaagaataaaagatagtgtgcatgatctttttgcctatagcatcaagttattaaggcagtctacttggggattccttttcttcaatggaattttcgccgcaagcggcttaaagacattccactagcaatgccatgttagttatgaatcatatcacatgaacatttgaaccataccgagcattagatctttgtcctgagtatctgtagaacttcttttagcaggtgcagacatggcaatatctgttcagtatcactcttgaaaaccaactgcaaagaaaaaactaccatcataatcattctagcactcactcacgaaaacacttatctgttatgttatgataatcacaaggcaaccaacaaaaaaatcatcctactacgtcacaaactcaactagcatagacaaatcatcagttccattaacactcttctaaaactatttctaaggcgatatgacgcataacgtacgtaggtatgattatcggagagactgagaaacataacagatcaaacaatgtgattatccgagaaccaatctaaacgaagaagaacagtagcaggaatcaaattatgagattcaacaccaaattataaaaataaccaggcgtttcgtcgattttaagcaaggagacgccactcgagactaactttcagggacaacgagcagcacgaaactaagtttaggagaaagtgcatcttagcattgatcgaacatttcttactcaaatctacgcataaacgtcacctctaacacagaaatgttcatcgattatgatcaaccgatcgtcaatcgtcgaaccttagcaaaccgaagctaaaacaacgcctgacagtgagattctactcaatcgacgagcaacgagggtaaattcttaccgattgaatcgctttgcagttgtatatgtagtaggtgctaacgataaacgttcaacggcaacaagacgacgacaccggagagaaaatcgccgacggaactcgaaggggggagattttgaaattagctgggctccgaatgatttgacttgggcctttatattcttatgtttggtatatatatatagaagctcgcctttttttttggtacggctatttaattttctatatcatttttgatttataaataaaaaaaggaggagatagaggaggaaatctatctccttatcctgaccacagaaacaaacataagccaatggaaacaaaaaaattctaaggtgaaaaaagccaatcagaagctgagtaaactctaagctcacacaaaaatggcgtctcttctgggaacatcttcttctgcaatctgggcttctccttcactctcttctccttcctcaaaaccttcctcctcccccatttgcttcaggccaggtaaaccagtctctccaaaccttaaaatcttactgttttttctcaattcgaaatcatggtgaattgaatttttgtatacaggaaaattgtttggaagcaagttaaatgcaggaatccaaataaggccaaagaagaacaggtctcgttaccatgtttcggttatgaatgtagccactgaaatcaactctactgaacaagtaagcattttttgatgatgttcactgaaagtttcagactttgcttgattttgaagttaggaacatgattgttgtttgttttttatgttatggtggttttgggtttttaggttgtagggaagtttgattcaaagaagagtgcgagaccggtttatccatttgcagctatagtagggcaagatgagatgaagttatgtcttttattgaatgtgattgatccaaagattggtggtgtgatgattatgggagatagaggaactggaaagtctacaactgttagatcattagttgatctgttacctgagattaacgtagttgcaggtgacccgtataactcggatcctatagatcctgagtttatgggtgttgaagtaagagagagagttgagaaaggagagcaagttcctgttattgctactaagattaacatggttgatcttcctttgggtgcaacagaagatagagtttgtggaaccatagatatcgaaaaggctttgacagaaggtgtaaaagcctttgagcctggtttgttggctaaagctaatagagggattctttatgttgatgaagttaatctcttggatgatcatttggttgatgttcttttggattcagctgcttctggttggaatacggttgagagagaagggatttcgatttctcacccggcgaggtttatcttgatcggttcaggaaatccggaagaaggagagcttaggccacagc

SEQ ID NO: 7050 - DNA, 2159 bp, Arabidopsis thaliana landsberg
aactaccttggccccaaaacctatctgtctcttaatcttttcaaagtaatagcaaccataacaataacggcaaaaatatacgtgaattatttttctctttctccttcgtctctccttcataaacccattattaattttttttataatactactattattcatgaatgcattgaagatgtcacagtgagaacaaaaaaaaagttttccaggcatggcttcacgtgatgacatcttcctcgaccaagaacttcgagaaaagatactcagaaagtgaagtgagagagagagaaaatgccggggaattttaatgcttcttcttctcttcttagtgctcactaccagaagatttctttccgccattaaagagcagagtagagcagagctctcactttcttcttcttcttcttcattttttacctttcccttttttgcttcgatcgagatgctttagcataatggggcagatctggaaagtgacttaataatagaaagtgatggctttgaggagattcatgggatgctttttatggaaactcgatttcgaactgtatcaatcatttctgtttcttttatgagctgaggaaaagagccactctttctgatttgattgattcatcattcatcgacaatggcttcttcttcttcttcttcgtcttcgagtacggtgtcgttcgtagtctttgcatttacagtcttcttctgtttggttactccggcgagatctagcgacgtcgaagctttactaagcttgaaatcttcaatcgatccatctaattcgatttcttggagaggaacagatctctgcaactggcaaggtgttagagaatgtatgaatggaagagtctccaagcttgttcttgagtacttgaatctcaccggctcacttaacgagaagagtttgaaccagttggatcaacttagggttcttagtttcaaagctaactctctctccggttcaatccctaacctctccggtttggttaacctcaaatcggtttatcttaacgataacaacttctccggcgacttcccggagtctctcacgtctcttcaccgattgaaaactattttcctctccggaaacagactgtccggtcgaatccctagctcgttgcttcgtctctctcgtctttacacgctcaatgttgaggacaatctcttcactggttcgattcctcctcttaaccagacaagtctcagatacttcaatgtatccaacaataagctctctggtcaaattccactgacacgagctttgaagcagtttgatgagtcatcgtttaccggaaacgtcgctctttgcggcgatcagattgaagtccatgcggaatctcacctgcgccgtctgcgaaaccaacgcctatacctaagtctaagaagagcaaagcgaagctgatcgggattatcgccggaagcgttgccggcggagtactagtccttatcttgctattgacgttgcttatcgtctgctggcgacggaagcggcggaaccaggcaccgagggaagatagaaaaggtaaaggaatagcggaagcagaaggagcaacaactgcagagacagagagagacattgagaggaaagacagaggattctcatgggaaagaggcgaagaaggtgcagtgggaactctggttttccttggaaccagtgattcaggcgagacggtagtgagatacaccatggaagatctgctaaaagcttcggcagagacactgggaagaggaacgttggggagcacgtacaaggctgtgatggagtctgggttcattgtcactgtgaagaggctcaagaacgcaaggtatcctcgcatggaggagttcaagagacatgttgagatccttggacagctcaaacacccaaatctggtgcctctcagagcctattttcaagccaaggaagaacgcttgctcgtctacgattacttccctaatggcagtctctttactcttattcacggtatgtaccttagcttctttcaaggttcctgttttatatagcaatgcagagatttgatgggttgaatcgaaacttggatacattagccagcttcattgtgttttatgtgtgtgtttgtctgtaggaactagggcccctggaactgggaagcctcttcactggactacatgcctaaaaatagctgaggacttggcctcagctc

SEQ ID NO: 7051 - DNA, 399 bp, Arabidopsis thaliana landsberg
tgctccatctttggatgtataagctgcaagtacttggctcgacagaacctagcgaatcttgatttaggcctcgcggttagataatctttcgctttcatcgacctgagttctttaaacctttcaaagaacatttctctatctgcattgctctgtttcttcttcttgtagcttcttgactcgcttgaagttgagaagtacggtagatgaaacgcttcgaacatcacattggagacaaagtgttcgaaagtgaaacacttgtggtcttgcttgtagtagaacacaccgggatggatcgaattagcagctgatgaaatatcccatccagcgagtttcatttgttcgatcattagcttgacgaaacctctggtggacttgactgtgtggtgcagataagtcacg

SEQ ID NO: 7052 - DNA, 1219 bp, Arabidopsis thaliana landsberg
atatactgtcgctttctccagaaatatcatatgaaaaataaatataaggcccattaataatataaggcccatttataagcccaataaatttactaattttcatatcttcatatgacatgccatggaatggaagtacaaaatattctaaaattaaattagctgatcacaattgcctgatcaaattcaaaacacaagttttcttttttttaataactcaaactgatcacacttttcttcaaaagggtctttaagttcatcttcatggtcaggtccttttagttgcggaactcgtccatgaagctcttgtggaaatctgtcagacgattcactatcgctggaatcttgtcttcttgtggaagtattgtgcatctaaagtgccatgttccaggaacctaaaccacaatgaatccaaaacccattattcaagttcgatccttttgtaagacatttaaagttatgaagatttggttatattttacctgtccaaagccagaaccagggactacaactacaccagtagcattgagaaggcgtttgcagtagaacgcatctggtgcagttttttcagcctcagcagcttcgatagccttttgaggaaggttaattcgcgggaagagatacattgctccttcggctctgttacatgtaacaccttctaaactgttgagagcgtcttccaaagtctgcaagttcattttcaagcttgtgacattatatacaaagagactgaaaaatgtcgttagagggtattgtaatcttcgactaacctttgcacgtttagccatggatgagagaattccatctctttctgccatgtatgagtcatatgagtcatcaccaggctgatcaaatacaatattagactttttagtcataatctgttgcaagaacttagcgaaaaccgattagagagaactagggtgttaccttgggtgggctcatgacaaggctagcaagaatttgaccagagatgttagaacaaagattcacagaagccattttgtatatctgttctcttacatcagaagtgaatccagtaacctccatgtaacctcctctttttccacattctccataatatcctatcaacagaagaatattaaaaacaaaaaccccattttttagatgacaagcattggacagtaaaagttgttcttttacctttggagactgattggaacgagactaacgagatatcttttttcttcatagcccaaag

SEQ ID NO: 7053 - DNA, 1105 bp, Arabidopsis thaliana landsberg
aaaagccgtggttacatggaggttactggattcacttctgatgtaagagagcagatatacaaaatggcttttgtgaatttttgttccaacatctctggtcaaattctttctagcctcatcatgagcccacccaaggtataaaacatctatatgactttatcatcacaattgattcagtttccacctgttggcttggacttgcacatcgataattgaccttaatagcttttatgaaatttgatcagcctggtgacgactcctatgaatcatacatagcagagaaggatggaattctctcatctttggcaagacgtgcaaaggttagccatttaatagacaactaggaatattcaagattagaactttctgttcttaaagtgtttgaactctaaccttgcagactcttgaagaggctctgaacaagctagagggagttacatgcaatagagcagaaggagctatgtatctattcccttgccttcaccttccacaaaaggcaattgcagctgctgaggctggaaagacagcaccagacaatttctactgcaaacgccttctaaaagctactggaatagtcgttgtccctggttctggctttagacaggtttgaaaaaaagaaatagctttttctccaaagaaccaaaactaaaacctcacttgctgatattgattatgtctttgttcggtttgatgtaggtacctggaacatggcatttcaggtgcactatacttccccaagaggataagattccagcgattgttgatcgtctaactgcgttccaccagagcttcatggacgagttccgcgactaagcattctgttttcaagatccctctatagattatatgagtaataataagaaaaaggtcccatgccgtttctttttcatccactttgtgtttacagaagctaagatgtgagagcattagttagtgctctctttcttattcactttttgttctgttctctttatagtgaaaaaccataatatgaattgagagagtttcttataaacggttagtccaaacctaatctcatcaagaaaacacaagaaaaaaacattgttgaattccatgttcaaagtttcgatttcacagaatcatt

SEQ ID NO: 7054 - DNA, 3364 bp, Arabidopsis thaliana landsberg
caatctataaaaacaaaatttggacaatttcgcacaaccgatataatctctttaaaaaaatggagaacagcttgtactcttgaagtcaacgattccggttaagagcattctatctttgatacagctcgaccggaattatttaatcaaccggtcaaaaccagatatttctaatggattggtgggcttcgaaggaacaatctaacagccaataaaaattcaagatcaatttaaaagcccgccattggaaaataacatgattagtcataaaaagcctatctcggataaaagatcacaagtctctgataacttgaacaaaaaaaaaaaaactcggtcccaaaatctttgaaatttgcaaagataaagaaggaagctttcatcaattcattctcctgacaagctcgttgatgaaattctccctgtttccagcatcaccaccttcgacgtagtggtttctcttcttcttaaggccaccgagtggtgccttcaattggaatggccacaggaagttgttggcttccttgaagtgaggtccaacagtcatgatctcgtggatgagatcctcaacgcagatgatcccatgctttccgagagcctgatccacaatggagttgtcagtaagtgctatcctctggtggttcagctttccataacctcttttgtagatcagttccttaacgctcttcaagtttgggtatctgcaccagatatatcattcggtttagagcagcatatagtttagtttacataatcctattgaaagagagagaatcagattgcatacccgtaagtcacgtatggttcaactcggcgcagcatgtttactgttgccttgttcaccttaagaaacacaccattgaagatctgcacaaatgtatacgaaagtaaacttcttgacaacgcaatagtcttctactctcttttaaaaatgatgaacaggcaactatcacatattagtttgaacatataacaaatattaatcaataatcatatgttaggctaatatagctggatgaaaataacaaactgtgaaacctacctgtctcaaacgcaggagctgcagaatcttcttggtttttgggtcaatggcattgatactgcaaatgacaaacaatcacgtaaataaaaaacagaatctatatgcaacatcttatgtaacacacaaataataggcacatacccacggatacgaatgataaagagcaacttagcctcagggtcaacgtagaaacctcctttcaacttagcctcccgcttcaatcggatcaactcgttatcctaaacaagcatgcaaataatatatcatgattcattacaacaaccatgaacagaacagtcatcttagtcagcaaagatgaacaaaagagtgttgctttattaccttctcagcgtattctttggcatactgctcagctctcttgaagataagcttgcgggcctcaacactcttcttcttagcagctacagcttcatctttcttggccaatgcccattcctcttgcctcttgatcttctttagcacagactctggaaccactaccttggattcagccatttctcctacatacatagcatgccataaacaaaccaaaaataagctatactaatcaaataaaaaagacacctttgagaaattgaacagattgttaatcacagagaagcaaggcaggaacatcaacgacaatgtttaaaaccaaacagcaaaatgaaaaggagcaattatagaagatcggaaaactcaatgcaacgattctaaatctaaaatcaaagtgaatttctctacaatagaactagaacaactgggtttattgatctcacaaacatcagaacaaacaaattataatgaatcaaaagaaaacttacgattaaaaactaaactaaacgaagaagatcaaagagagaagcttacttgagatgaagaggaaatctcgtttgagagagaggaagagatagtgtgcggcgtagaaggaggacaaaacaaacaaagtcgaaactgggtttagggtttatttcgtaaccctaattttttagtcagcagtcatttttccaaagtgggcctatttatttaacttaaattgggcttggttttaaatgacatatacatactcaggccttgtccatctacatctacatgtcatcgattttgcccttctgaatactttcttccaccaatactgtttttcttttcataaaccaacaaattaaatctatactcttccaaatcttctagatcgaatataagtattgatatgtgacattgtgatcattcaaaacaatagagttttaaagcttcgtatgtcttattgtcttagactaacatcaaaagttaggtttatatttagtgctattactctagagatacaaaaaaaaatgtcaatatggtcttctagaagaaaagaaagagaaaaactttagtaaccgtaaagaagaagactaaagccaagaggataagtgcttgccagtttcggcccacttgtttcctcccccataaagatgacaaactccccaaaagggaaaacaaatatcaatgcctatcttctagaacccttatctctatttttcttcttttcatttagtaatagttgtattatatctttggtttcattttcaggaataattaattagaaaccaatccacttcatcgtagtcgtaaatcaatcaaccttcgttgaaaagaaaaaaaaaacaacaacttcagtttcgtgatgatttcaaattcgtcttgcgatagtcgtgaaattcatcaatagaatctgttaacagtactacatcatccattgatccataatccatttaagggaaataaaacaaaactaaatgacattatagttgcttttttcttgtcgagcaaaaagtttcaaaagatgtatccattgtttctttgactaacgcgacctattgatagccaatattaccatttaggaatgaaaatgaatcgaaagtactcgtttatatgcgaaactactactactattcaaagaaactctacgttactttttcttgacacacgacaataattggtgatgaataaagctagaaaagctgatagagagaaaatacataagtagagagtaatcaaagaaaggacaattgacgaaacaagaacagacaatgtggggaaaatgggatagagtgtaatggaccagccccctattaatgttcgaccccattcttattattttccttcttatccccgactttcatttttcttcttgtctatctatgttcatatcgtgcgctaacacccaaattaatcttcttcccttgcaacatgttttaaataacggcccaaatagtaaacgtagaaaaataaataaccccaaagtaaaacaacagaaagcatcattaattatccggtggagacgat

SEQ ID NO: 7055 - DNA, 304 bp, Arabidopsis thaliana landsberg
atacacacacctgctctttaaactgttcttcctatacctctatactggaaagagcaacaacttcaagctaaggttcaattaaagaaacagccatgaccttccccaaatttggaaatccttcttgctaataagcctagctgtaacataacatacattgaaaaagtcacttagaggagtttccttgtgtgctataggctttggaacagaatcccatatctgccacaatgaagaacaaaacaaaacggtgatcagcttatcaacttggaattagctgaaagtcactcactcctcttttaccttctga

SEQ ID NO: 7056 - DNA, 1869 bp, Arabidopsis thaliana landsberg
gttctgctgtaaaatttctacactcttcctgagatgatcaatttcatgaaggagattcatggtgtagaacaaaccactgtgacaaaggttttcaggaaccttttaaaaggtagaaaagctgaagcatatctcagagaatctcagaaaagaatgaaggcaagaacaacaacaacaacttgaacagaggaggatgaggcttaggttgctctaatttgaaattctttggtttggtttactggttagtaagaaatagacttgtattgtcacatttttttatcatattttgaggtccattacttagggtgtatggaccagactaggacaaatgaataggagatgcaaaagggtaataatggagaagtcagtcttgttggtctattcttgtccgagtccatgatttttagagggagaactagaaggaggaactaaaagttgtttaggttaatggtttaggtgctaagtgttggctctgtgtgttacttatgactcgtgggatctaatgtcttgtgaaaaatcacttgtgagataaaatggacatagtctagagaagaaggtatataagaagaaaagcagtcaacttaactacaaaatcacaacggctcacaactgttttatgttgtagaagttggttgcttcttagagtggttcattcttcattaccagctaaccgcaaataaccgtgacttgaagtctttcgaattacacttctttcactcgtggttcaaacttcttctgttcaagttgttatgccttctccagccattacttgatttcaaaatggtgttgatggtctcattcttgaaggcttggatgtttctcaactttttgctcttgaacaagagccaagaggtgatgggactccgtagtacaaacacaatttaagaacgtttgagtaagagttttgattcacattgaaaaaaaaacttagaagaaaaaatgaaccaaactaaaataatcaaattaatttagtttattaatcaagaattaaatcaagttttaataataacctgaattgtagattttttttcttttcttaatagtcgaatactgaacactgtagtattaaatgaaaactcaaagcccaatataattcaaagcccatcgaatcaaatatctggccactccacttattcttaacttgaaacttaaaagccgaaatcgtaaagagagaatctggtcggaataatccactcgaatcttaaaacgacgtcggtttaaccaaatgcgagtcaacggatgctgctgcaatgcgtcgtgttgtgttcgtcactcgccgtcgtcgtcatctccgtcgcttcgacctctcccctcgttggtgttcaccctttaggttacttcttcgatgactcttatctttattatatcgacaaatctgaaaaatgttcttgttctctgattcttacttacttctttgttgtgaggcagatgaaaagtatttcgactcagatgttatcaaatgcaaagatggctccaaatctttcacaagagatcgtctcaacgacaacttctgcgattgtctcgacggcaccgatgagcctggtacacacttttttctcaatttagaatccagagagctgagatgacatgagactttaaattctttccagataaaaagatttaggactagaattgatcgaatcttattctctttcacaatttcaattatgaaaaatgtgttcttgtgagtaagtttctgaatttctgattttgcattacaggaacttcggcatgtccaaatggcaaattttactgtaggaacattggaagttctccaaagttcgtttactcttctcgtgtgaatgatcgaatctgtggtcagtagttactaatgttctgaattcgactaaatgattctcgtttaagctgtct

SEQ ID NO: 7057 - DNA, 2547 bp, Arabidopsis thaliana landsberg
cattacaaacatatactatatatcatacccagacatgtcatcaattaatcatagactctaactgtctctacataacacattatacactatgtgcataatggatgatgttttgaggtttgcacattatctaagaagtcaaatcaaatctctattttatactccaagatacatttattacatgtgttataaaattataatgagtaaaatatatgaataaattgggttaactcttaaacatactataatttcacctaaaatttagtaagacctccttaaaaattatattttaacgtcatttaattgaaacaaaaaaggtgtaaaacatcatttatattaaaatagaaggagtatattaaaacaataaaaaagtgtaaatcaatatagatttgatactgattaaccactacaactaaaaatataagattacatatatagtgctcatatcacatatatataaaacttagtttgtattatgccagttctttagcatagtgaaagaatttttctacgtccatcataaaattctagattcgacaatagtataggttcgtggaagaaaaatattcttttttaaataaacgtttcctcaattatttctcgcataaaatccttactattatttaaaaataattattcagttaaaatagtttatagagtttcatcatataataagatgtgtagtttttcttcgtttacttatttaattatagttctctaaaaacctttaaaaatattgtattcatatatattcagtgatttatatagatcacacatcatatgcatggatattatttggcctttctttttttgcttttggtctttctattttctttttctcttgttgcaacattaaataaatgcttcttgcaagtttgacccccaaaaaaaaaaatgaagactcctacgaagttttaagaaaatgtatgtatttagcggaatcacattttcaaaacgtagaaaactgcataacattcaaggctatataacacacaatacaatgaagtatttttagcaattgctttgtttgagcaaaatggagacattattgttgtgagaaagtgtttcaaccatgtcaaacagctcttcttcaaaccatggtgcatcaccattaaagtagatgcctcccaaccaaacaaccatcctctctagcgtctttgcgtttctcagcaccaaatccataaacgaagccacgagtttcgacgttgcattattaaaacccaacatcttgtagatctcctttgaggtaggaaacacctcacatgttgatctccaacattgatccggatataaaccttttaaaggatgcatttcctgtagaacataaaaagttattctatagagaataagctcatctccaatgtatttctttatttttttactctaagctagcgtactctaaaatatagtagagccttatttttttttcaatgtaccactctatttatttttactttttttaaagcgcaaaaaatagagttactctaaatgtaaagcaaacatatattttactctagtttagaatgaagttgtaaagaattttgctatgtaatatagtttagggaaaaaatagagtagacttggagatatacccttgataaacgaaagtgaaagacatgtggttcatggaatgttcctagtccgttattagtatacatggtcttatatataaatcgacaaggaaagaaaagaggtaaaaataccattatgtcgtggcttagctgcaatgtgtgtaatgttagcttctttaatccaggtgaattctgtagtaaccttgatataccagggattacagatcgaacgaactccgtttcaacagtcaaagtttcgaccttgagcgttgggaaaggaacaccgcggagctcggcgagagatagaatctgaaaaaacgagatgaaacccacttagcaagttcatgtttccaaggcgttcttaaccatcaaacaaacattaattaaccaaataattaatagttctacagtttttaggctttagagtatacctgaagaatggtttccccaacagtaagcctctttacgttgtgaaatttttatagcatctccagcgccatggtttgataacgatcagcagtcaagggagagagtaggctactgataatgttaaggttagcttcgctcaaagaggagacatccactatagtagatggtgtactagagtatgtcactctcaaataatagatgtgtggcgcaacaatcacaattggtcatgtgcgtcgatattgcctatttatatccaatctcctcagattcggtgatttactcagatcaagacgctcaagtaatctgcatgtatcgagtgtcaagctttcgagaattggacagccagagagaatattatgcatggattcgtctggaatttgacaaaaacgcagtgttaagttccttagggatttccaagacactgtgcatgtgggaatcatatcaaaaaagtccaacgtcacgtcgagttgctttaaggaggaactgatatagaagatatctggaaatctgtaagtcttggtgtatgtgaaatccctaacgaacacagaca

SEQ ID NO: 7058 - DNA, 946 bp, Arabidopsis thaliana landsberg
ctcccaacgaaagtgaaagacatgtggttcatggaatgttcctattgctttattagtatgcatggtcttatatatagggggatcgacaaggaaataaaagaggtaaaaataccattatgtcgtggcttagctgcaatgtgtgtaatgttagcttctttaatccaggtgaattctgtagtaaccttgatataccagggattacagatcgaacgaactccgttttaacagtcaaagtttggaccttgagcgttgggaaaggaacaccgcggagctcggcgagagatagaatctgacaaaacgagatgaaattaaaaggtcatgtttgctagaaacccacttagcaagttggcgttctaaaccatcaaacaaacattattaaccaaataatagttctacaggttttagactttagagtatacctgaagaagggtttccccaacagtaagcctcttaacgttgtgaaattttgatagcatctccagcgccatggtttgataaccatcagcagtcaagggagagagtaggctactgataatggtaaggttagcttcgctcaaagaggagacatccactatagtagatggtgtgctagagtatgtcagtctcaaataatagatgtgtggcgcaacaatcgcaactggtcctgtgcggcgatattgccgaattatatccattctcctaatgttcggtgagttactcaggtctagacgctcaagtaatccgcatgtctccagtgtcaggccatcgagaattggacaggcagacagagtattaagaatggaatcgtctggaattcgcctaatacgcagtgtgtaaggctccagagggagctcacagacactgagcaagaggtgatcgttccaggatagtcctgcatcacgtagaggatcgatacggaggaactgtgacagcagaaacctggtaaccagaatgtcttggagcatgg

SEQ ID NO: 7059 - DNA, 486 bp, Arabidopsis thaliana landsberg
catggtgcatcaccattaaagtagatgcctcccaaccaaacaaccattctctctagcgtctttgcgtttctcagcaccaaatccataaacgaagccacgagtttcgacgttgcatcattacaacccaacatcttgtagatctcctttaaggtaggaaacacctcacatgttgatctccaacattgatccggatataaaccttttaaatgatgcatttcctgtagaacataaaaaattatcctatagagaataagctcatctccaatatatttttcaattagagtaactcaaaaatatagtagagtttttttcttttttcttcaatgtaccactctatttttttttatttttttttttaaagtgcaaaaaatagagttactctaaatgtaaagcaaacatatattttactctattttagaatggagttgtaaagaattttgctatgtaataaagtttagggaaaaagtagagtagacttggagatat

SEQ ID NO: 7060 - DNA, 2240 bp, Arabidopsis thaliana landsberg
aacaccatttagtatattaaaataaaagtatattgtaaataatatttaattagatgcttaatatgttacctatcttgaggatttgagtaatttagataaagtctggtgaaaagggttgggtccggatctgggatatagaattctgccgcggttcggtccggttgtccgatctcccacagtgttgggccgtttctcggtggcacgtacactatgtgtccaacgtctatctccctacctatcggccaaaccaaacacatacataattatatgcaccacgatacttaggcctagtaatgggccttattacatcttcagctgtggcacataacaattataacccttacataaaaacatatggaccaaataatggccattaatgcgtctgtagttggatcaacgggacacggaacacacatttcatgttgtgtaatgtttatactaaaagatgttatataaataaaagaaacgtacctggtgtgatggtaatgtcacgcacatatttatagtcaccgataaatccagaaacccatgcgtagagactatacgtccctggtctcacattcgctattgtgaacattcccattttgtctgctcgtgtccaaaattgatatccctttgtccagattttattgtaaaagattattaaaagccgttagtttagtccatttggcaaaaaagatcgttacttcatccgcatagtcaattcatagatcaatctttaaatcggagcaaatgagtactttcgatcacctaaacggacgatatatattgtgtagcatgaaagtaacagtaaatttgttttacaaatctcatgacaaaaatcactctcttttgcatgtacctgtcatggcaatgtaatggtatatatttacaaatttcaaatatagtagtagtgtactaccttgttttcggtttgccaagaaccagcttcaccaggtaatgctaatcccacaaaagcaaattgcccgaataagtacgtcacgtttttgatgtatctgcaacattttgtaataactcacatatggattgaaaaacattattttgacgatatacaattgcatgtaattgtaagtaaacctttctaagaaaatcatagatttatttacctgtctatgacaaataattgacccttgactgttcctctttggtgatgaagagggtaatctacagatttcacgaaatcataaggccagctttggacctcggaaaccatctacatatatatatatatatatatatagtttctaaaacattttagttttacgtaaacaataatgatgatgatattaaagcgaatgaaagaatggggtcattgataggtaaaagacctgtcgtttagcatcggtccagagaagattacgagaagaagcagaattgagataaacaaagacaggaccaaacaccttcttccacggttccttgcttccataatttgtgttcatatcttttcccgcgtaatgtacacttgtaaacatctaaaacacacaatattcttagaattgaataagagataaacagaaatacacaatgtagactcaataaaatcaatagtacatcgaatcaatcatgccacacccacaatcatccaaaccatatatcacatttctgttattttaaatttttagtaacattttacaattaaaactagaaattggttttttttttttttttttgaaaaagaatgtatgtactcaccgaaagagtggtggggcccacatgagaagtgagatcttgtttgatcggcccacatgcatggaactcgtcgctgggcgtgatcatccagaaaccgatacgttggtccgacgatatccaaccgtgtactttgttgtctttgttttccaccgagtacatgtacttatcgtctacctgcgtcagtaaattattttttaccctttttaacttcaacggtattattactttttttttccagaaatagaacttttcttaaatggacccctaaatgggcttaaagaggaatccacagtcgagtgattttgatttgactttgataattatgatgaatttttttattttatttttccaagaattatgatgaaattttgagtgtctttttttggtagtccggtttcatatgaagtataaccggtgtaaaacaaaactcatatgattcgtatacgaatgttttcagcggtggatcaatattttattcgatatgaataaaattatatgttaaacctgcccttaagcatatgaatttgtggatttatcaaatgaacagc

SEQ ID NO: 7061 - DNA, 2450 bp, Arabidopsis thaliana landsberg
cgtatgtgaccataaagaattgtattaaattggtctttgaacgaatttattcttcggctaaaagaggttatcggttgtgaagtggacctgcaatttcatttgtctgttaataagaatatatgaacgagcacttaggtgacctctatttcatataattcttaattacatactacatactggtaaatcatatgaaatatggacttttaaaacgaaacaaaaatcgtgtaacccaattagtgtatatagtctctgttgtgttgagactctgtatacactaataaaccctgtttacttcttttttccatatgaattaagcttcaaaagaacagaattcaagagaatatcgttattaagagcaaaagtccaaaacaattaaaaggcagagtgcttgtggagacgtaaagggaatgcaaactaagaagaagaaaagtcattatcgttagaggaccaaagacttaaacattattggattaaggtgacatcatagtgcatagtgcgttgtaccatcgcgcaaactcgtgatattcgatcacggattaaagccatgatctatcattttctcttctttccccccttaaatctcgttgttttttcaaatcatagtgactgttgcttttcccatcgaaatgaaagtaatctaacaaaatctactgttagatcatgtttctccgaccaaccaaatttgaccttgtctacatatacacgtggcttcacaaatgcgcatcaagcaattggaacatggaagcatcactatagttctaaacttccaattaaaagattgttagtcaatctagggttgggatcataggtggctaagttttcggtttaacaaattttcgagatcatcgatataaaatcataggatatgtcctcatcacaatacagtatacacacacacataagtgattaagttatgcattcataacattaatccagaagctttatatgcagactcgaaaagtcaacataaatccatcattacatggcccatttgtctccatcattttgaccatcatagcatttcagttgacttggagagtgaccattggtccattctgtttcttttcaaatgaacaattaaatgtttgttcatttatcaaaaaaatattttttataaaattaccttatgtaattattcataatccgatttttttttaatatcactttacaaatttgtttatgatttatatgtacagtagtactttgctccgtaatcgatttcacatggatgtatactattgcctcctaattcttccaatatcggaaaacatgtctcacccatgtcttgtcacagtgctcgtttccctttttgcttctacaattccttataattaccaatccataatttcgttttattcacaaatccaaagcatgaaaaaagaagaataacgattccttttccaaaaaaatgctttattgtcttattctcctcctatgtctctcttctacgtatctaccaagtctatctctaaaccaagatgccaccattctccggcaagccaaactgggcttatccgacccggcccagtccctatcttcatggtccgacaacaacgacgtcaccccatgcaagtggctaggcgtgagctgcgacgccacgtcaaacgttgtctccgtcgatctctcaagcttcatgctcgtcggacctttcccctccatcctctgccaccttccttctctccattccctctctctatataataactccatcaatggctctctctccgccgacgacttcgatacgtgtcacaatctcatcagtcttgatttatcggagaatctattggttggatccatcccaaagtcacttcctttcaatctcccaaacctcaagttccttgaaatctccggaaacaacttatcagacacgatcccgtcgagcttcggagagtttcgaaagcttgagtctttaaacctcgccggtaacttcctctccggtacaattcccgcctctctcggtaacgtcacgactcttaaagaactcaaactcgcttacaatttgttttctccgagtcaaatcccgagtcaactcggaaacctcacggagctccaagttctctggctcgccggctgcaacctcgtcggtccgatacctccgtctctgtcccggttaactagtttggttaacttggatttgacatttaaccaactcacaggatctatcccaagttggatcacgcagctaaaaaccgtcgagcaaatcgaactattcaacaactcgttctcaggcgagttaccagaatccatgggtaacatgacgacgctaaaaagattcgacgcgtcgatgaataagctgacaggaaaaatacccgacaacttgaatctgttaaacctcgagtcactcaatctcttcgagaacatgctcgaaggtcctttaccggagagcataactcgctccaaaaccttgtcagaactcaagcttttcaacaacagactcaccggagtattac

SEQ ID NO: 7062 - DNA, 759 bp, Arabidopsis thaliana landsberg
atccctcaataaaaaatctcaatcagatcgccgatgatggatccaacaggatcgccaagaacatcgaatggctctcctccaagatcgtaccttatctttatgcgaatcatgagcaagagacggacatgggtttgtctctttgtagctgtctacgcgattctcctggcttcctcatggaactttctcacatctgtgcttagctggtacaagctccagtacacgtcatcgccgtctccgtcaagattaccggcggtttacgcgtctgtggtgttaggagctgtgtttggagccatgtcgatggttgcggcggctgcggttgcggttccggcggttatggtgatctggatatcggtggttgtgttgcttgcgttttttgggaaatcgagaagggtattggttgttgaagctcgtaagattacaagagaagtgtttggatttgtgtttaaggttcttttgaaagaaggcaatgctgttgctgcggtttgtgctgttttgggttatttcattcttattagaaaggattttgattcgatttagggtttttgattttgggaaattttcttctctttttttattattattggattaggtgggtttttctttctttcctggaaatttgactattatattgaagaaactcttgtcttttgcttcttgtttaacttgttgctaatgtagcaatgtatatgtacattttataaacggagatgttcttgaatcactatcattattatttcttgaaagcgtgtcaaattatta

SEQ ID NO: 7063 - DNA, 530 bp, Arabidopsis thaliana landsberg
agatattggtaagtaattaatcaatccaatgttctctatgaattcctcaagaaaaggatcattgtttctaggactcgatgtggaaagcataaaatataagcacttaaccttcagctgagtggccaacagcgttacaaggtaaagagaaagttactaattttagaaacattaagatcataccctgatccaagaaaacattccagttgtgtccactttcgagacattacatatccaagaaataacaaggcttgtagtcgatagcatggacagagatcgaatacaagaggccaaagattttcttgacatggtggatgatgaggtaacaaattattcaacctgtcttttaatcattgatgagcaataagtcacataatttaacgttgcttaacagatccatgtgattgaaaatccatttaataatttggaatgtaaaaacaaaatgacaaactatacttaggtttccaagtacatgatgctctcagtatcatcccatcaaggtgccaacaaggaatcattctgttttaagctac

SEQ ID NO: 7064 - DNA, 473 bp, Arabidopsis thaliana landsberg
atgatttaccgaaggaaccacacctacatatggtcttttgggtcgggaaccacaggaagctcctggggaatacgatcatcccgtataagcaagctggcagacgggtatccaatatataaatggtgcccatgttgatggactgtcatgtggatacgcacgaatgatcttttgtgcgagcgttcatctgcatttctgttgcgacctgattgcaccagctgacgtaacgcgataactgttcttcatacatgctgtctaactggtgagtggacattacaggttccatatctgcatagagatatttttgcttgatccacacaatgcagagtctcgacggctcactgcagcactctgctaactgccacagcgaaccgactttctctatgaataggtgacactggtctctcatatgaaatgcccttaccacagtgatcgcagcacatcacacccaccatacttgctctcacaacagattc

SEQ ID NO: 7065 - DNA, 861 bp, Arabidopsis thaliana landsberg
tactttcaaccttttttgctgaccagatttgttatctagtcaaatataaagattataacaaatacgcaactagttgcataaacaaatatgaatcggacaactaataatccaaaagtcaaccagatgacttttgattgtgattcctcggatcttgaaacagactagacaactctgaactcttaagctttaaccaccacttgactttgaaaaactctctcaaggactctccttgtgattcatattttccaaagccaaaaaaagtcaacttcgttgcaagaaccagaaaaaaatggggacgactctgggaaagccatttgccggtttttttcaccaagaagaagcgaggatcgtgttgtttggtctcggcggtaccggaaaatcatcaataatgcacaaattcaaaaccggagaaacccttaccacaaccatgcctactgttggtaagtctctttatcactctttgtttttttctgatcttgaatctagtcttctctatgaattcctttaaaacggatcattgtttctaggattgaatgtggaaagtgtaaaatacaaggattcaaacttatgcttttgggaaatgggcggccaacaatgttacatggtaagagaaagttactaattttagaaacattacgagcatacctgatgatgggtaatttaataaaatattttagtggtttccattatggaaacactggttccaagaaatagcggggcttgtgcttgtagtcgacagcacgggcagagatcaaatagaagagacgaaagattttcttaacgtggtgatcgatgaggtgcaaagaaaccttacttctctaaacattgagcaagtaaataatctaatgtttgatgttctga

SEQ ID NO: 7066 - DNA, 2510 bp, Arabidopsis thaliana landsberg
tccctcaaatacctggacacgcagagcagagaaatttacctcgcacagtgttgaataataacgactatgcaggattacgtggattgacaaaggcgttcaattaagcatcaaagtggagacaagaggagcagaaagctaaagaagagaggaagattcaagaaacctgaacaacagctttctctccatcaacttcgagaacttgaccacgtcgggtagttccatccccaagacggatattgacaatttcttggtatttaggcccctagagaggaaagcagtatcatcaggaaacccatgggacgagaacattataaaagagaaagatggaaacaccaataccttgactttttcaaggatgacgagaggtcccgcaacaccagaaacagttctatactctgcggtataagcaaaagggtgtcaaatagaaaaagaaaccaggcaatgcaatcactgaatgatcaaatgatgataactcataagatcccatagggtatatagcaaataaaggacgtcttacccatgccgatctccagggtaccctccatttcaaggttgttttcagcagcacccattttagatcttcagaaatcagagcaaacaaacgaacatgtcagcaacaaataaaagaatcagagactcaaaggaaagcgatggacgtgaatctacttaattcgttccattttacccaattttagagctctatcaatatgaatctctcgatcagatcaacgggattacttaccctcagagcataaaacctaacaacaaattcaaaacgaagataacaaatggatgggaataatcgacaagtagagaaatgggaaagacattgtttagagtgtacgtacctctttcttctgaatccaaagatctgtgtagaggaagaaaggagccacagcaagagagagatctatgttggtggactatacatacataccaccgatttcaattcaatcagtttcataactttcagctaattacatttatagccttttactttcccatattatcacattaatcattttctcatctttatactttaaaatttttgaaaagaaaaaaaacatatccaacgttctacttaatttggtatgatttttttattttatttaaaacacctaagttataagaaaacctagtttggtaagatttattttgtcccgctatttttagatgttacagaaaattatggtcttttagaaaatcataagtttactaattagtaattaatacaaaatagtatttatcaaaatttaataattttctttaatttttttcaaaaaagaaaagaataaatcaagtattgattgatatatgtgttaaactctttgctatttgcatttccgagagatttaataatgagagaaaaaatctaaaaatttcattttaagaaaagttgaaaactctcaggcgagattatatgagagctgagacttattgattggttcagaacacaactgcataccaaaggccatgtgttttgtaaggccatggtctgagaataagctgagtttctctagtctgaatcagtaataccttaaaaagcaagcaatgaaaattaatgaagaagaagaagaattcttgtcacctttctttctccagtacacagctaacaaagggaacaaacaaaactaaccacttgatgatgatatatcctttcccacttgatgatgatatatcctttcccagtcaatgataataataatcaaatatatatatttatatatagttacaggaaggatcttggaaagaattttaaggacaccgtaaaaattcaatagtcaggaggcgccagcagcagcagcttgagtgggcgtggtgcaaggcgccagggtgttgtgaggtagattcacacccgctcctctcactgacacggctggtcctctcaacatacttcctctgctcactaggtttgtatcaaagaagacaacaatcactgttatgtcatcgtggaaatgtctcctcactcctctgtctatctttttcaggtctgagtatctcatctctctcttctttgccgcttcttgtagcgctactttcaccagccgctttgctatcccctgccattaaagagtccttattattatgtgcattctttatatatagtctagtagtacaaacagagtgggggggtgttctcacgtttcgcggatgattctggactatgtctactgcttcttggttgctcatatgttcccacagtccatctgatgcacatataatgaactgatcgtgcggctccagtgtatgcaccgtgatcgccggctctgcactcagtaatggcttgctgaacggtgacctcagccggaattttgcatacagtggttccctgttgaactctgaccttttcaaatacacatcaccaatggatcttgaaacctgagtatagtcataaagccactcagaaagacaacaggaattgtaagacatacaaaaacagatttagtccaactctagtttattaaatacctgaatgatgccttttactcgccagacgttatgtttcagaa

SEQ ID NO: 7067 - DNA, 419 bp, Arabidopsis thaliana landsberg
ttaaaactttagactattacattgtaggcaaaaaaaaaaaaaaaaaaaaaaaggatacagaggccttttatcggcccaccttaaaaaaagagagctacagaggccttttatagacccactttaaaaaacaaagatatatgaatttgagataagaaaccttatttcaaacaaatgtcccacatcgtttaggtagagatagtgatggtagtaacatgcctataaaaaagaaagagctaattacgttaaaggcatgatccttcaggcaagttaaaggggatatgatgaatggtaaaaactcgcttatattgcgagaagagcgttccgcccaaagcctgttacgactattgggcgctctcttttttacacaatctgatcccttcctaatttccaataaaaaagtacctttctcatattttagt

SEQ ID NO: 7068 - DNA, 2177 bp, Arabidopsis thaliana landsberg
  unsure (1)..(2177): unsure at all n locations
ctctgaataaagtaataagattatgagaatgtcaagagaacatatacataataactgtttttgggtcttactcttgcttcttcctctgcattagatgggaaatcagccatgtcctccatctgatactcaacatattgatcatcatctaaagccatcctaaggtgaggagggtattgattgccgtctgacaaatcaaagcttatcatatnnnnnnnnnnnnnnnnnnnnnnnnnnnnnnnnnnnnntttttcctgaaacaaaatcattatgccacatcatgaattccactctttcttctcttttatgtcattcgtttatatttacacgattataagctgatcaccatggcacttgtgtctcaaccatcattgatcgaatgaaccactatatgatcaaacaaccatacacttgacatggtaaccaatcataaacacaacaaagaaaggaaataaggaaaggaagagaaactgatcttataccttagtttctgatggagaaccgttagatgtgagtgtgacatttgaaggaacctgaagaaagtaataaaaggcatataaaatgcgatggagaaagctcaagattacaaaccagaaccttcaagtatattttagaggtaacaagtttagcaagctttatactctttctgtaaggctctacaaacagacaaatatggcgtcctaaagttttgcactacaggcattatgaatcttggaagagtcggaagcatttgattgcttgaaccattgctagggtatcagactaataatggtaaacaaaacatccaaagctatgcataagtattaaaaagacccagattagtggagaactacttacatctgtgcgactcatgggtcgtttcttgcggacttcattaattgcctcagagatgctacctgcggctaaacctgaatattgacagaacatgtcgcctttaagctcaaataaaacctaccagaagcttaagagaaaaacaagtattactcacttttctgtacagaggattgtggaatatttgtgtcattcatagttccccaactgccctgaacataaaatagacatcgttattgacgtttcttaggcagaaacaaaaatctaaacgttcagatgtgccacagtcgcattacatttgcaaagtaatcatccaatgggtcataaaatgtcggccccaccacctctgggggttgaagaacgttatggaaaaagatattgatcgaatcaaaatagaatggaggccttggggagttgtggtctcccggaaatttgatgatatttttgtcaccctaccatcataaacataagccaggtgtttatactgaagctagccgaagatgaacatgtgtaagaagaaggatggctatcaagaattggaaacttactacgtaagcttcatatatacgatctgaatgatgagggcggataaagtcatcatctaaggcatgtccaaataaaaccggaacaaaactagcctttgccacctgaatcatggaagataaacaattaaactgttaaatactttaccaactagcaggatgattatgaaaagcaatgatgatgctgtttgtatatattagaccatttatgcactcaagtagataaaaaggacaaacaggtagaggaccgaccttaatggtgttcaattccattatatcaaactttgcttttttctgaatagctctccgcataaactgtatagcaaattttacctgaatatacagtagagagagctgaatacatgtggaagccttgcagtataaagaacaactcccaccaaaatatacatttacttacagtaaactttggcagacgaaacttatatgtatcaacaagttccatcatcagatcaactaaatcggagaaggggctgtctagaatcattcctgcaatcgaaggatcctcgactccatacatcaagctgtaacaaaaaaaaggacgattcaacacaaagctatcatagtttagcaggcagtacaagtgattgccatgataaattgcttatttcaaacattagtctcttataattcttcccttgtgacatgtgatagctatgactaatcaccagaaactatcacagcacctattctaccctctaaaactaatgaagcttcacaacaaatgtaaacttccggtataattaagttccattgacacagtgacagtctcataccatcaactgaaac

SEQ ID NO: 7069 - DNA, 2419 bp, Arabidopsis thaliana landsberg
ccacaaggtattcgatgatttgcctcaatgggttgcgttgtaaaccagaattttctaataatgattttattttgaagtgtttttctttttcgtttttgtggcagtggagatatggatggagatggttctagctttgagcagtgttaccgttgttatcctgtcacattcattgacaaggtctgatattttttgtatctaagctctctttgatgtatttatcaagattataaagaaattctaatatgagacattttatatgcaggcacatcttgagaagggtgacaaaagtaaattactactctcttcccttagtctctatagatagtttctttatgatatatatctctgagaagacttgtgatctctgcagttatcatgcctccttccgctctcgatcgtcttggtgagccattaatactgtatcttctactgttatatcaatagtgtttggtctctgactccatcttttcagcttctttgcatattgaatacccaatgctgtttcaactgagtaatgtttctgttgagaagacctcacattgtggtgtactagaattcactgcagacgaaggcctagtttacttgccatattgggtatacttcttctttctctttgtttctttcattagtttcttacatctgatcttactttgttttgttggcattacttacagatgatgcaaaacatgtctcttgaagagggagacgttatgcaagttaagaatatcagcttggtaaaagggacttacatcaagctgcagcctcacactcaagatttcttggatatttccaacccaaaagccatgtttgtagttttgaaactgaatagttttcgttctattgaatatggttttgaagaatgtgtttcttatcattcctcttttgcagcttggagactacgcttaggagttactcttgcttaaccacgggtgatacaattatggttccgtataacaacaagcaatattacatcaatgtggtggaggcaaaaccttcttcagctgtgagtattatccaaacggattgtgaggttgattttgctcctcctcttgattacaaagaacctgagaagccacagaagttgactccttcaaacaaacgacctctccaaggtttgctcatttggaaactctctattgatattcgataccgttctttctagaagtattagcctcaagttgtacctctattttcctttttgttcattgtagttaaagaagaagaagaacctgcaagcaaagttcccaaattcacgccgttcactggatcaggaaaacgtttagatggaaaagcacaaacacaaactgaaccagaagatacaaaacagcaagaaaagccgactgagaatgggaaagacgatgagaagttgtcagtcactacaccaaggcaaatatcaggaaagctcgtttttggttcaaacagcaaatcagctgcaaaagaaacagcgaacgtattgtctctcttctctggattattccatttatgtgattcactttaataaacccattgaagatatcttatcctgtttgtatggcttcttaatgtatataggttgatgatccaaagaacattgtgcaagagagctcaacaaaatccgatgaagctaagttcaaagtgttcacagggaagaaatactcactcaatggttaaaaacggttctgctgaagatatttatctttttaagcatttatacattctctcgtcaatatattggatggaacctaagcgacaatgaccctaaggataacacagatgtgtctgaaagcttgattctttaacttagatgtgtcgaactataggttattgatatgatcctatctaatatgttttggagacaaagtgaacaaaaatcagaaatttcaatcagggaatatacttttgtcgattgattatacacagctttctcattcatccacgagtacagagggcttaagatgtttagacacatgatgccatcattcttacatgatggtatttggtaaatattggaagatgtaacaatatcatcatcatattcaatcctttattacaaaacgcaaactataagaatgagactgaaaagcaaataaaaatcttattagaagcaataatttagaaaacaaaaaatgttcattgctaacaaattccgtcgtcactaaaaacattgaagaacaagagaatgctttttttgaattgtgttattgcatacttgatcaaatttacagttgtaacagtgacgtttctcttacgtcggaacaacctggggttcaaacggcgggggagctccatcatccaccacaggctccactgtaggggtggcggctgagtccttctcagtctcttcaaacccagacttgaaccggtcataattagtgacctcagctgacttaaacggacgttcacctaaaatttttaagagatcatcctgatgcaacacctc

SEQ ID NO: 7070 - DNA, 2571 bp, Arabidopsis thaliana landsberg
aaaatcaccgagtgtgtgatagcctttattacaagcgccaatcaatccaacctggatcctcgtatacaagaggatgagctaaatccacatccttgaaatgcacagaccccataaagaagttctcgtatgtctccgtgcaccctaagcatccatatctattcaaattcaaagatgttccatggaactcaagacatattcaatcaaacattcatagagaaccaaaataccctgaagaaggcgtagaagcatgtgcatgctagcgttaagagacggaggaatcacaggccccatgacagtgcctggattcaccacaaccacatccaatcctttctcctctgcaaattcccaagctgccttctcagcaagcgtcttcgacagtggataccacaactaccaacaacaacacatcatctataaagataaccaataagatgttttgcagtaacaaatcttaaattagagaataacatactccattttgcctgcagtagtcttcagcagcccaacattcctcattcttgatcttatcagcaggccagttgggacttggagtaatcgccgatatcgaagacgtcacaacaactctcttaacactggcttcttttgccgccgtcagaacatttatggttcctttaaccgccgggtcaagtagttgcttctgtgaatacactcatttatttatatacatttgaagtgatcaaattcactattggtcctttttgggagtggagattagaacctggggatcttggacttcatcgacgatacaaggtgatgcgaggtggaatacgccggagcaaccattgatggcggcggaaacggtgtcgtattgtaggagatccatctcgaatagatggaggcgtgtggctgcaccttcgagaccttctagatgtttcgtctctttctcatcctctgcaacacagaaatgtaagggaattaggaggtgatagggtaaccagaagcgtaatcgaagagagaaatttgtgaagattacggaggtttttcacggtggcgtggacggagtagccgcggaggaggagctgatggaccagccacgagccgatgcagccactggcgccggtgacacagactacttctctctcgtccgttaacattgatgattgaatttgagctttctctctctctgtctctctaagtttcagataatttctatttcagagatgatgatgattagggaatgtgaagcccaagcccaatttctaaacaccgtgtcgttttgatagctaaataacagtgagatgctgagtcgtgaaacggcacgcagagttttgtttttttaaacattgaatttctcggcccgacattatcgtggaagtacgagattcactggatttgatggctcgtcagctgtttctcctcctcctcgccgtcacggcagggttgagcttgacgggaacaaccgtcagagcagttggcataaattgggggacagaagcgtcgcaccctcttccgccttcaaaggttgtagagcttctgaaatcaaacggcattgtcaaagtgaagctcttcgatgccgacccaaaagttctccgagctctctctggttctaatattggtgtcactatcggaatccaaaattcgatgctcaagagcttgaatgcatccgtaaaggtagcagagagctgggtacatgacaatgtcactcgttacttcaacggtggaaacagagttcgaatcgagtatcttctttctccttctcttctgcttatccagttatatatatatagatttaagatttttaagctggaatttaacttatggaatttgaatgagtcggatttgtttcaatgccaaattgccaatcttcttattgtgaaattatcattaaagaaaagaattgattttcaggtatgtagcagttggagaagagccatttctccagagctatggcaatcagtataagccttttgtgattggggcagctatgaatatccaaaatgctttagttaaggcgaacttggcaaatgaagtgaaggttgtagtcccctcaagctttgattcctttctttctgaatctggtcgaccttcttcaggacactttagggctgacctcaacaagacgatgattgaactcctctcctttctcacaaagcaccactctcctttttttgtgacaatctctcctttcctaagctttcaccagaacaagaacatctcccttgactttagcctctttaaagaaacagcaaaggctcacaaagacggacgtaaaacctacagaaacagctttgatctaagctatgacacacttgtctctgcattgttcacaattgggttttcggaggtggatatcgttgtgtcaaagatcggttggcctacagatggagcagaaaatgcaacatcactgactgctgaggcgttctttaaaggactgatagttcacttggagaaaaagacggcctctctcccgcgtcctcctgttgaaacctacattgaaagtctcttggacgaagatcagagaaacttatctgctgggaactttgagaggcactggggagtgttcactttcgacggtcaagccaaatacaatttcagtttcaaccataagaa

SEQ ID NO: 7071 - DNA, 1606 bp, Arabidopsis thaliana landsberg
tgtgtgtgcaaagtttaaaaaacgcaattaaagtgttcgatgaaatgcctcagaagaaacatgtaactgcttgctcaaaactaaatcaaaccgattcagccacaacaaagttaatgatctcactaagcagattctcaaataagtcaaaacgatacaccattgtctgaaatcatatcaccttaaaagccctacttattcattcgccaaaaccttccaatcttaagacagagagacatgtgttttagaactacaataacatcgcacgagtaagaaaatggtaacctcgttgactcaaaccaatcaaatctccgatcactttttatcttcaccgaaaagtagacggagacgagaagcaaagacgccggaagagtcaatcgatgcttgatgaagaagatcgcttttgattttactcatacgatccgtcaaactatcttgttccttcttgagaacagcagtgtcttcctccagatcgtgaattcggtacttctgacttaccgatcggaaactcagaagcaaaatcccagtcatggcggcgaactggaagaagctttgcttgtttttcttcacattctcgaagaatccagaagcaacagcagttaaagccttcgccggatctttcccggtgagaggatcaacagatccctgtggcgcagacgaagccattttcggtgtctaatgaacaaaagaggaaacaagctgagagagagagctagagaaaagggtttcgaaaaggcttgggcttttgatgttatcaagtgaagcccaataagttatttctattgtttaagagtagtgatttgatatagcctctgatgtacttggaaggttataaaatgcaaagtgcaaacagacaaaaatttaggttaaaaaaatttatgatgagatgaatgaaattcatggaagaacaaaactgttatagcataaaaatcatataatcaagcatttagaattaacataatacaatgtttaaagcaacattcatctatgatttaacattaaaccaatgggtttcttttttttgtcttatttatttgtattgttttattaaaacgtattttcccgttgttcattatcagtgtttaatgttgatgatgatgggttcatcttgtttgaaaataatgtttggatatatatgtcaacaaatcctaagaagccagatggcgaaatattgaaatattcgtattattgtgataaacattatctgctggttttagtatttgcccactttcttttcctcttatgcatgtcatcatttgaaacttttttgacaattcgaggtgatcatgtgaataacgtaatcaccaaacgtaagagtgagtatacgatgagtgttatgggataaccaaatgaaatcctcctacacacacaacttacacaaactcgaaaacatttaagtataaaccatatgcaaactttatataaaagatagaatgaaattacaaaataaaggatcaaatgcaatcaacgaaagccacaataacaacttaaaagagaaagataatgatcacaaaacacagcgaatgtcccactcccacatcattattcattctttaaccattttgcttaatcatcagactccttttctttcttcacttcctcttcagtg

SEQ ID NO: 7072 - DNA, 1781 bp, Arabidopsis thaliana landsberg
agttattaaggagcggggaatgttcgatttcttgaagaaaaaggaggaagttaaacctcaagaaacgacgactctcgcgtctgagtttgaacacaagactcagatctctgaaccagagtcgtttgtggccaagcacgaagaagaggaacataagcctactcttctcgagcagcttcaccagaagcacgaggaggaagaagaaaacaagccaagtctcctcgacaaactccaccgatccaacagctcttcttcctctgtaagtaaaagtttgactagtttgtagtttttcttggttaaatcttgaaaacaaactcatggttttgaaattttgaatattcatgaacagccgagtgatgaagaaggtgaagacggtgagaagaagaagaaggagaaaaagaagatgattgttgaaggagatcatgtgaaaacagtggaagaagagaatcaaggagtaatggacaggattaaggagaagtttccactcggagagaaaccagggggtgatgatgtaccagtcgtcaccaccatgccagcaccacattcggtagaggatcgcaatccagaggaagaagagaagaaagggtttatggataagatcaaggagaagcttccaggccgcagcaagaaaccagaggattcacaagtcgtcaacaccacaccgctggttgaaacagcaacaccgattgctgacatcccggaggagaagaagggatttatggacaagatcaaagagaagcttccaggttatcacgccaagaccactggagaggaagagaagaaagaaaaagtgtctgattaagagaaaaatatgataagagtgaataataatgatgtgggagtgggacttatgttgttttttgtttttttgttgatcattgtctcttttattttgtctttctagctgttctccaagtttgtgtttagagttagatcatttgtgtctaaaatctataaaattattttatctatggggaaacacttgtttactcaatggagcttcaatggataaattctcatgaaaagtttaatgtaaagaaaatcagaaattttgatgaaaaaagcatgcaagagttagattaaatatatggtgattcaataatttcacctgaaattagtccgttccgccacaagtcatggcctcatggggatagtaagattactgtatgaacctctcttttttttaatggatttcagttaaccaaattatatgctaaatttaaatgtttttaccatttaaaatatatagatttcagtgaatagagctataatattttttagtatgaaaattcttttaccatttgaaatatatagatttcagtgaatatagctatattcataagtcataacaatagaccggttcaatatcacatttatgaatctatagtatatttgttcataaatgaaagtagtgattacttcttcatagtagtgaactaggcaatggacttttcaattattaaaagaaagagtttcgatagtctaattggtaaattcttggcacataacattatcatattttggggtcaattttatagattttcagtttaaaataaatagaaaccgtttgataatgatttagaactttagattcagtttaatattgtttttagtcatatacagtaacatttgacatttctataagaaaactagattttttcgtttttgttttttccttttaagctcaggtaagtttacatgtggtgcacaaaaatatttgttgtaaagtttaacgtaacagattaattaaatcaatgtagcaaacgaaaacgattgctttgttt

SEQ ID NO: 7073 - DNA, 994 bp, Arabidopsis thaliana landsberg
atctatgggaccctggcatgatggctttggctagttgcacctgaccctaactaggctgttgtaccctctatcgatctaaaaccactactagctcacaagcgttgcgttctgatcacaccatatgtaggctagggagagaagcctcactttattcacaggtgtggctgacacgcctatgtaggacatgtcgagcgcactctgatcataaaaatctgctgaacattggagataatatatgcattcttctccaattctcctagttggatacatatataaagtctataaataacacatatttcccataaaaattattgtaagagtttatatttcaacatatagtatgcaaacttaaatcgtgagaatgacacaaccactaattcaaaccactacattatatattctaatccattcaaatccattaattatacattatatatcatatctatataatgctataatatacaatcaaacaataaattagaaggaagtaccatgcaaccaaacttccatacgtctcccgtgaactaaaagtacattactatgcaaatatctaatataagttaactctatatcaatatattaaaaacataaatccttaaattaagaaaaaatatggggtgatttcattgatattcatccaccgaccgaccgacgtaaaagaaaatgggttcactctgcaacttaagaaatagtaaacgtcctttgccataatttaaaaagctaatgaaatctttaacagcgtgtgacctccgcgttggcctggaccctctacttcacacactataaagtcccactcatcacaacaatattcatcacacagctcttgaaaaccatcttaaagcaactcaaagctcaaatcgaaatttctagtttctctttatcatccacgctaagtgttcaatcgaatcaagattaagtatggcagaagagtacaagaacaccgttccagagcacgagacctctaaggttgcaacagaggaatcatcggcgccag

SEQ ID NO: 7074 - DNA, 2615 bp, Arabidopsis thaliana landsberg
ccaataactacaagacgtagagacagaaagtagaatagaacaactaccttgtttggtcactagcataatgctctaaagaataaacaaaaacaaaccctaagcttcctagtgtctacttagaatgatctggctttgtcatgagactttgaagaatgttagtctcaacgcttttgttacgctgcagcgaaggagtccggcgaagcttgcacctgaatgaccccgggtgagtggtcggtgagcaaatgcaaatggtcttagtgatgctggtctgacgggacagacccccaaggcccatcgccgctatggaagcttcagtctccatgtttcctttgtcgttcataatgtgaatattaaagaagaaggggaatcaatgatgaacgaagagggtatacctcattgtgtgtatataatcaatttattatttgaagaagctttaagactgaacaaatctttttctttttgtatggtcatcacgggaatgatgatggagtccatcaaggaccaactgtatccttgaacttttcatgatgtttcatctacttctatccccaaaaccaaaaggccaaaagccacataagtcactttctaatggttaatgattcatgatcatgacttccatcattcatcaattatacacttttataaatgttgtaaatgtgtatacatttatatagtattatacacttttataaatgttgttgtttatatatatgtatacatatatacttttataaatgttgtaaatgtaaatgtatatatatataaatgtgtataatactatataaatgcagtgcaatgcaaaaaaaacttttgttatatacaaagcgcattgaatatagaggaaaacaatatgagctaggagcactgaacttctatttcatatttaaatgaatataatcttttcaattaatatttggtagaatagttctatatatagaattgtagtaacaacgagatttcaaattcaaataagtgttatgattttattttgaatgaatatcgataattgaataattttatgatatatttttatataatgttttgttttaaaataaaaattaatatagactgatgtgatcatataaaactaaagacagtcccaacatcgttcatatcacatccactagaaattccaatatttagaagatctcttggatacttgaagagtacccctaaagatcataattgggatatggtttttttgaataagggttataaacattgatgcaaattcgagtccttaagtatatgtttactgagttttgatggtgcaaatactttaatggacaaaggattttgtgaacctaaatataattatgcccttacggtgatctgagagggaaaagggaaagaagagaaagcaagaggacaaaggctgtctttatgattctgaagtcaacttatagaaaagaaaaaaaaatcttaatttgttcaagatatataattttgtcctttaggtattgtcttcatccagcacctcgagtatttttactttatttttgttattacctttgctcataaccgacatatgtcatacacaattaattaacttcgctcatactcagataaaaattgttctttgctaaaacatagagataaattgatcatagcactagacgaaaaattaaaagacaaaagatttgagttagttacccttaacctcatttcttacaaccctaaagaaactgtgaagtgataagcacgtaaaaagtagaacaacaacaatattctaataatcatcatgaaagcaatactgataaaacattccaccatttccgttctgctgcatcttagctgaatcaaacccattctcatgatcagcccaacctaactctccatgatattttacctgaccgaatccgtttccttcgacatggaagtcaggtaaacgaacatctgtctgaaaaccgctctctggcatcgtcgggaaaacaccaaccgactgttggttgctctttggaggtatagaagcatgttgagagataggttttggtaagaagccttgaacaatttcttgaagaagaccagaactagctggttctggttcaaagatatttgatatcaggctctcgttctcaatggtacttgacctcttagctttaggcgagagatcttcacagacatcgttgacgttagtgaaggacccgtgaacaacgtcgtttacgttagaaagattacaaggcgggtaagcgaaagtggttaacggagaaagagactgagagtttaacacgtctcgtagaaggaacatattcattggaggagacgagaaaatacggtggtgataagagtcgagagaaggcattgggtagacgaagttggttcgagctttaagaccacgcatggctcgagcggcgcagtcatatgcgcaagctgcttcctcggccgtgtcaaatgttccgagccatcgtctctccttggacaatgggtcccgtatttcagctgcgtaacgaccccatggcctacgcctcacgcctcggtaccttatcgtagagacaccggaagcgccggcgccggaggcagcttttgcggtagttactcctccgggagagccaggagctgtcgaggaagttcttgatggctttcttttcaaagggtggatgcttggttaatctgtg

SEQ ID NO: 7075 - DNA, 564 bp, Arabidopsis thaliana landsberg
  unsure (1)..(564): unsure at all n locations
gagaggctattttaagattggttagttttaaaaccaatctcttattagatttctacagtgaaccgagttaatacataggaaaaaatataatcagctacaccaagtatagtggaatacatagctacaccaagtatagtggaatacatagccacacatgccaagtttagaaatgtacaatcaactacacgaactagatgtatttcatccccacatataccaactacatgacggcatgtgatcaatgaacatctttttctggtatacaaattgttgaaatccagtattgaccaatgttgatcagcattgaccaacaaaaatattcgaaaaatgatttttttattattttaatattcttaagaagttattctattgaatagtttatggtattatagaataaataaacacaatctatatttaacagaaaatatattttgtatgattcttattattacttatttttttcaatttcaacactaaatgaaaagggaaatgaanataaatattattaattaattaatttcattagaattattgagtagatgactctntatctaaaattacatg

SEQ ID NO: 7076 - DNA, 1522 bp, Arabidopsis thaliana landsberg
gttacccaaagaaacttactttcatcaaaatgttcttgaccataagtcatcagagtatatatatatagttgtaggagttttacctcaattatgccagaatcacaaagattctttaaagccatcgagtattttgtttcaccaaggcggtccaaataacgtctgcagaaggctagcgtggagaagttcttgttaatagtggcaaggagttgttttgcccttggtaacctcaaaggtacatgacccacatcatagtttttcatgtaatggctacattctaagtcttctcttacatatcctttccctgcaaaatgacacaagtgaaaaaccaattttactctgaattcgtaaaaatccacatttcttgtatagtttcatgtgagaaatgttgttgttacctgttgatccaaaagtttcaatggcatataattcaccctcttccattttcgtctgctcgcctcctctaacattaggaactgatttttcagcgtgtatctgatagcgtccaatgctgtgcccattcaggtttctgatacttttgactgcccccaaaagacacaacattgttttagttttctaataatccaaatagaaaccaccaaaaaatgctgccacaaacgtaatcaattaccttggtagacttttccattgatttcaacctcataagactccatgacctcctgaactgcagcaccaacatcacagagccggacatctaccccggcttcctaaaccaacaaaattaataacacaatggacttattcagttggattgaacgataaagatccaaaaaagaagctcaatatggttataagaaaacagtgcaaacttcaaagaagaagtcactacagaatgaatggctgcattcaccatatccaagaacagaagaatcccacaagtagcaacagaaacagaatgagcaccttgataccagtatatgttgcgtcacgcgaggctgctaaaagaggatcaaacataggattgaacgcaactgtaaaagcagaatcaacaatgtgccctgccaaaacaacataataattgttcttatgagacatctacgttgagaaaatacaacaaacagatgataagtttttgtttttaccataccatcaatatgtgttccaaagtccagcttcataacatcgtcgtactgaaggacagtcttatctccagagtttggtgtccaatgagcagcgaccctgaatgttaaaaagtcattagagaaacatgactaaagaagaagaacaaacaattgttgatggaaagaaatagttaaaggcagatctcataaccaaccaattcaaagagcatcctgtagggaatgcaataccagcttgaagaccattctctgatatcaacttacgaacagtattctctagggtctcacatatatcagtcatcaacattccaggcttcactatgcttctgacatatttacgaacctcaaaaggattgggcaaaacgttctttcaagcggatgcagaaaagagccataaaaaaactctaatcaagaagcaagccgtc

SEQ ID NO: 7077 - DNA, 809 bp, Arabidopsis thaliana landsberg
cagtctgatcatttgatgagatctggaacttctctcattcaatgaggtttcacctatcttacgctgtgctgtgaaaatgtagaagcatgtaagtttacttttcagaaaacatgttctggagaaaatacagagtttcagatcatgtacacaacaacactactttcattggctacttcatagtaatggaaagtgattttgacttttgagttttaccttcacaaatagatagaagttccttcagatggttccagtctcgcagagtttcctctgtggctttttcaacaactgtccctttctaataagaaaaaacgatagaactaaggagagtcagacaattttacaaactaaaaaacactcagtaaggaaaatgatattcatttacctcaggatcgtctcgtagcctcagtgatgtaccatccgagctaagcagatctcgtatggcctcattgtagatctctatagctgaaaacttcacggaaaacgccctttcttcatgctgcagcatccacatccaattagtagtgcataagaagaataaataccagcattaactttggaaaaaaattacttatgcaacgaggcctgtacctgaaatatatagtcaaatatatcagccacagcaaactcagtaataccagtcatggtgtatgtctttccactactcgtctggccatatgcgaaaatactacctgtccatcgttacagtcatagaagaactaagcatatagtttcatcaatgtgtgcatcagcaaaacaacgggaaatcaagcttacaattgattcctttgacaacagacagagcgatttct

SEQ ID NO: 7078 - DNA, 1639 bp, Arabidopsis thaliana landsberg
  unsure (1)..(1639): unsure at all n locations
gagtgtctggcagttgaagagaaacctgcagaagaagatctaacaaaactttggttctaatcattttgggcatgtgggacagaaagggatggatgtcctagaagagaaagggtgttttggaaaagacaaagtatcaagtattaagttctgtgaggattgtgtgtttggaaaaacacacaaagttagcttcagctcagcacaacacgtcactaaaaagaaactagactatgttcattcaaatttatggggctctccaaacgtcccattgagtcttggaaggtgtcaatacttcatctccttcactgatgattggtctaggaaggtctggatctatttcttgaggacaaaggatgaagcatttgacatgtttgttcaatggaagaagatggttgaaacacaaagtgaaaggaaagtaaagaagcttcgtacggataatggtcttgagttctgcaataatagatttgatactttctgcaagaaggaaggaatggtgagacacaaaaccatgcagagagattaaatagaacgattatgaacaaagtcagaagcatgctcagtgagagcggattaggacaacagttttgggctgaggcagcttccacatcagtgtacctaataaatagaacaccatcatctgctattgattttcacattccagaagagatgtggacttcagttgtgccagacttatcaggtttgcgaagatttagatgtctcgcttacattcactcagatgatggtaagctaaatttgagggctaagaaaggaatctttaccggatatccagaaggagttaagggcttcagggtttggttgttagaagacaggaagtgcaccatcagcagaaatgtggtgttcaaagaggatgtgctgtacaaagatatcatggctcagaaacaatcatgtatgatcactaaccctttaccaatgttatctgataaagctacttgtgatattgcaggaaataacaggtctgaagaggatatttctcaaggtgaagctttaaagcaagatactgtgataaagtcaggacaaagttcagtggaaatgtcaacaagagttgagaatcaaatgtcagggagctatcagatagctaaacaccggccaagaagacagatcatgagaccaaccagactagaagactaatacactgaagaagcagaattagatgagatagccggatacgcatacttcgtaacagaagacggtggcaagtctgagccctccagttttcaggaagcattaagagatgctaatagtgacaagtggttcacagctgcagatgaagagatagagtctctcatgaagaacaaaacttggtcactagtagacagagatgaaaaacagaagcctataggctgcaagtgggtcttcaagagaaaacctggaatagtgggtgtggaaggtcctcgatttaaagcaagagtagtagctaaaggttnnnnnnnnnnnnnnnnnnnnnnnnnnnnggagattttttcacctgtggtgaaacatgtgtcaattcgttttctgctcagtattattgctgatttggatatggaactccaacagatggatgtcaagactgctaacttgcatggatacttataagagaccatttacatggatcagtccgaaggtatgtagatgaaaaata

SEQ ID NO: 7079 - DNA, 196 bp, Arabidopsis thaliana landsberg
ggagattttttcacctgtggtgaaacatgtgtcaattcgttttctgctcagtattattgctcatttggatatggaactccaacagatggatgtcaagactgctaacttgcatggatacttataagagaccatttacatggatcagccagaaggttatgtagatgaaaaatatccagagaaggtgtgtctgctacaa

SEQ ID NO: 7080 - DNA, 2219 bp, Arabidopsis thaliana landsberg
ctttgatatgtggaggaagcccggcagggacgtcagggagatcgtctatgttgaaatttttggctaattgtttttctgctttagtcaccatccttgtctaggtctatagcagaactagggtttatcaaattgagaaagagaattgaagggtttaacaaaggaaaccacagggggtgaggaaagtagtattgggtcaaagagtgaagtcgaagaagcttacctgtggccgagagaattgagcaatttagagagaaagagagagtaggaggcggcggcgaggagatgaagaacaaacggtgaagggttttgaaaaagccgccggttttatttaatcccttaactctttccggttcgaattaaaacgcattattaccaaaagaaacaataaaaaattcatttcaaaagaatacttcttctttttttacatttcaaaagaatactgtttaacactaaaaataaagccattactttaaaaaataaaaatttattccacaagatgaatactttcttttgctcatgattttgttttatataaaaaaacaataataagaatttattctttttcggtgaattgtttaattttaaaaaaaaaaaaaacttttctgcaatcaattcgcagcatattggttaagctaagaatataaactaaaaacatatgtaaacaacaattctaggaatgactccttttgtttttggcatctactgtgaatgataggcttttttgaactctaattaatattggtcaaaaaaaaaatgtcgatgggactcttctacgttagtatctaagaatgtggcaatagcactacttaatttagagcaaaataatagaagaaaacacgacacttacttcatcaaatttttgttgggcaatgagaatgttgtctataataaagtttccggctacaaaacacatatttgtatctcggatatcaaatacagaagaagaaaaaaaaactttgaggtgcaggcttagaatctttgagatcatcttatgtataacattacaaaggctaatacagtaggtcggaatcttgacatttcctagagttctatctccttcgggaattaggtaaatattggagcatcaatgcgatgagcaagtcatgaccaaatactacaacagttacaagttacattcctttgcgtagcaatcaatcagcaaatggtatattggtaatttactgacactctgctaatagaaggaagagctcttcatcggttatggctcccatctccattgccctttccaacacacttaatcctccaccatcctctattgatggacgagcacctctgtcaaattcaaagaagagagacactaagtatctactcaaagtgcccctcatgagatttattagttagtgtgttaccttctcagcaaaacctttgcaaatgcgttgttccctgatgcgatgcaatggtgtaatggagttcgtccgtggtaatctctcatgtttatgtcagccccgaactgcaacagcagttcaagcaagattgggtcaccgctttgacacgccacatgcaacaatgagcagccttgaagacagtttcttgcttcgttcgaattcttgattctctgacacgcatttggatcgtgccttttctttacttcatctggtgcatcaacatggtggtggtgatatacatcaaggtcagtaatatcatcgaacttggtattgatgatatttgcatctgcttttacaatgagtcggtagatgtctcttatgttcctgctttgaaccgcttcccatattctacttgaggcagtagaatttacttctctttcatctttgacaactagtgctttctccaggtactagctaggcataaacattatcagctttagtatcataagccttttctattcacaagaatatgctcatttggatgatgcgtcaagtgacatgaatctgaggtctatgtatgcgaaaactttaagaactaaatctcatacctttccgttaatatatttctccttcagagtaaaccaatcttctgaagatggtttccaaactgatgcaagagtgtctgtcgatcccttttcactgtaaatattcaacagaagataggatcataggaaaggtaagatcaccattctcatgattttacacaattgggaaaatagaaacttgtataagaggaacagatgattttgattcaaggaattgtattttttgattgtgtatagagacagtctgtactatataaacaattaaatt

SEQ ID NO: 7081 - DNA, 2457 bp, Arabidopsis thaliana landsberg
tgtcaaatcgaggaccagccactgttcggtatatgaagactctctcaacagggcagctctctggtctcgagtccggtgcaccccgttcatcgatgacttccacattcagctttggcatcttctgtcctagtaacttgcaggctccaaaactcacggaacaagaagacatccaaagggatcgcattgtctccagctttgaagcattggccaaaagcgccttgtctccaaacgggcagtcccttatctctagtttcctcaagctatcgcacccggacaaaacatgatgcatgcctaagtcactgtctcctgcaaatgccactgagagcatttccatcttcttggcatatgtcccaatgtattcaaaaaccttgtcggtcaagaggccagatagagagaggcgacggagatccttgcagtgctctactatggctccaaatccaatatccagtggctctagagtcagatagtctggggcttttggctcaatgatgcacaaacggaagcgagtcatgttgggacggttcctagcaatggttatcaatgcagcattggtcatttgacggcagaagtagagaaccgactcgagttttggacagcccatggagacggagacaagcccctgttccgtcaatgccacatttggttccatgacaaaaggctcggacggaaacactctcagctcgcgtaggtccttgcaggttgaagcaagcacctcaagaccagcatcctcgatgtagtcaagcacctgtagtcaataataagttagagcacagttacaaaaagaaaaaggctttaatgcttataattcagatatattgctctatatcattcaaattttttaagaaaactatgaacataagctttctcataccatacagtaaaatgacctattccaaattcatgtgttaatgtatgttaaaatggactcacccagaggcgctgcagtttagggcattgacaaagaagcttgacaagatcatagctctggactgttgcataactcagattcaaagttgtaagccgactgcaaaccgaataaactgctggaagataggcaggaacagcatcccaaaatccagataagcacctcaattccttgcacccagagagcgctacagataaaccagagtaaacatctggtcgcacttctgcagtgtacccaccagtgcccaattcctccaattgaggtgctctttgaagtaaagtagccaatttttcaagtggaacagctcggttaagcttgagagacttgagattgggacacctagtcaccagcctttccagagcagagaaactgacctcagatgctaagcaagatatattgagtgataccaaagaagtgtatgtatctgggaaatggctaagccagtggccactaacgtcgtcaacatcactctctcgtaagtcaagctctttcagattcctgcataagaaatcacataattagcatcgagtgacccacattatacaacttcgagaacataaacattgcctacaatacatgagcataattgtcattaatttgtccaaagttgtatttgatacaatgtagaaagatcactttgggaaactatctaagcatagaacaataacaaattactaaatttatcacgtggaagcaatgtgagagatgctaaaacagagctaaagcgagtaaagaaggggaatccgaaaacagatctaagtttcccaacaaggtaaaaaaagaaaattgaaagtcccctacaaaaagaaaagtaacacacacaaagccaaattgattagatttcccacctcaggagattcactgagagcgaataatccaggaataaatagatacaccaccgttaaataagacccaccagaaagaaaaagagagtggctataataagaatcttcagaaacgtgattaaaacatatatcttttagatacgcaaaatcttgaccaaaccaaaaaaaagctcacaaagaccagagtaacatcagcaggaacaacgcagcaaaacctatatgcccagatcaaataacaagtacatgaatttgctataattgagactttatgtagtataatgaatatacaaatcacacaccaataagtttaatacaaacaaaagcttcttcctagagacacaagggagtcttcttgatgaaacaaaaaacattcagaaaaagaatacctgcaagtggcagcgatagcagcgagaccatcggtggagaagccttcgcaggaagaaagcacaagaaccttaaaattcttaaaagacttggctatgagctccaagcaatcgtcggtgaccaccatcctcttcagccttatctcttcaagccacgtgtaagacgaagacatggcctgaatccatggatacacgtaacctgcccatgccgcaggtaccaaattaaagtcagcaaagtgaggttttcctttaagctccacggatctcactttcgggaacctgctaatcaccgtcgctggactca

SEQ ID NO: 7082 - DNA, 886 bp, Arabidopsis thaliana landsberg
gagattgaaatagctaaagcactatcaacagagtaaaataccatgcaccatggttatagttcattctaaacatgataaacgttcaagaaaaagactaaccaatcacattccatgccatatcctttcttcagcaaaacttcaggagcaatatagtccggtgttcccacagttgaaaatgcctttcaaaaaatgagaaaccaatcagagagcactatcatcagttgtcgccaacttgccacacaaattaataaacagacagtacaggtgataattgaaaagtgttctccgctcccctacaatatgaagaataccatgtttggttttcattattcccctttttgatttatctatctacatgctccagtcacatttggtatataaagggatcagagaaatggagataaagctacaaaagaaggggagaggagaattttatatacgccaacaaaagattaacatactagttttctgcgattcatctgccaatgctgaagttgttcctggggactgcgccagcttctcttgttatcagtgtcaggaaagcatctatcaacatccataggttctgacatagtttcatcatccgtggccctattctcctgaattgaaggtaaatttctacaatcaagaggcttacagagcccaaagtccgagagtttcatgtgcccatctttgtccaaaagtaggttatcaggtttgatatccctgcaaaagtgagaagacagaacgtcaatcaaattgtatgtaaatatcacagtttacaccagaagcatgcaagttccaaaagccacctatgaatatagttgtatctgtgaatggattcaatggccaggacactttgagcaatataaaatctggcaacatcttcccgtaatgtgtcctccct

SEQ ID NO: 7083 - DNA, 613 bp, Arabidopsis thaliana landsberg
catacaaatcttgtaaaagcctttccaaatctccagtctgttttcttacactagatggatccacatcatagaaaatcggcaccaatgtcttcccaacaacttccctgcactccatgatctcgaccaattcgtctaagcaccagcacgaaccagcgtagttcttggaaagaacaacaatgaaaatctttgattcccatatagcttgtttaagctcaggccatatggaacgacttctcttgattccaccatctttaaatgcatcaattccattatgttgcagctccttgtgtaaatgacttagaaagtttctacgtacatcttccccgcagaagctagggaacacatgataactatggcgatcagaaaaagaagacgaggacgaaacagaagccattaaagagttatccttttagttatttttttctttctctgcggcatgtttacactatagagttacttatcaaatttatacattccttattcttcctattggtcaagtttgggcgtgtgcggtcgattcagctaaagaatctgatgttgatcagtagacgtcgatcgataataaagtcaacaataaatatggcaatgaataaaccagttacccaaacaaaac

SEQ ID NO: 7084 - DNA, 2699 bp, Arabidopsis thaliana landsberg
gcgtatgtcatctgctgtgttcccagctagtgttgttgctggtattgagcctttggtaccgtttaaggatgtaccaagctctgagaagttgaatctctttgtgagtaaagttagtctctgttgtgtgacatttgatttctctgaccctggtaaaaactctatagagaaagatgttaaaaggcagacattgttggagcttttggattttgtagcttcagggtctgttaagttcactgagccagctattcttgcaatgtgtagaatgtgtgctgttaatctctttagggtctttcctccgaattatcggtctagttctggtggcgaaaacgatgatgatgaaccgatgtttgaccctgcttggcctcatttgcagattgtgtatgatttgttgcttaagtttatcacttctccgtgtcttgatgctaaagtggcaaaaaagtatttagatcatgctttcattgtgaggttgcttgacttgtttgattcggaggatcctagagaacgggagtgtttgaagacgattctgcatcgggtatatgggaagttcatggttcataggccatttgtacgcaagtccatgagcaatatattctaccggtttgtgtttgagacagagaagcatagcggaatcgctgagcttttggagattttcgggagtatagtgagtggatttgcgttgcctttgaaagaagagcataagatcttcttgtggagagtgttgattccattgcacaagcctaaatctgttggaaactactttcagcagctttcttattgtatcactcagttcatagataaagagccgaaactaggcagtgttgtgataaagggtttgttgaagttctggcctatcacgaatagtcagaaggaagtgatgtttctcggggaggtcgaagaaattgtagaagcaatgagtgtgatggagtttcaaaagatcatggtccctttgttcttgcggattgcttgttgtgtcaccagttcccactttcaggtacattcctattcatacatagttctcatatatgattgatctgcatgagtctaagataagctaagtttgaaccaattggtcttcttgtgtttcaggtttctgaaagagctttattcttgtggaacaacgatcaaattgtaaacttgattggacataaccggcaagccatcctaccaatcatgttcactgctttagaaaagaatgctcagaaccactggaaccaatccgtgctaaacttaaccttaaacgtacgaaaaatgttctgcgaaatggacgaggctctgttcatgtcttgccacgcccgctttaaggaggacgaagcaaagcaatgttctgctgcggaaaagaggaaagaagtatgggcaaggctagagaatgcagcaagtatgaagccgataacaggaaagactgctgttctggtaactcctcgagcaacctccatcgcctgctaaatagcgtttaaaccaattcacagacagtttatccaaagcaacaacatcgagaagatgatggagtggctgttgcttaagctatagtcttgggaacttttcatcgaggttgatctctgtaatattatataactttgatgttgttagctgtgtgggttttaatgctaattctattgctttcttttaaagcaatgaaaccatgctgcagatttttatcaaactctttgtatcaatcaattaagtttatatatcctttttctttcaactatggctctaaacaacaacaaacatcaaaaggtttatgggaacacatcaaagtttacaggtagttgcttgtacctcacaaaacttcagagactaaggtcatgcacgaagaacgtcttcccacgatatgtgatggatctttcttcagctccaaggcaccacaaatggccttgtaggttaagagtctctttcattcctgctgtttcccacacaaactcaaagagacccaatgccctatctaactgcttcatccctctctccaacatttcctcatccgttgaagtcaagatcctccccatacttaagcacaagaactcgctcttctccttgtaaaaccctccacagagatcaacttcgatgtcacgcacacggccatagaggaaatacatgacgagagcaaacaaacacggtgatggactgcccaacagctttgagagctttctgtacacaaggtgctcttgatgtctaacctctctgaatccaatagtgttgtctaaaaacacatctttgatctgcaaaagcccttctttcatcgatacaagcttatccagatggtaaagtactgtgatttcttcatcatgttcaagataccttctcagatcattcaccatatcaagtacatcttcccatttcgcagaagcattagctttcgcatatctagctggcacaggccgcatccaagaagttgatttctcgacttcaaatgaaactgatgattcagataagaatctgaggcaagacaatatcacttgctgagccaatactctaccttgactcatctctctatgttcaactaaccaatcaacttcttctttaagaccattcaatatatcttcaagagtacctctccatatacgatactgcgttacctgtgaacacacagtgctcctcactagcttcctctgttgcgccgagacgttgagaaagttgcaaactttagtcaatgaattcaccaccaatggctctctttcactttcactcccaaaaatgggaac

SEQ ID NO: 7085 - DNA, 124 bp, Arabidopsis thaliana landsberg
ctttccactctctgaaaccttcaatataaagttttttttatggctaactagagcataagcaacgggaagggtttaatctttgaggcaaacaaaatgaaaaccctatttgtcctttttcttctcc

SEQ ID NO: 7086 - DNA, 1856 bp, Arabidopsis thaliana landsberg
  unsure (1)..(1856): unsure at all n locations
gtcagactctagaatacctaaagcatattcaaaccatgaactgttttaaccgagtaacatccgcttagagattaagccaataaagcttccaaccaacaactaaaaacataaaagaaagcaatcatcttcatagatcggtgggaataaataaccacaattatgttgaactcaatccaaaggcactagaaaaaaccatcattcacaactccgatttgtttcttttaaaattgaaatcgataagcttgaaaaacaaaacgagccttttaatcaaagaaggtttaaggaattctaattccagatctaagaattgaaacacaagagggccaatcaaaccaaatgtaaagaaaactaaagaacgaaaagataaattcaaaccggaaaaatccgattagaagctagacgagacacaatagaaggacgatgaaactctagatataagccagtcaaccgcctctgtaaaagccgatagatgccagacgctagccgaccaccaccgtaaagagaaacggacggtgccaaaactaaagctggccaaacattgccataaaaacgaaagttatcggataaaaagccaggcgtctctgctgaaaaagccaaaagattctaaacggatagttggacaacggaactaccgttgccagagaaaaaactctaatgacttcctttctaaaaaaatataggagagggaagtccacccgattagtggaatttgattattgaacaaaaccagtttttccattttttcgcaattgtaacaaaaaaacaaaggtaaaaataaaaacgaaaaagtaaaaccctttgagaagaagaagcagcgcataaacccccatcggccagagaaaatgagcaatttgggatctcgatcttctaccgacaaagagcttatcagcttctcaaggttttggttaatttgagctacagatttttggattatcgatgatatctagcttcgagaaattttcgaattttctcacatgaggcgttattttggaacagatctttgttgagctattggctcgaactagttgactaagatttagaagtcgattttttgtgtatattgtgtaagataagcaaatgtcttcttctacgaaaggatctgttaagaagagttcgattaaacatagttgcaacttagctgaggttaagaggaagctttcaaagatcagtgatcatcattcacatgtagagtatgcttatgccttccagagggacaatagagaaagagtagatactaggttgagtcaaatcctcagtagggatgcgttgatatcagccgttgatttgttgtgggatcgctcgggttttgtttcactgaaagaagggaattttgattatgtagatagggatgaagttagttcagaaaaggctaagtctcaattgtcatcgactccacagtctagggttagattattgggagtggctgaaaagatgtatagtttcgatccgtataaccgaaaaagtttgttgaatcagactgatggagctaagtctatatgtggtnnnnnnnnnnnnnnnnnnnttccgttcgaggctagatggaagacgttgtatagctggatggaaggagtggttccaagttctactagatatcatgaagaaggggctgagattgagaagagagaaaattttgaaggctgtattcttaatccagtgagcagtaaagaagaactcgcatcaagaaatggcgatggttgtgattgtgtctttgatgccattggtgccaaggaccaatcaactgtaattgaaccaaggagtcttctattagcaacggttacaaaatcagtggtagacactagagtatctagatctaatgatgtgaactatctctttttgctttacaaaaataggtgtgt

SEQ ID NO: 7087 - DNA, 1665 bp, Arabidopsis thaliana landsberg
taatccagtgagcagtaaagaagaactcgcatcaagaaatggcgatggttgtgattgtttcttttatgccattggtgccaaggaccaatcaactgtaattgaaccaaggagtcttctattagcaacggttgcagaatcagtggtagacactagagtatctagatctaatgatgtgaactatctctttttgctttacaaagataggtgtgtcaataataaaggagtgaatatgataagttcaaaatgtagcacggattgtgatgctgaggtttcttcttcagggaataacttagacgaagactgcttatctatcgttgaaaataaacagttgcttgagaaagatagaaatgacaaagagactgaagtttgtttgtcctctccagaaacgactacttacgcttttgctaaacagagacatgcttttgctggtgcgttggcaggcataagcgtcagtctttgtcttcatccacttgataccgttaagacaatgattcagtcatgccgcttggaggagaagtctctatgcaatactgggagatcaattatatcagaaagaggtaaaatgttttacttgtgatgatcaaaaaagggagctttctgtatttgtttgtcactgcgccttgttgcttaacataattacatcccaatatgtattcaggtttttctggactttatcgagggattgctagcaacattgcctcatcagctcctatctctgccctctatacgttcacttatgaaaccgttaaaggaactctgcttcctctttttcctaaggtctcttttttctcgcatgtctccattcttctgatggcctgtttcgcagaataagtaaagtcatattactaaattcttgaaatttcaggaatattgctccctagcccactgcttagctggtggttctgcaagcattgcaacttcttttatcttcacgcctagtgagcgcataaaacagcagatgcaagtcagttcacattatcgcaattgctggtaaatatttgcaagcttaatctaaacttttgttaactgcttcatatacttccatgttctcttgtctcgtaaaggtttcctagcttaataaaattagttcacattgagatttgtttcccattaccctttctttaatttcctcttgtgctttcaatatgttctaatgatattttcatcacatatgaatacaggaccgcattggttggaatcatccaaaagggtggtctgctttctttatatgctggatggactgcagtgctatgtagaaatatcccgcactcaatcattaaggttcgttttgcgcacactataatgtgttcctaaaatgctctaattaggactagcgtctagatcgtccacactcttctgctattctttttctctgcttgtattgaattctgatgccaaatttattggaaatacagttctatgtctatgaaaacatgaagcaaatggtattaccatccccaggcccttgtggtgaaatggctcaacccacaacattacaaacggtgtgtttcttcactgcttcatcccatggcaatgtgcgctttatgattctcttcaatcttagcaatctgtatttttatttttaatatggaggacctgatgccccttagatgatattctgataattgctcctaacagcttacctgtgcagggctagcaggatct

SEQ ID NO: 7088 - DNA, 798 bp, Arabidopsis thaliana landsberg
aaaataatatttacaacaagctccagggagaaaccaagagatatgtaaagaaaataatcaatagtgtctctccaccaactagtttcaaaagttaatagcaaatcataagttcatggatagaagaatggtgattgactataaataaccagaattacctttagttcgtcagattcaccgtcaagcatgcttccatagctacgctgcatctggaaagattgatcaacttgctgaaacagttgccacttcatcatgcttatgggacttatttccagatttagtggtagttctgagactgtctcattgactggaatgaacttgtcccttagcagccaaaactcattgaagtaaattgtaggatagtaatttcctgtggtcggttctaccagtaagtctgcaaatctaaagttaagtaccaacatataacaaattgggcaagtagacaatcacaatgccaaaatgaaaaccaaaataagagacgtgacacaacttttgaccattcgaggacccaagaacttatgatccaacctttttaaaaaagaagtttaatccagcttatgctaaaaaaggcatgcagcagtcacatggatagtgccttcaaatgttatagaaagcatacacagagagagttctgtaagaaaccaaataattaataaacagttcatactttcgtcaaaagaaattgaaggatacgaggagcaatgtttggtggtacaccattctgtgaatagctgtcatgaaagtgaaagcagatattagtctaccagtatggagtcatattaaattcgatactgacagaca

SEQ ID NO: 7089 - DNA, 865 bp, Arabidopsis thaliana landsberg
ctgttgtttcaacaccagtttgacgattctttttctctcgcattttcgcagcttattaccgtggggcaatgggcattttgctggtgtatgatgtcacagacgagtcatccttcaacagtaaaactccctccatcaagtctttcacttactggtttctataaatctccttaaccaaaatgaacatctcttttactaacacgattcttgacgttattgcagacattaggaactggattcgtaatatcgaacagcatgcttcggataatgttaacaagatcttggtagggaacaaggctgacatggatgaaagcaagagggtatgaagcacaccacctttctccctgttccttattcacgactgatcctaataataatagcttcttggtcctgtcaaaattttcaggcagtacctacagcaaagggtcaggctcttgctgatgagtacggaattaagttcttcgaaacagtaagtctaacaatgctctcaatcttcgaaactagatgggtagtgtttacattgcttacacatctagctatatatgtgttgttgttgcagagtgccaaaacaaacctaaacgtggaagaagttttcttctcaatagggagggacattaagcagaggctttcagacactgactcgagggcagaggtttgttacatctctctctttcacatctttgcgttgttaggtctgaaaacgcattgatcattcatgttacgtggtcaattgcagcctgcaacgatcaagataagccaaacggaccaagcagctggagcagggcaggccacacagaaaatctgcatgctgtggaactttaaaacggtttaaaggaagttagtcaaaagtgggggaggaaaactaata

SEQ ID NO: 7090 - DNA, 1201 bp, Arabidopsis thaliana landsberg
gctctcgtccatatcagctttgtttcctacaagattttgttgacattatctgaagcgtgctgttcaatattacgaatccagtttctaatgtctgcaataaggtcaagagaaaagatccagaccaaagcagaaatgtaagactaaagatgttatgtatagagagacagaagaaaatttactgttgaaggatgactcgtctgtgacatcatacaccagtaaaatccccattgccccgcggtaataagctgcaataatgccaaaggaaaagagtaactgaatgttgactcttcaatctaatgttgcaataaaagaagcttatcaatttaaaaaactatatatccccaagcacatcaactgtacaaaagcatactgtgagagcaagcagctcatatgaaaaggagatcttcactcaccagtggtgatggttcgaaaacgttcttgaccagcagtgtcccaaatctgaagcttgatacgtttgccatcaagctcaatagttcttatcttaaaatcaatactgcatcaaaagccaaaagagaacagaacaaactcagagacagagaaacatacatcacagtctctaatctcttaaaatggttataaaatacaaacccaatggtagtgatgaagctagtggtgaaagagccatcagagaaccttagaagcaaacaacttttaccaacacctgcaacaagtaattgtgaaaacacattgctaaacatctcagaacagagatcgagagcatgtaatcaaatttgccagacgaatacacacacaacgatctttagcaatgaccagattgatttcgacagagtaattgaaaatgaatagattcagtaaattcaaaattttatcgattgtatcgcttgggatccgtaagagagaagacgaaccgctatcaccgatgagaagaagcttaatgagataatcataatcggctctagctctagcaggtggagcagccatcgaatctaaatgaggaaaacaaacaaacaaaaactcagagatcaaaaaccaaattgctttgtgtcatctgaagacaacagagatcgaaaattgaagaacctaaaggaatcagcgaagaatgcgtaccggatcaaaatgatgcatagaggagaagagaagagaagagaccttgttggttatagcaaatgagcagagaagaaaccagagagagccatggaaatggcggacggctaaaata

SEQ ID NO: 7091 - DNA, 2125 bp, Arabidopsis thaliana landsberg
aggtgaatttggggatttcaagtaagatcaggctttcacagtaacaaaagcacttttcttcactttcctctctgcactcgtcgcacttgccggaactgcattggtaagtcttttctatattaaagcctagcagttctctaaaatattgaaaactgaacggtgatgttttctatctgccacaggttttggtctggggaaatgaaccaggacaatcatcgttgattgaggtagtaaacaacatatttgcactgcttgccttagatctagtttgactcatcttattgatttgaatatatgtggtggttggtgattaaaatcttacagggattcacagcgggaggattcatatacatagctgttgctggagttcttgcagaaatgaacaactcgggaaaatcaacacttaaaaacagtgcctgccatttgatatctttgattcttggcatgagtgttgctctttgcatctctcttatagaatgatctcataacaattgtttttgtaaccgatatagaaatcccaagcttgggttttgttgttttgactacagaaatatactacccagttcttaactttttgaattgaaaaattaggcacatttataaacacacactgattaaatttcttttagggagagattgaaagcaaaggctaaagggtgtacaatctgaattttggttcgttttcggttattaaatttaaaaacgaaatgacaaccggattctgtttggttcggttaaccggtttgatacacttcctatttttataaattctctaattttgcaattcgtttgacctattaaactcaactgtagtcaaacttaacatctgtaattcatttaacagagtgttaattttgactaacattataattcaatttattttatgaaattgttgacaatatatttgggttttggtcaacctaaaatgattaaattatgattttttcaaattttgtttctatttaaaatattatcaaagaaatttagattttaactggtttatattataatttgttgcgtttcggttcggttttaatcgtgtaaaccggattggatagcagtacctgcatcaatccacacgtgtggtactcaggcgcacgaatgtagtaaaggatcacacgtgccagtttgtattataaagtgttaaaaatatcaaaaagaatttgaaaaaacagagcgattacaacggtagtaacggatggtaaaggtaagaagaactcaaaatagagacaaaacattttcagacatgacttttatcattctccaggttagaagaaagaagaagaaaacagaggaagaagcgagagagagagaggaataacagattaggagggaggcggctcggacgatgaagctgtggaaacgagctgccgccgcaatcaaagaccggaaaagcttactagccgttggtttctcacggcgaaacagctcttaccggaacgcagatctcgaagcagctatcatcaaagccacctcccacgacgattcctccgtcgactattccaacgctcaccgtgtctacaaatggatccgttcttctcctcttaatctcaagactctcgtctacgcaatctcttctcgcgttaaccacacgcgtagctggatcgttgctcttaaatccttaatgcttcttcatggtgttctctgttgtaaagtaccttccgttgtcggagagtttcgtcgtcttcctttcgatctttcagatttctccgatggtcattcttgtcttagcaagacttggggattcaacgtctttgttcgaacttacttcgcttttcttcatcattactcttccttcttgtccgatcagattcatcgtctccgtggtaacaacagaagatcgttggagaagacatctgattctgttatccaagagcttgaacggattcagaaactccagtctctcctagatatgattcttcagattcgacctgttgctgacaacatgaagaagactttgatcttagaagctatggattgtctcgtcatcgaaagtatcaacatctacggtagaatttgcggcgcggttatgaaagtccttccgtaggctgaaaaatcagaggctgcaacggttttgaaaatcgtcaacaagaccacatctcagggagaagatctcatcgtcgat

SEQ ID NO: 7092 - DNA, 2756 bp, Arabidopsis thaliana landsberg
cttgtcgtcaagcagtatattgtttgattttatgttccggtggaagattctcggcttgcaatcatggtgcaaataggcgagaccctgagccgcacctaaagcgattttaaatctcttagaccaatccaagttgcatgaaggatcatgaagtatttctccaaggcttcccttgggcatgtactcatacagaagcagatttgatccttggtgattgcagaatccatgtagcttgacgatgttacggtgcctgatattcccaagagttagaatctctgctctaaagctattatccacattgttgttgttgccgccttcatggtttgatgccagcttcttgacagctagagtgtacccggctggaagaaccgctttgtagacggttccacaagctcctctcccaactacaaagctctcgtcgaaattatcagtggctgcaactaaatcttggaacgtgaatccttcctttggagggaagtatatgtccaaagacatttccgatggttggccatcttgagcagaagaagcgactgttctcactgggcgtctcatgaggtagacaatgagagcaatcagcatgagagagaccccgccaatcacagctgcagtaatggctatgattttactcgaacgcattcctccgggcttcccggttgactgagaaggcgcgaaaggctgtgtttggatacactggttgagcggcggaccgcaaagcccttcattaccgatgaagctagacatggatatgttacggagaagtggaataggaccagttaagctgttgtatgagaagttgtaaccaagcaagctggagagattagcaaaagagcttggtatttccccagacaaattgttgttgttgaggagcaggaactcaagcataacaagattactgagctcaggtggtatttctccggtaagcttgttgtaactgaggttcaatgctatttgcaaacccgtcagactgcccaactcccgtggaatgctaccgttgaacaagtttccacccatttgtagttcggtcaagcgagataagttccctagagccacaggtattgtacccgaaagattattgtttgagagcttcagaagctcaagctggtagagggaacctacctcacttggtaaggttccagagaaattgttgcaacacatgtctagtcgctgaagcatcttgcagttgaagatttcagaagggacctctccagtaagcttattggatgagatattcaaggtcccaagctgtgaaagcatgccaatctctctaggtagctcccccgtgaagccattgtctgctagctgcagcctttgtagggcactgcagttcccgacctccctagggatggaaccacggaatctgttctgtcccaactcgatggctgtgacattaacctgtttacacaggttggatgggaaccgaccaacgaggttgtttctggctagacgaagttggaccagagttttgcaagtggtgattccagtaggaatgttgccagagaggttgtttgtacccaagttcaagatgatcatattggagtgaaggcagaggtagcttggaattcttccactgagatggttatcggacatatcaagaacccagagatcgctataccagccaagttttggaggtatggtcccgctaagggagttctgaaacagctgcagcatgaagagtcctcttagatactgaaatcccaggggaataggacccgttaaagcattgatggagagatcaagctttgatagattcttcaaagtagaaagctccacagggatggtacctgtgagttggttctcaaaaagataaagaagctcaagcccctctatgttccctaactccaaaggtatctctccggtcaaagcgttttccgagaaatctatctcaattgcatatgagagattcccaatctctcttggaatcgttccattcaacccgtttctgtaaaggtagagaaactccagcgactgaaggtccccgagctctttcgggattggcccgacaagctggttcttgtagagagcaagggtttctaaacttgtgcagttgctaatctccctggggataaaccctgagaactcattttcccaaagaatcacctgtgaaagtttcttgagcattccaatctcttttggtaattcaccactcaactggttctgtgcaagaccaagcatgaccaagctctcacatccaccaatctcagaaggcaaacttccagagatcatgttctgaccggctcggaagcttgtcagtctcttgaggttgccgatggaacggggcaattgtccactgatgttgttactgtaagtcaccagttgagagagagacaaaaggttcccaatctccacagggagagaccctgagattctgttgttgtatatgatcagattctccaaagacacaagcttacctatttccacaggtatctcaccatcaaactggttattgtttagtttcagaatctccaagcttgaacagttgccaatttccttaggaattttccctgacaacccattatatgacagatccagctgcttcagatgaaccaatccacctatgcttggtgatagcttacccgagagaaccatcgaagacagattcaaggacaaaacctctggatcactcgaatagttgctgcacatcacgccagtccatccacaaggtacagaatcatttgaattccagtttctcaaattctgcttagcataaacaaacttgctcttgatttcaagaagatattgaccttctaagttcaaccctg

SEQ ID NO: 7093 - DNA, 1838 bp, Arabidopsis thaliana landsberg
aaaacgcagaacgtgtaataacgcgagtccacagccagcgagagtgtttggatgcaactcttgttgctcagaaaaatgaagtatttgctttgctctcaaggtattacaacacaacaacacttcaaagtaactaacttgtcttgtaagattaccttaaaaaaactctaaatactctgtttctttctctttttttagggttgaagccaaaggcaaaggcattctacaacaccaccagatcattgctgaatttgaggcaatgcctttagagacacagaagaaacttcaaggtggagctttcttcgaaatcctccgatcagctcaagaggcaattgtgttaccaccatttgttgctttagctgtgagaccaagacctggagtttgggaatacgtaagagttaacctccatgatcttgtctttgaggagcttcaagcttctgaatatcttcaattcaaggaagagctcgtcgatggaatgtacgtttttcacctctttatatcttgtctctcactctcttgttgcccttttactcaactaatgtcatgactatatcgcagtaagaatggaaacttcactcttgaacttgactttgaaccattcaacgcggcattccctcgtcctacgctcaacaagtacattggagatggcgttgagttcctcaaccgccatctctcggctaagctcttccatgacaaggagagcttgcatccgctgctcaagttcctccgcctccattcccacgagggaaaggtttgatcacaagccactctcctctccatttgttgtctcaataacaaaagtctaacatcgctttgtctttgcatctgtgtagactctgatgcttaacaataggatccagaacctaaacacactacaacacaatctgagaaaagcagaggaatatctaatggagctgaagcctgagacactctactcagagtttgagcacaagttccaggagattggtcttgagagaggctggggagacaccgcggagcgtgttcttaacatgatccgtcttcttcttgaccttctcgaggcacctgacccttgtactcttgagaatttccttggaagaatcccaatggttttcaacgttgtgatcctctctcctcatggatactttgctcaggacaatgttcttggttaccctgacacaggtggtcaggtcagtaatgaaacattttgaagatttcttcttctttcttcattccttgatcgatctttaatctcgtatatatattcttgaaggttgtttacattcttgatcaagttcgtgctctcgaaacagagatgctccaacgcatcaaacaacaaggactcaacatcactccgagaatcctaatcgtaagcttatagtgattcttcttgtgtgtgtatgcaaagatgtctaaaactgttctcttatgttttcacagatcactcggctgcttcctgacgcagcaggaaccacttgtggtcaacgtctagagaaagtgtacggatctcagtattgtgatatcctccgtgtgccttttagaacagagaaaggaatcgttcgcaaatggatatcaaggtttgaggtctggccgtatctagagacttttaccgaggtataaatccattttcttcatgcaaaaacatggatcttgttcacccttatttgactcaaatatatgaataatgtgccttgttttttcacaggatgttgccgctgaaatctcgaaagagttgcaggggaagcctgacttgatcattggaaactacagtgatggtaatcttgttgcatccttgttagcacacaaacttggtgtcactcaggtttgtctcttgtttctatccatagccattgagaaatatg

SEQ ID NO: 7094 - DNA, 1030 bp, Arabidopsis thaliana landsberg
  unsure (1)..(1030): unsure at all n locations
ttgttgttgaacaactccaaccggctgagtttcttcatttcaaggaagaactcgttgatggtgtgtatgtgaccaatttttttaacttcaacttctgttttctgatctctctgttctcaacaatgacatttttatttgcagtaagaatggtaatttcactcttgagcttgatttcgagccattcaatgcgtctatccctcgtccaacactccacaaatacattggaaatggtgttgacttccttaaccgtcatttatcggctaagctcttccatgacaaggagagtttgcttccattgcttaagttccttcgtcttcacagccaccagggcaaggtatttgatcaaatctcttctctattaaacgcagaatcttgtttgaatgatttttgttttgctgtgtagaacctgatgttgagtgagaaaattcaaaacctcaacaccctgcaacacaccttgaggaaagcagaggagtatctagcagagcttaagcccgaaacgctgtatgaagagtttgaggccaagtttgaggagattggtcttgagaggggatggggagacaatgcagagcgtgtcctggacatgatccgtcttcttttggaccttcttgaggcgcctgatccttgcactcttgagacttttcttggaagagtaccaatggtgttcaacgttgtgatcctctctccacatggttactttgctcaagacaatgtccttggttaccctgacactggtggacaggtcaggaccattatcttcttctctttctagtagagataaacttcttgttctgtctttatcgatgagctcactattttgtgatctttgcaggttgtttacattcttgatcaagttcgtgctctggagatagagatgcttcaacgtattaagcaacagggactcaacattaaaccaagaattctcattgttagttntagtaattttgcattaaaccatggattcttgtggatgtctgaatctcactgtgtgttttggttatgtttcagcttactcgacttcttcctgatgcgg

SEQ ID NO: 7095 - DNA, 2113 bp, Arabidopsis thaliana landsberg
aaacatgcaaaagtttaattgaccaaaaagctgaaaagcttgatggcgtttcaaactaatgcactagttaattcaatttccataattacgtagtagtttttttggagattatatatttattattcacgaaaaatgtggataagacaaataaaagacaaagcatgctgcattgcttgttctactttttctttttctttttcagacattttagcccaactatatactactcttgattaatttgaataggattacatagtattccataacacgagacaaaataacaatatttggcaaatagaaatgttgtctagttgttttcctcgtagataaagatagtagtctcgactttaataattggtttgcatagaaaagagaagatagtgttttgtatagtactaggcaaaagtcaaaaagattcttttgaaagagaggacccaaatttacttgacgtaattattgcatttcatatacgttcttcttctctccctacttgatttttattcaaaaacactagcattaagtcactctttcgtcctcagatagtgcgcattgcagaacacaaaatctctacaagaaaaccccaaaaatggacggactttgctacgtcatcttcatcatcttctccctgctatcctgcgctttctctcccttatcatacgcctctccggccactttcagtcgccgtcaccttcttcaagctcctgtaactgatccttccacattctcaccgccgttcttcccactttacagctccacctctcctcctcctcctccttctccgccgcagcctcttccgcctcccgcccccacttttgcgacatttccggcgaacatctccgctctcgtcctccctcgctcccctaaaccgcaaactccttcccgtacactccttattcctgctatctccgccgtgctcgccgccgcaacattaatcgccttggcctttttcttctacggacggtggcgagggcaaaccagtcatttcaaagatgaatccaagagcttagcttcagacattagccaatcccaacaacaaactcttccatgtccccctccaagaaacaacaacactcaaaacaaactctctgtagctccttctacctccgatgttctctacctcggcaacgtcgtcacttcctccgggtcgggttttgttaaaccggagtcaccagatatctctcctctcccgccattacctgcccgtagcttcctcctgcaacatcactctgaagctaatcttgatgaagaagaagaagacgacgacttttactcgcctctcgcgtctatagctggtcaagaatcacgagaccggagaatcaatccgtacagtaactgttcttgctctatctcttcacactcggattctccggcaatgtcaccgtcagctgcgatgtctccaccgatgaactcgacggctccacattggtcaactaaccaaaacactcactctccgtcgtcgccggagagaacagtaaggaacaataagagatatggtgggcagtcgctgagaatgtttagcctctggaatcaaaatctagggtttccaagaatttcctctgcttctacttcaccagagagaggtatgattagaactccagacgcatatgctcgttcttctatgtactcttcagtttccaccacgccggatcggtttttccgcaaggttcttgatagttcgccgccgagatggaacgatttcagtcgaaatgtcaagtctttgtttctttcttcaacttctgcatcacctgctagagatttttgtatcaacatctctgaatcttctagaagtttgaaatcttcttgggaaaaaccagagcttgatacaactcaacagagagaatcggctgctgctgctgttactcttcctcctccacaacgaccaccaccggcaatgcctgagccacctcctcttgtgccaccgtcacagtcttttatggttcagaaatctggaaaaaagctatctttctcggagttaccacagagttgtggggaaggaacaacagatcgacctaagccaaagctgaaacctttgccttgggacaaagtccgaccaagttctcgtcggacaaatacttgggaccgtcttccatacaactcttcaaatgctaactct

SEQ ID NO: 7096 - DNA, 1067 bp, Arabidopsis thaliana landsberg
tgttaaaaattgatgaagcttcgaatatgaagaaattgaaaagctattacatgcaagttcgtaaccagcaacaatctcttgaccgaaaatggattcttccattagcaatcggatccatttgttctctgtttctcttgttgctaacgaacttagcttcttcttctggtcaaactcgtttgattccattttcagtttacggatttagatcctccgtcttcgtcgaatccaagataaatccagtatccgtctcactcaccgtctccgtctctcctcctccgccgccacgtctcgcttatctaatctccggctcctctggtgacggtcagatgctgaaacgaactctaatggcgctttatcatcccaacaaccagtacgttgttcatctcgatcgggaatcttcaccggaggaacgattggatctcagtggttttgtggcgaatcatactctgtttcagagatttcaaaatgttcggatgattgttaaggctaatttcgttacgtatcgtggtccaactatggtggctaatacacttcacgctgcagcgattttgcttcgtgaaggtggtgattgggattggttcatcaatctcagtgcctctgattatcctctcgtaacacaagatggtaacgaaatttagatcttataatctcagactctgtttattgttttaattgaatcatttgaggtttattatgtcgattcgattttcagatctgttgcatacgttttcgtatcttcctcgagatctcaatttcatcgatcatacaagcaacattggctggaaagagtgagtttagcaagctacattacaatctacaacagtttgtttttgacaactttctctgataattttggtaaaaacttgtataggtctcatagagcaaagcctataattattgatcctggtttgtatatgtcaaagaaagctgatgttttctgggtttcacagaagagaagtatgctacagctttcaaactcttcacaggtgctttcatttttcataatctgtcctgttttgggtaatcacataatgggaatgctaaatgtagagcctccttaaatgtag

SEQ ID NO: 7097 - DNA, 1983 bp, Arabidopsis thaliana landsberg
acccggagctggttcttacacctggtggattaaagaagaatttttaacttcagctagctctgaggtacacctgcaccggctttgttaacatgatggcacagtatggaagaccgatgatgcccaaaatgcattatattcaaccaataccagtcaggcatattgacttgcttaggcatcaggcgatgcaaatagttgcaacaagactatcaaggtccgagccacctctgagacgagaggttgtggagtacatgcttgatgtagactaccatatgttcagtctcaggagaagcaaagctaatttcagcagaatcatgtcgcttctctcctcggtcactctggtctgcaagtggttcaacgatatctgcacatggagaaacccgatcacaacgtgtctggttcacgttctgttcctgattcttgtctgctacccagaactgattttacccacagtcttcctctacctctttgtgataggcatgtggaattaccggtacagaccaagacacccacctcacatggacgctcgagtgtcccaagcagacaacgcacacccagacgagctagacgaagagttcgacactttcccgaccagcagaccggcagacattgtcagaatgaggtatgataggcttaggagcgtcggtggtagagttcagacagtcgtaggcgatctggcgactcaaggggagagaattcaagctcttcttagctggagagacccgagagcaactgctttattcatcgtcttcgcattgatctgggccgtgtttatctatgtcacaccgttccaggtgattgcaatcataatcggtctgttcatgctgcgtcatccacggttcaggagcagaatgccttcagtacctgccaatttcttcaagagattaccagccaagtcagatatgctactgtaagtgtaaaagacaaaaaccaaaaaaaaaaaaagattctatttgttgtagtttgtaacaaagaacaaaagtggggaactttgtagaggggagcgaaggaaactagtttttgcctctgaggttgaatcattcgtatattgtgtattatacgtgagcttaatcataaaccaacaaatattttttggggtacaaaatattgctttgggtttgtcccttcttatatatatctacacaaaatgcacactcgaacacattcacaaacatgcaaccaaaaaagaagtgtctccgtgacgttcttggggagcaaaatcattggtttcgtgattaaatgaccttcggcaccttatcatctccgacaagccatctggctagccaacaaggatcactagcaaagtgtttgcattgcattggaatgatcccgagatcgctaccgatctgagtgtattcattgaaatcgctttccatctccgtttcttcttcttcaatgtccattacatcgattgtgttcatgcggagaacttccgcaaagttctgttcaaactcatgatcgttctcaaatggttccatcgctggacactgtttaaatcagatcataaaagaaacggaatattgatcttagtttctgcaatctatcaatatatcattccagcaagataaaagaatctgaacctgacagaattgggcgtaatgtctgtaaatttcgctgttttcatcttggtcaccgaggagagtgccaccataccaaccattggcttcattggttgatgtgatcgatagatacctataaattgaaacaactgaataagtgatttgatgcactggcgacaaaatctgaatgttttgccaacagacttggtcaatagttgagggtctcattcagtaatgagtttgctaataataaccagaatttcaatattgcattctgaaggatgtttacatgtcagagagaagaaaaaagaaatcagtacctttggaagatatctccttgatgacggtcggacttagaaagccagtccaagttgcagaaatcgttgactctctcagtcgaggttactcctttctcactatcgtctgc

SEQ ID NO: 7098 - DNA, 4419 bp, Arabidopsis thaliana landsberg
tgcaaattgatcagcccaacttggtggccccagatattgctgttcatattcagtagcccattccccgggggctgaagcttgcttgacctgattctcatcaataataagttcaccacggctcatcttggaaacaaactgaaggaatcttgaattctgcattcaccaaacatgtttgccaagttttacataaatcgagaacagctcagcacatgaagtcaacaggaaaagcataattaaaatttgtgatatgatttcagagatattcgaattctagaacatagaccaacaaaaaaaaattctatgttcagtaaaagatcacagcccagaaaagagatatgtcgtccaacagtacagtttacagcaacctgaccgactgatactactatcaaaggctgtttagaaatgaaggaattcacttcgaaagcacataattattaatggtaggttatactgacctgaaatttcggattcccatcttgagatagtgtatgggcaagcttacgagtctgctccattgcagctatattttgcatatccatacttctcatttggcttgacatcaattgagattgaccctttagaaagttcaagaaaataaaaaggatgaggcgccaaatattttcagaagaacatgataaattatcagaaagccaagctgttgggatatcaaatgcgactcaaacactgatgactaatacagcataaaaaaagtcacaacagattcaggcttgtgaacaactatgccctagtgactatcgaaatcaaagtctacactaccaaaataaatgccctcataatgtctttgatactcattgaaagcttataaacatatgtttgggatgggcaatcaaagagaagtttcaaacaactgaaggaaaaaagttctatcatatagctatttatgctagttacctgctcgaactcagtagcccacccattcacaccatgttgttgctcaaaagactggacccatgaatcaggaccaccatgatccatcccatgttggttaaattcagccgcccaattgtcagcaggatgtaaattaggtttcacaacagcttgagactcattccagtaatcatctagctcccgaaatctcccgggaacatgacctcgagcttgtatcccatcatcaatatctaaagatgacaataatgcgtttaccttgaaaaacaatgccgaacaaaatattcagccaacgacatggagaagagaaaacggcttaggccatcggcaacaaacaaaaggcttaactatactgcacagctggcatggtctcgagaaatccatactagataggaacaattaccaagtaaaacaacagctataattcccaaacaaaagccctgacccacagatgattgtgatatatgacagtgacagtgctacctcgttgcattccaaaatgttacattttgatttaaactcaagatgaaggagagtggacctgaactttcttgtaattacacttcgttatataattgaatagatcttgatttcaaaagggcaatgggcatgaatgatataacaccaaaatattaagtatatactcgacccttaaaacctaagttgaaagcatataacacaatgttgcagctacagaacactatcagataaatggcaaacctgagaattaataaattcctctcccctatcggcaaaaaaatgccgggccattatgctactacgatcacgtatacattgtttgtcactttgtgacaatcctagaactggaacaggtgctggacgaaatggaataccaccacggctactctcaacaaatgaatgcagaaagtttgataaaactctctgtgggggtcctgcaatatataagcaatggaaaaactaatcaagcaagcaaacgaaaaatgcctcactcgacattaggctatataactaagacagagctatgaatattcaacgtgtcattcaggagaaataggactcatggaaagaaatgaccacactatttatttcatgtcgctatactaaattactaactaacaccttcagtgttaacttctcttcctacaaaaataatgttatgtacttctcgattcaagatgaatatgtgaaaatatatactaccttttattcaatatcaaaaccactacatctaaccgttttgtatccgggattaaataaaagtggtatagatcaaatcacaaaccttcaaatgtaggctgaactggctcaaacataggtcccattggaggcataggtccaccttgctgtacctcatcccaagctgcacccaaaccattctgatcaacagagcgaaaaccacggaagaactctgacccctaatgtaaaaattgcaaacccatcagccatcacagaggctagataatcagagtcaatactaccattgtaaaaccaaaactttccacaacattaacctgagcacccggttgcagaagtggctgatctaactcagaaccaggaagtgaccttatctgttggtcttcagagtaaaattgtggcccaggacctgaccggtttgcattaggtatctccttgagcctttcctgcacaacaaatcaccaatcatcaacatttcttcaaattctcaggaaattttaaacctttaaacaattgtcagccaaatcacttgacataatcgaagaacgtctaaaaccctaacactacggaaagaaaaatcgaaacttggcaagcaaataacaaaacccaacgaaaaatgagatctaattcgacttcttagttccaggagaaccaaggaaaaggcgaagaatggaatcaggagacttcaaatgtcaacactgtttcgatcaaaaaggaatcaggaagctaacctgggttttggaagacgaaccaagtaaagcgttggtgagagctccgagaggattagaagaagaagacgaaccaggaacggcacaagcggctccgccgttaacaaggtctctcatcgccatgtttccaacgggtttctactcctccgccgcaatcaccgtcgttgaatctatcagtatggtttcctccgttgtccggaattgatcatcaacctcccaaatcctaatctttagtttggctcgtctcgtggcggtgttttttttgtttgttgtgtttggtcacagcttcgtaagaaattattaaattttttgatagtattttggtaattaatatttatatattatccacaccacacacatttttaggctcaccaacacatttttgtttagttatttatttttgtgaaaaaaccgttttttacagtatccgtaattaaaaatgaattgttgtgaatatagtttttttttatctttctttatcaagatatgttttatctttttgtccgatttgctgccacttttgaattttgtagtttcctattagtgttgaattatatttgcttgatcataccaaagataaataaattatattgcttgatttttgctgggtttagttatatttcttgattgattgtgcaatgcgttacaaacgaaggtagattctactcttgtactcatatcacacatttggacgaccaacatgacttcactaatttcatcaataactaaaaaaaaaaaaaaaattcatctacatcaacaatagttacaatatgctaggcatctctagatttttttttcctttcattaacttgcaagaatttacacactagaaatcaaacattttgtggaaaaaattataacctttagtctaaccactgaactattgaactttcatattgaaaaatttgatgaatgttgtctgttttcaaatttctagtacattttttgtcaacttcagatatctgattttatgagtctcaatcgtttggtttatcttattttcgtttgttaattaatataattagtttccaaaatgaaaaaatgtaattggaaaaacaagtcatgaggcccaaccgcatatataagtcctacgctcggcccatacagaaaaaactaatatccatatagttgacccggaagacccgatctaggatccgaatccacattgatttaaataaaaaaaatcttcataaaaaaactaaaaacccaaaaaccaaagaattcatcaaaggagagagagatcgacaatggcaccttcgtcatcaagcggtttaaccttcaagctacatcctttggtaatcgtcaacatatcggatcactacactagggtcaaaactcagctcaatcctcctgcttcaatctgcgcaagcggccatggctcaaacaacggcgaagcaatgttccagcaaaaccctagggtttacggatgtgtgatcggtgtccagagaggtcgtactgttgagatattcaacagtttcgagcttttatatgatccttctactcaaacccttgatagatctttcctcgagaagaagcaagagctctgtaagtaaagctcactctttttattctcagactattgatgcaatcgtaaattaaagtttgaact

SEQ ID NO: 7099 - DNA, 770 bp, Arabidopsis thaliana landsberg
atcacaactaagaacaatatatatatgtgtatggatcgatcaaatcacaaaagtttgttgtctttaatatggttacagggaaagttatttgatggaacaataatcgcggtgaaacaactttcgacaggatcaaaacaagggaaccgcgagttcttgaacgagattggcatgatttcagctctgcaccaccctaatctggttaaactatatggatgttgcgttgaaggaggccaacttttattagtctatgagtttgtagaaaacaacagtctcgctcgagcattgtttggttagcaacactctagctccttaaataaaccgtcaaaactgaatttagttatgatttgtttccctttcttgataaaggtcctcaagaaactcagttgagattggactggcctacaagacggaagatctgtatcggagtggcgagagggctagcatatctacacgaagaatcgaggctaaagattgtacacagagacatcaaagccactaatgtgttgctagacaacaactgaatccgaaaatatcagactttggtcttgccaagcttgatgaagaggacagcactcacattagcactcgaatcgctggaacattgtaagtcacaaaatcaatattcaatgataaaagattatatgctatgtgagatttgcttataagttataacacatcatctttttgcaacatttatgcacaggttacatgggtccggagtacgccatgagaggccatttgacagataaagctgacgtttacagcttttg

SEQ ID NO: 7100 - DNA, 1329 bp, Arabidopsis thaliana landsberg
  unsure (1)..(1329): unsure at all n locations
agggaactctagtttctttggattcaaggtatcataaaaacctagtctgtctttaaagcttatgacgaagagaaacatagtagatcttcccgaggatttggtaatggagatactcgcgagggttccgaccgtatctttggtccgattacaatctacatccaaaagatggaacgttctgatcgaagataagagatttgctgagcagcactttactaatgcaccaaggcactctctgcttnnnnnnnnnnnnnnnnnnnnnnnnnnnnnnnnnnnnnnnnnnnntcatacaattcacaacaacaaggtaaacataataagtcaacttcgcctgaaagatcctctttcaaattttttagaagaagttgatatatgcaacgtctttcattgcgacggcttcttgctatgcaccaccgtagacaatagactcgttgtttcgaatccctgttctcgtgatactaagtggatccaaccaagaatttttacaagaaattcgatatatttgctcccggtaaatcatcatgcaccaagtccaaaatcatgaggatggatgaattttattattatgataggccagaaaaatattaactacgaaatctatgactttaactctaattcgtggagagttgttggtaagattacggactggttcataccaaggtgtatggacagtggcatgtctgtgaatggaaacacttactggcttgcttctactaataaagacttgaccagtagtagttttttacttggttttgatttttcaacggagaggtttgtaagggtgtctcttccgggtgatcatctctctgatcctgtttttgctttagcagttactagagaagatccaaaaatatgtgttgctatcattcaggaactccatatagatgtatggattgcaactacgattgagagtacgggagctgcgtcatggagcaagttcctatcagttgaattagcaaatctctacgagcgtatttgcttggatagttggatgaatttcttggtcgaccagaagaacaaagttttggtgtatcgtgatggtaactattggatctccaatgttttcttgcacgttgtgggagaggataaatgtatacaagtggatcatcatgattcagtgtctagatgctcacttgtcgtcaattatgttccaactttggttcatatctaacaaggtttgtatttcttggagtgaggcaaaagggaagtagctagaacatctagtaatctatgatcgtcatattaaattatttattatctatccaagtcatgatatttgattttcaaagaaagtcatctactattttctctttattatgtcatataacacta

SEQ ID NO: 7101 - DNA, 811 bp, Arabidopsis thaliana landsberg
gaatattgacaagactacaagagtctaacatcccttgttgaatcaaactttttttccaggttgagtggtcactatagagaacttgttcagtactcaatattctgaaaatctcaacatcacggtaatattatttatttattttgaataacaaggccctgtcttatttgagtatgaaatatatgactttacccctaattcgaggagatttgctggtcaagctagcgactggttcataccacgattaaaagagcatgtcatgtctgtaaatggaaatatttactggcttgcttgcacgcaagacatagaaagtggtgatttttcaatagagagatttacaagtgtgtctctcccgggtgatcatcctttttatcatcatcctatcactttatcagtgactagagaagatcaaaaatgttgtatgttagctactcgtgccatgcaagtagactatatagatgtatcatgtatggattgcaactaagattgagggtaccggagccgcgtcatggagcaagttcctatctgtagatttagctaatctctacaagcctttttgctttgctagtgggatgaatttcttggtcgaccaggagaacaaagttttggtgtgtcgcggtaagcatggggtctgcaacgtttttttacacgttgtgggagaagataaatgtatacaagtggatcatgatgaggaagaatctcaatggtcacttcttaatcagttatgttccaacgttggttcaaatccaacaaggtctatagttcttgaagtgaggcaaaaagaaagtacaagagctagtagtatctatgaggt

SEQ ID NO: 7102 - DNA, 928 bp, Arabidopsis thaliana landsberg
tttaccaactcctccccgtttttatttttatacttgctccattacattgctaagggagtagggactattcttcattgctatccataaattaacgtttgttccaattacatatttataattagtatataacatacaaaatcgtttcccttgtctagtcactaataaagccaaatgactatcaccctctgggagagactcacttccaaatctctctgttgagaaatcaaaacttagtaagaattgttcactaatatcaaaccagtaagtgattccatttacagacacgccactggtgatatttggattgaacaagccggtgatcacaccaatactcctccacgaattagagttaaagtcatagatttcgtactcgtaacgttcttggctattgttgataacaagatcctcccccacgatgttgtacacgtaacgttcttcgctaggattgataagacgaccctgcctcaagattttgtacttgttgcaagaggatctaccgagagcatagcagtcatctttcttgtagcaaaatcttggttgaatccaccttgtttcacctgaaagcggattccaaaccaccagtctatagtccttggtggtgcatagcaataagccatcgcagtgaaagacgtggcctatatcgacttttgttgaataattattagaaagatgttcttttaggctaaaatgacatgttatgttaacatatggagcaacgctattgtgaattccacggagattggatctcactgaataaaccttatgatcaatcaacacgatagccatagagtgccttggagcattagaagagtgcttcttagaaagtttcccatctttgatcaaagtgaaccatagattggatgttgatcgtaatcgtgctagaaatacagccggaactctagagagtatctccacaaccgaatcctcg

SEQ ID NO: 7103 - DNA, 732 bp, Arabidopsis thaliana landsberg
gaaagaatgtgagagcaaacatattacttacttaccctttgtttctgtttataatgatcattataaatcactggctccagggccttctaccttcttcaaagaaccttgttggatttgaaccaaagttggaacataattgacgagaggtgagcatctagattctgcatcgtgatgatgatccacttttatctatttattttctctcaaaatgtttaagaaagtgttggagacctcattttaccaggtaacactaaaactttattctcggggtctgacgaagaataacaagtttactaacgctcaaaaattacattgcaaaaagaatattaaatacaagaattacaacaagaacaagggtattcaaattacaaattctatagcaaaaaaaaaaaaatcttaaaaaatgtaataactgataacaaacaattttacaagttcactaacgctcgaaatacattgcaaaaagaatattaaacaagaattgagttaaaattgtagaaattgttgtgaaaaaatcaatattgaaattgtgttggagaggaagcaaactctatgtgatcgtcaagttgtggagtttatgtaatcgtgattcgtgatcgtgaagttgtggagtttatgtaatcgtgattcgtgatcgtgaagttgtggagtttatgtaatcgtgattcgtgaccgtgaagttgtggagtttatgtaatcgtgattcgtgatcgtgaagttgtggagtttaag

SEQ ID NO: 7104 - DNA, 1187 bp, Arabidopsis thaliana landsberg
aaacagttggaatatcaaattagctaaactcctgatgactcatataactaaagcaaatctcagaaaactttctattttaaaagcttttttataaaaaaagaatttgcaatcagaatgaaaacaaaagaacaatttcaggtaaacataattatcagatttgtcattatcacgttaatactaaatgacgccttcaaaaaaaaaaaacgcctaacgtgcacggaaaatgacatttaagtgagtttctactaagttctgcagtgcaataataacgtgtctgcaacttcttaaacgtaactgcctgtagtaattaattatacccacactttatgctaacgtaagcttcttcaatagtagtaaaaaggcgccggaaataaaaagtttttttacctgataggcgtgagtgagtagtagcctagagtaaacagggttagatcggcggaaaacaattgatgcggcggccatggcggctgctgtttctccggcaagatccgacccgggattactcggatctatcctgtaagctttccggtccgtcgtcatttcttctggtctctgccaacagtaatggtcggtgttgccatctccaacctaaaaaaaaattccaaaaattaaattaaaatcatcaaaactcaatttcagttttgtaatcattaattaacagtattaataaattaaatagtatttattaattaaaatatagtcagtattaaacctcgccgtaaaggacgttgggctcaggatgggctttgatgaaataatcagtaccccatttaatggcgtcaatggagtttccaagctcgccgctggcttgtaattgactcccgtactcaatcacactccacgccatcatcgtcaccgtaaaagccatcggtaatccaaatttcacattgtctccggcgtcgtagtaacctccgaccagattcacctgatcaacacaaaagattctagttagtactgtatgaaacacgaacagtgttggtgacgacgttgtctgaacggaaaacagatctatagctaatttactgaaatgttgtctgaataaactcaaaatcaggtggaaacagagcaacaatgtcggaaacaaaatctagaaagagagagagagagagggagagatatacgccgcatgatttgccatcggtgagaccggagtgagagcgccaagtgatctctgagtacgaggaaga

SEQ ID NO: 7105 - DNA, 1294 bp, Arabidopsis thaliana landsberg
aggagcttcagtgctaggaactgatggtggtggtggtgaaggaggaggttgaacaggattcgttctgttttggttgtacacgtttggcgttgagatatcatcaaggccaatttcacgctcaagggtacttttaaaatctcttgaaacatcctaaaacaatcgacatgtaaacaatcaaaaacagttaggcacaacatatacaaacaaacctcataatttctgaaagtcttgagatagaaattaaacctgtagctctctaatcgttggctgaaatgtacgcagagtttttccaagattccgagcaacctgcacggatcacagcaagtaaaacacttcttcatagatctaaagcaactgtaaaagactatatggagaagcaacagtgatatcttgagctatccatagagaatcaaacacaattaagcaaaaagctcatctatctctagcctaatctatacactatactccaattctcctaagatgaaactaaacagtactaattcataagttgcttaaacctataaaagctatgattccaaatcaatgatcaagaaaattgccacacacaaagacactaacctcagcaagacctttaggaccaaagactaacaaagcaacaacaccaataaccaaagcctcaggtgctccaacaccaaacagagacgcacgaatcatcatactcttacatcttctcttcttctctgcacacaaaaaccacccaaacttcagaaattaaacaactttacaaaaaacccagaagtaaagaagcaatcatatctctgaaatcgaaacctgggtttgaagatttcggcgagattgagaagcccaaatgctttaaaccaatgtaaggagagaaacgagaagaacccagaagagaaaaccatgaggagaggttaggtttcgaagctttataacgagattgcagaggaggataagagaaaaggtgagattttgtaatcgttggtgatgaagaagaagaagctataatctgtaacgccatggccatgggcagcttcgaaattgtaatatagttttgtgtgtagctttgaagactatcttaagccataaattcactccctcagcttcatcaccaatcaaatgtccagagcttgaaaatgaaataacaacacacacaaaaagataaaacagagaaaatctaaattatcctttggaaaatctgaatgagatagtcgcaaacacagaaatattgggccgttaaaaatgtatgatattaaatttgggctagatttattgggcctgagctgagttctttgttgctctctttctcttggat

SEQ ID NO: 7106 - DNA, 602 bp, Arabidopsis thaliana landsberg
ttttaaacttaaaaacttgcatagaagctcttaagttttgtgtcctccaatgattaaaaatttaaaaccattaatggggttctctaagaaaaaactaaaattttgtaaaacaatacatatatctttttgtttggttacaatacattgttttataatacatattcagaaaagaaacaactcttggttgcacatatttgcttttactcagtacaatacaaagactaacaaagcaacaacacctgccaataaccaaagcctcaggtgctccaacaccaaacagagacgcactaatcaccatactcttacatcttctcttcttgtcagcaaacaaaccactaaactataaaaattgaacaactttttacaaaatccagaaaaaatgaaataaagataagagaaatcgaaacctgagtttgatgatttgggcgagattgagatgcccaaatgttttaaaccaatgtaaggagagaaacgagaaaaacccataagtgaaaaccatgaagagagcttatgtttagagcatccacattggtgggctcttaatataattcttagagatattaggatttaatttaatgtttaaatagtaaaagttaaaattt

SEQ ID NO: 7107 - DNA, 547 bp, Arabidopsis thaliana landsberg
  unsure (1)..(547): unsure at all n locations
ggaactgccgtttgactattgccaagcccaattctaaacttatttagatttattcccaacaacgggccgagtattagtgacaatttgacgtttcctaaaagcttatagtgattcgattttaataaagaaaagactatatatgatttgtaagagaatctccaatggttacaaccccatgatgggttctctgcattttataagaataaaattagcttttttcaaaaacttgcataagagctctgaagttttttgtcctccaatggttaaaaccactaatggggttctctaagaaaaaaattcaaattttgtaaagcaatacatacatcctttttgtttggttacaatacatggttttacaaaacatattcacaaaaagaaacaactcttggttgcacatgtttacttttactcgctataatacatttccaattattattaatcaagagagtactagaatatgaattaactatgctttggttccgacangacagtgaaacaagaatgacatttgcacaagacctttggttctgcctccttgatctcatct

SEQ ID NO: 7108 - DNA, 1660 bp, Arabidopsis thaliana landsberg
gagttaggatactcaaccaaatcgtgtataaatatttcatggaacttatctcccttggcaatataaatgcaagccttttccttcttgttcaaacaacacaaatgcgagattgagggttttatcgtcaatgaagtaacttggcggatcatagcttattactcttatgctcgaccatttaggaactgacactttcatcaagttcatccactccacagcctttccattctcaattttaatctctttttttgttacccaaatctctatattccttgtctcatagttttgctctaaatacgaaaatcgatctcccctaaaaactgcaagggacctagcattgcttggatcacattttttattaggcaagagacaatagggttcaaatttctccgtagaaaaatcaaagctttgaataaactggtcatcagacgccatatggaaagcaacccaatacaaagctccattcaatgatacactataggacgacataaaatcccaatcatatgcaaactcgtacggtttcgaaatccatgcatcggatacaaactcggtgatactagctttcacggttgtatcgctataggggcaagactcaaagatcttgtaatgattttcgggtctagaattgtcgtatcccaccccattgtaacgataattcactttggatttgatccatctaatctgtctcaacaatgggttgcatatcccaatcccgttctcggtagcataaaccactaacccgtcgcaatattcgaccgtcatgaagaaaccattataaccgggaatatatgagggtaagttatggctatgcacctctatggatggaacatcaagattaacttccaccgagcaaatcttggatctggcaatcaagatgaattattgtggatgggcacgagccaaatgattattgataaaccttctctcgtttgaaagagagttccatcgtttgcaaacagatctgaatagagcgagacactttgttggaatcaaagtgagtattctttcctccaattcccacggaagttgttctagttgcattatgttatctgttacggacgagtttacacaattacacccccataagaatatatatatatagatgaattttctattagaattttatagcttacgttagtatactactattacataaagatataacaaaataataacaacaataggtggaataaaatgaaaaagtaacaatattaatataccttttttttttggcaagcaataaattaatttgttttggatgataattcatatgttatcctatcatagattatttttttaataaaaaatctagtgttattggttataataagaattgctaaatccaatgctattgaactaatgaatttgaaagagtatattcaaatccacttttattgattttttttttccaagattggtctttaatgattttaaagtgttctaggtattcaaaaaaaaaaaaaagtgttctaggttattaggaaaattcataagttatcaattttactatatttacccaaaatcatctataactcacaaaaaaactcaaatcattcaaaatagataactaaatcaccccctcataatacaataattactgtagaagtaaaaattgaatagaaagaaaatattggaacaattgatttatggtaaaaaaaaatgg

SEQ ID NO: 7109 - DNA, 935 bp, Arabidopsis thaliana landsberg
acacaagctgtcttatgtgtgaaccaacaaaagagaaagctgcctttttcgacaaagctacttctttttcagcaccaatcgagttcttctacttaatctggacctccatctattccagaatatcttaggcgtccattaagccctaaagatttgcatatctcttcaaccacaatcattgacgctcccctattaaagccaaacgactagaaactctacaacgttcttctcctttatgttgaatgatttgtttcctttcttactttgttcttctcctttatgttgaatgatttgtttcctttcttactttttttagaccattagtggtcatctattttgagcctatataagctccatcactttgtactttcaaatcacgcttttgataataagaaattcagtttgttttgcttcaatactttgtcttgaatcaaatcattgttcttgcgagttctaggtagtttgtggaatcaacccacttaggtttcgtgtagtctctgatcctcgcgaggaatagcccttggatcatattctctagtcctcggtgttgtggattcaacatcaaatcggttacttcatcatcatcacccacttccgcataggttagcctttgaatctttgagtcttgtcttggtagattccgaggtttgcatcattggtatcagagcttaaacgctcctatcttaccaggttaattcattccttgttagtctttcaattcagttttcatttttttatacaaaacctcataaaaatctatttttgtgtgcattgttatttcaattttaaaaaatccataaaactctaaaaaaaaattattttcttgcttatttagttcttttaaatctaagaaaacccataaattttttctcattagttttaaaaattcgtttgctaaattgttaaaaaaaaaaaaaaaaaatcaaatttatgagtta

SEQ ID NO: 7110 - DNA, 1346 bp, Arabidopsis thaliana landsberg
aatgtcttttggtatcctaagacgttgttataggcgttctcttgagtgaaaatcattgatgttttattttgatcgtgctgatttcgtctaatctttagcttagctggtggtttgtatttgttggaattagtttttttttttcttttttttatgggttcaaatcaacttattggaatcacctttgatcaaatttcacaaaagaaatggctagtagagttacacataagatgaatacaaggcccatatggaaggtgcaatgggaaatgtagaaacttgactgcatgaccgagagtatgagagaagtttcttccaaaggagtcaaatatctctgtgcgtgttcacaattcttgtgcaagggctttctcgatgtctttctgttatgcagaaaacaaacatgaagtaagccataaaagagtgatatgattttataatagaatatgaagaacaagagagttagagacctggatggatagaggtgaaacagttgtgccataacgatcaattacttgaccatctttgccgaccaagaacttggtgaagttccatttgatacgacttccaagaaaagagggtttcttagatttgaggaatttgtagactggtgcagcgttttgtccatttacacgcacctacacacacacatagatgatcatgatcattcatgcttagttataaacttacaaaatcagctacctattaaacgcatatgaagaagaaaagtgtcttgtttgttgaggtaccttttggaaaacagggtattcagccttaaagcgagtacaagcaaattgatgagcctcttcgctggtgccaggctcttgggacagaaactggttgcaaggaaacgccaataccacaaaacctgatgatgatccaaaggaaaccaaaacaaaaaatcttacataaacgatgaagtaacaagggaaagcaaaagaagaagagtcttctttattagaaaggaatatatacattcctattctaatattcttgtatggtctgaccttgatctttatatttccggtaaagttccgtcagctgggtgtaattggactccgtgaatccgctgttccccaaattgtttgttaacaaaaaatttagaatcaagaaataataattaactagagagaagatgatcggaggatctgacggaccatttagaagcgacgttgacgacgagcagcactttcccttgatacacgcttaggtcaacctccttgccggagctatcctaatttccgatagatcagacaaacaagtcagaaacgcattcattcatcagataaacaaacaatgaagaaaagggattcataaattagaaaaccttgacggtgaattgatggattgatttc

SEQ ID NO: 7111 - DNA, 611 bp, Arabidopsis thaliana landsberg
ctataacggcgtccattaatccttaaagatctgcatatctcttcagccacaatcattgacgctcccctattaaagccaaactgatagaaactctacaacgttctcctcctttatgttgaatgatttgtttcctttctcactttgttttagaccgttagtggttatctatttcgagcctatataagctccatcactttgtactttcaattcacgcttttgataataagatattcagtttgttttgcttcaatacttcgtcttgaatcaaatcattgttcttgcgagttctaggtagtttgtggaatcaaaccacttaggtttcgtgtagtctctgatcctcgcgaggaatagcccttggatcatattctctagccctcggtgttgtggattcaacatcaaatcggttacttcatcatcatcaccacttccgcatagtttagcctttgaatctttgagtcttgtcttggtggattccgaggtttgcatcaatgtccctgttagaaataaggaaaactctacttagaaaaaagatcactcatcctaaatcttccatggtaaccacataaaacacttgtgcaagcttatacatgagctttatggagtgagttgga

SEQ ID NO: 7112 - DNA, 1470 bp, Arabidopsis thaliana landsberg
cttacgttgcctgaagtggtgacgtttcctgattttcttgtggaaagaagtcggtatgaagcagcaatacagaggaactggacttgcagggacaagtgtaaagtttggtggagagacgaaggcgaagaagatggtagttggtgggaaggacggattctagctgtgaaacccaaatcacctgattttcctgatagtccgtgggagaggtacacagttaagtacaagagtgaccctgccgagacacatcttcacagtccctgggagctttttgatgcagataccaagtgggagcagcctcacattgatgatgagcaacgaaaccgtttgctctcggccttaacaaagttagagacttcagacaagagaacccaggtatgtgatcctaatgaatataatatctcatggtgttaaatctagcctatcctcgccaccaaattcagacttcacccaaagagcttaggcccatgtttacattagcttagttggtttatagatcacattctaaagcttagtggattaagacacaacattatcccaagaactaacaatattgatataatgtgggctaatttgtttcaggattcttttggcctccgaaaactgaaccagaccgtgggaaattccagctactccaacaggtaaatttctacaaccctggaagagtctttggtggagccaaagctgacatggttttgttctatggattcattctgcaggttcccagttcctttgtctcttgaagtaatcagatcaaggcttgagaacaactattaccgaagtgtggaagcattacgacacgacgtatcagttatgttgtccaatgcagagactttctttggtcgaaataaaagtgtagcagccaaaatctcaaatctctctaactggttcgaccggacgctaccttcttcgtagcttatcatcgcgcctatgtagataaactgatgtttttttttctcatgtttccaaattatttagttaggtttcctgcaattctttaaaaactctggttctaatggcagaagagaattttaggtttttttttttccttcagttagaaaattttaggtttagggtttagttggagataatctttttctttttgaaattgtatgtaaagagaaattggaggagaggtcaaaaacgtttgatgctttggaatcatcttctgttgactgaccaaccccaaatttgagaatcatttctttttctgctaatggcacaacaccagatgaaattgttgacattacatgtgcaaatatccagtctacaatagatgaccaagacaaaaacagtataattgcaaatattttttgacaaaaaattgatgaatcctaagaaacaacgtttttattgaaagcctggaccattctggttgctctagaccagggggtagtacaactgagtggatagaatatttgcctagggggtttttttggaaaccacctgtccacaggttttaaagcctcccca

SEQ ID NO: 7113 - DNA, 1462 bp, Arabidopsis thaliana landsberg
accacgccaaagttgggtagttgtgggtcaagtaagagttgattttcgtgtatagcttaaaacttggatacccgaatatacactaaaatgctgtaataacatcattgtactgatgcacatattcaaaattttcatgcagcaaaatgacaaaaattagctccaagtttaggacattagggtacattacatcacaagagacaaacaaaaattagatcaatgaaaaatgtgtttactcgttagatcgaagaagcctttcagatacaacaacgcaagcgaccctaattcacgtactctatacataggcagataagctacaaagaagacaacgtgcggtcgaaccattgagaaagatctgaaattttgactgctacacctacacatttgtttagatcaaagaaagtctctgcattggatagcataactgatacatcgtgccttaacgcttccatactccagtaatagttgttctcaatccttgatcttattacttcaagagacaaaggaactgggaacctgtagataatccatagaacaaaaccatgtcaaattcggctccatatcaaaacctcttctagtcttgtagaatattacctattggtgtagcttgagtttcccatgatctggttcagtttttggagtccataagaatcctcaaacgaatctgtcaagtttatatcatattgtcatgttcttgtgatagtgttatgttattttctacttctaaaccacctaagcaaatttaaacataagcctaaacacacatacctggattcttttttctgaagtctgtaagtttgttaaggctaagagcatactgtttcatttctcattatcaatatgaggctgctcccacttagtatcagcatcaaaaagctcccaaggactatgaagatgtgtctcggtcgggctagtcttgtatttaactttgtacctctcccatggactatcaagaaaatgagttgatttgggtttcacagctagaattcctccttcccaccaacgaccatcttcttcgcctttgtttctccaccaaaccttacacttgtccctgcaagtccatttcctcttatcgctccttcataccggcttcttttcacaagaaaatctggaaaggtcactaaatcaggtaatgtaagcttgaaagttttgctgtacacttcggagttcggatcaatgactttaagtatcattttgcagcagctatgtccagaactaggaagagttgcatatttcagacttttcactttacagatttccacagccttcatatttctactctttattaaagtccaaggagctacttcccctcaaggagctaaagtttaagtattcttgatgtcccttgaagataaaagagtacagctacatgtaaggaatacttaatacccaaaggtttgaacttaaatggaaaccaacaaaatattgaatcacccaccaaaccactttactttggccgcaaaat

SEQ ID NO: 7114 - DNA, 3327 bp, Arabidopsis thaliana landsberg
ccatatgccaataggttctttcagagccatccatgattttgtgatataagaaacattatcctgcctcacgactgtttgcagtatagacatactacctaaagatggccttgcagactcaaccgttttaacagaagtttgtgctcctacctgctcaagaacagacaaaaacgataatgtcaggaatcatcttgggggcgaactactatctgaagcaattaaaaaagccaatttcctgattaagagagaaatgtcaagttcacagaagacgatatttgaggctggggcagtttcaaaaatgaaacaatagaaacagaactagtccaacagtgacagtttttttaaaaatccagtcacaaagaaccatatcagtaatgtgctaaaggaattttcagaccactggactaaatttaagaaagacaaactgtcaacaaaaaccattccagaatttcacaagcaattaccagtcaaaagaatttagaataccggtagaaatggaaatcaaaccttggcagtgttgaaggccacatgtcgacagtctggcaatatactcactgaccaaggtggtaaagtatatgactggccattaaatttcacatgtgcagatttatgctcatcaatgtttgcgagaaatgcagcgcacacctttcctccagtctcaccatctccatgataaatgtgtgcctgaaatttgcgttatttacaaataagaatctggaatcttaagcatgtataatataaaacctcatcttcattctgaaaggtaatcaaataacaggcccgtattttgttcagtagataaatcacatttatacgtacatttaaaagaagcacccaatagatggcaatgaagactatccttatagtagaactaagtgaaaatcttgacaggtaaagcagagtaagaatcaaaccggcaggaaatctatctaacagcactagtttattatacctagataagaagagtgagttctactaatgtcactatatgcaactagcatttgagagtaggataacacctcctgctttgatcccaattttctatattgaggtgcatccgccgcgacaagagcaggttcacaaagttttatggcagcatgaaggtcctttagatgcccccattttggctcgctcctcagaccttagtatatgacaaacaaaatttcattagaaaactaagtaactaaatttttcttagcaatctgctctcctgctagccttagcttgcacccaccatattcatcaagaggagcatcataatcatagcttgtaatgtagaaaggaccaccagaagttcgaccaaagtttgttccaccaaaatactgcaaccataaaacagacgcatcaatatatgcaacgcaaacagattgaaagcgttatcagaggcattcaataatcaagttgagtaaaaacaattcccgcaagttgtgtagattatctcctacatcgtttgccttttgagggttctacgggagggacgtaaagtaaatactatggcttagtaaaacctagtttctcaactcaagcaaaaaacctatggaactagtcattgttgtttctgaatatcatttgaaatcagctgcaaataaatatgaaacaggaagatgatgctgcaaatgaactacggcaggaaaaagtggacaagaaaaatagaaaacaatctagtctgtaactattgtaccatataataattttgaaagcttcctccacgctgataaaatcttgcaactgcaaatgcaagatcttcagcaggtcggtgaggcaaacttccaccccacttcgtgtaccttcaaaaagtcagcctaacatactcatttaatccaaataccaattaacataacagttaaggccaactggtacattggccttgaaataaaaacttcaccaaaacacttatttgataagagcaaagctttgtcagaagactgcatgacaaaaacataccatccatcccaatcctctgtccaaagtactggcttcgtccgcgaatttggtttaaaaccatcacaatagtatccattgcatgcatcaatctgagataaaaagagattaataggcgtcacaaggatggttttcaaaaacaaggaatctttcattatgaattgaaagataaaaccccttttatattccaaagaaaatcaatgaaacaaatggtttacaagtcattatcaatgattgcaggtcggtaaatactgagtatctcaatcttattttaggcacccaaagaaaatcgttgtaaaaatcatcagcctggtgaacaagatcagcaacaaataaaaacagagacatcttaatgcacaaaaatcaagttagcaacattacaatattctctggagcgtccgtttgtttgcacataacccacggaactccagcaccaagccctagagccatgctagctgcccatttgacgtaatcctttcccttctgcccgtaagatttttcaacatccccatattcattctcgatctgtgtaagaaaatatttcagtcgacggtgcattctcattcaacaagctgcattaatttaacaacattcaattaagagggctggtcagcccatgacaagtcctgtcagcgaacaaagaatgccggagactgtcaccacatacgtataatcacacctttatagaaagactaataaaagaaagaaagctcactgatttggatataaagttcaaaacatataacattttcatatgacctgcagcatgattatgggacctccttgccaacagaagagctttgcttctcgcatcaaatccacaatctttgttacaaacttttgcatctctttctggaaaatagcaaacacaaagatatgatagtctgtccgatgataacaacgctaaaacagaatttaataagtacaataacaaagaaaatgtgaaatgagcattcaattaaaaaaaagtaccttaaaaggttcattatctgttcgaaactcaatgccaggaatatcccgcagccacactgggaaccccctaacaaagaattggagcaaaaagaataaagagaaagctgaataaaaaagaagactaagagacaccaatggttgcaaaaaagaaaatacccaaagttccactcagcacaaacataaggacctatccgtagatggagataaagaccacttgatccaataagcttcacaaatttgacaaggtcatatcttccttcaaagttatactgaacaaagccatagaagataaacatcaaaatttccaattttaactaaatcaagacaggacaaagaggaaatttggctaacctgaccctttacaggctcgtgcccattccaaaacacataagtttgaaccacatcagctccacgttc

SEQ ID NO: 7115 - DNA, 2600 bp, Arabidopsis thaliana landsberg
gcaaaacctgggctcactttgccagtgtgtcagagagttcatgactttgttttctcacaccacaacactcttgattttaaacccttagttttagaacacacacacacatgttaaaaatctatccaaccaaagacctttccttaaattcggactaaatccacaatcctatggaccacttacctcaccctctactagtggatatattcttctttaatatatttaacccacaaatatttatgtggctatatcaagattgccaatgtagtagatatggaaaaaacaaaacaaaaccattcttacttaacacacagatggataggtttcactggtaaagatttgttgttgtacacattacactcgtttctcaacaggaaatgttgagttcgtgaaatctcagatgtacaaaaaaagaaagtggaacatggaacaaacaaaagagtgacaaattcaattttgggcatattagcattctaggtcagacaacagtcaaggttctggatcttacctatgtacaagtacaggatagagctgaaacaacatgcttagagagatccagtattcaccataagtgttcattgagaactaatcgtggaacccaaaattatcttaccacactgcccaactgttaatctgagaggctcgttagtagtagttggggttgctctgcaacacaaccgtctcggcgcctgtcgttaagaagagtggagaatcatcaattagcaaaatcataaagaaaatgacagaaacattaggtgataaaaagataaacaagaaaacctcaccaagtgccaatttttactcagaggaaaccctgagacctggattttatccactttgtgcagaggtagagagcgtggaaaacatagaagcttcgtcttcaaatcatcctttaccaaggatcttgagtacgttccaagtgtagcattaccttcttggccaacctctttcaagaagaagaggataggcttcttacagagagacgaaattggaagctttatgtcaagatcaaactcactgggttgacttatcccgttccaagcagagaaagaaagttcagctcgctcaagatcccgtggtaggagaatacttgggaaaacttgtacaacataaccaagagatatcgcaaatgtcagtttgtgagtatgatcatagcagatcgatcgctgcaaaacactcctaggatccaaactcatagctcttgtcaagagtttcaaactatctaatgtagataatcccggatagagaggattaacagcttcaacgtgatgaattgagacaaatggtgcaataggatgagaggacaagagaccatgagcatttcccttaatatcccactgtcacaaaaacctaacattagcattatcatcagattgaagatccaagagatcatagaagcagagatgatgaaacatacctggtgaaagccaggctctctggacaaaggaactccgagttcagtgatgcaggcgtggagacgatcatcactaccgtatagcttcgggtatctatcgagacaatcgtcgtgaatccgggagagagcttccgctaaagggtagctaatggcaatgccaccgcctccaaaagccatgttatgactaaagtaagagttagcagagtggctctccgaggggtttccaatataaaccatctccgaaggatcatacttgcttaacacagcaagaagattatgaacattgaagatagtatcatcatcaccaagaacaaaccaccgaacattagggagagagagacgaaaagactccatagcaatacgagagattcgaagtccagaaggatgaccagtaggattagtgtaacgaaaacgagagctgtcttcagagacaattataggaggaagagaatcatcaccttcctcaggagaaacttgctcttcaagccagacatgtccacgcatctgagaaggtttccaccataatctcacaagttccttacgacgttcccaaagctgtgaagatccagcaataccaaacatcaagtgattcatagacagatcaagtttatcaatctctgagagactacgatttctaaattcatgatcgaataacggaagagctggaagagacggcggcgacggcggcggcggaggaggagttacaattggatgatggtaccgtttgttccagagatgattgtcttcccaatctttaagaagatgccaacaacgggaagtggttggtgagaagacgagagaaagccaagcgacggaagcgagaagaagagcggaggtagcgactaatgcggtggcgaaacgactgagacgacaaggacggattcgaggaggaggacgagagattggggaagagcaaggacggtgaggagaagatgaataaaggtaaggaatgaatgagcacatgacggtgagaattaaacgcatcgccccaagcgcacatttccgccgccgggcgacgcagaacggcggcgaaccaagtttccgtttaaattagggcacagggtttcgatcgccaccgtcgtctcgtttttttctctctctcttcttcttcctttcgccgcaacattgacttttcaggggtttgattttgatttttcaaaatttaggggcggattttgtaaaaagtttt

SEQ ID NO: 7116 - DNA, 675 bp, Arabidopsis thaliana landsberg
agtacttacatgtgttcatctctaaatctctatcaataaattgagaaccatatcgcatgccgtgtagaggcttgtaattgtcgaggtatcgactagagcgtgatttttcccggtaaggcttgacgagaacacgtgcattgcaaatgaaatgaggattgcctttagcaagaatgtgtttaactgtttctgaggaagcaaatgttacaaatccatacattcttttctgctggcaaggaatcctcacatctttccacatgtccatatgaggtgaagtagattgagacatcatgttcagtgaaactactctctgccggaaacgttaagtaaatctgtctagaaccagcaaggattgctccatgttcatttctctctccagtgtattccacaaactttgatgcatcctctgctaatataactgaatgttgcccatgaggcctaaaaattcaaacactataagaaaacaatactttagattgaaatagaaagagtactattataactaattaacaaacctgtcgacgaggcgaatcgtgttcttcaagcgagcaagaagcttggtgagactatagccagctttgccatgtctttgtgactcagtgagatatccttcagcttgaagagtccaaccgtatttttcgtagtacatcattggcaatgaagcaatggagattggag

SEQ ID NO: 7117 - DNA, 1761 bp, Arabidopsis thaliana landsberg
gaacttaaattgctaatacgtgagaagctaaattgcattttctctcttcttccaagactcttctctatttattaggtaattttttcatgtgacattttaccaacaaagctatagatatctgacaatgacagtcactgaacacaaaaaatggacgactctggtttctcccatactcttgctacgagactcatatgggacacgttgatttcttttgtctgcttgcatgtggacccaggcccattttcatctaattggcccaacactgaggtgctatatagtccgtacacgtcgtaacacacactacaaaattgcctctaagctagggagactaattatatataatggaaagaaaatttagcctaattggttgatattatttctactgtaccaaagcatatactattttgaatatggcattacaatagtttttttttttgtaatgaaaatacaaaaatcagcggttagttaagaaaatagatatatattccaacggctaagcttccgagatggcgaaataaatgtctaaagggaagttttcctgtgatcgacgacgatgttttgcaaattgttatttgtaagcgttataggaaaatttgatcagattagcaaatggattgaaaagctgggcccatttgattaacgggtgagaagacgaaattgaaaggacatatcacgcatggattatgtcgggaaattatttgaataaatcctactctttaagtgcaaaaccaattagcataattataaacactaaaattctttagttagaagacaaaaataagaaaagtaaatgtatttattaacaaaatattaagggacactgaaacttgtcaaatgggctgtaggcgttattttcatttcatcatattcattcatattagtccatcaatctaaatgtctacattacataacctcctttataaaataaatccaagcattcaaataatattttgaatgaattcgttcaattagttcaaatccctataataaagaactacggtttaaattatttgatgcataactaaaccggaacaactccattaccgaattctagaacggatatatcaaaggattgactcaattttagaagtcttgatgcgttttaaataaccatatatctcaaaaaaacggaatacgaaacaaaagattctaacaagttcctgaagaatcaaacaacaagagataagaaaaagaagccaaacatcttaggtggataacgaaaccaaacatcttaggtgttggtggcacgagtgtagatctgctggctcgagtgagcagcgaccatcctgatcacacctttggccattagctccctaatcgctctccttgctagcgacccattgatctgaattttcaacaacatcaaacacatcaagtttggatctgttaagttatggaaagaaaaaaaaaaaaacagggaggagaaacagagaataaaataagcttgacgttgaggacaagctccaaattgacattatataacacatgagtatctacttagacacacagtaagcctatgtgaaagtaaagaaccatatcctgaacaagcataccaacaacatcagacaggttctagctaaagtagatcaagttatcaacacctcacaatattctctactagattcaatagaagctcaaaccaattcactgccagatgatataactatcattttctaaatctggattagtaattgaggaaacaaggagttgatagattgataatataccctcatacggtcaagagagaaggaaagggtgatg

SEQ ID NO: 7118 - DNA, 2256 bp, Arabidopsis thaliana landsberg
ttcccattccttcagacatgatagaatgtccggtgatgaatttgatccgagctctgtgtgttctgtctatagtggtgaaatacttctcataaggagtcatatatatggttggaggtactggtgtatatcatccacatatccttgtcaaatgtcacaggaccaacattgattgctaacatttgatactcaggtaattgcgtcattcttctttctgctgctacagtctttaaagacatgccatttacctccacattgagaatacactctcccctttcataccaatatctcattaccctttacgaatccgcttcttgtggtgattacaaacataagacagccgaagacaagatttccccgtagtcaaaaagccaaataagtactaaactatgagacaaaggataaaatgataagagactatgatagaagctaactaaactagacagatgaaatcatactaaatcaacatggcatcctaacgcaggcaaaagtctctctcttgctttgaactacatgatgatgtaaaacagtattattgtccaccctctaaaattaaactggagcaaattttctcttcttgctttgaaaatgaccttcatcaatcacatccaaacgcaggtgaaagcctctctctcccatcttggtttcagcaaaagacttcccagccgtccgatcccatatagtgcatcgttctctatccattctagcttccaagccgctcctcagcatctgagaaacactcaatgcatttcccacgagccctggagcgtaaagaacattcttgatcgtcttcttaccttcttgagtcatgatagtcacatctccagttccttctgccatggtagtagatccatttgtgaatctaatcctagctttccgcgatctgtctaaagtggtgaaaaacttctcatgtgaagttatatgattcgagttactgcagcttatcctccagctatcttcataaactggactatcatcaactaaacattcagctacatgatcaggtacttcgtttagcatatcccaaagatctttagccgaagtagccgagagagtctttctaaacacagaatctgtgagactagactgcaatatttggagtgctttcatgtcttctctcgcaagctctctccatttgcaaagctcttctgcttgaatcgtcgcggctaactttggaatcttcgatggatccggcgggactccgttcgcgaccacatcccaaagtccttcctccgttaggatgattttcaacatcgccgaccagacttccatgttaaggtcatcggaaattatgtcttgtagattaggttttgtcgtcgccgaccaatcgcctttcattatcattttagtatctctgacaaagcgaataaactatttccctcaaacccaaaaagtatctatttttttttttattgtaaaaaactttccaaaaacggcggccgagaaacaaaaccctatagacttaacgaagaagatgatacgatgctactagtgctctgtgagtgtattagtttattgactgggctttcaataggcccaatagatttaacgcattagttataggcccaatttttaatattatttaaaggacggcctataacgtataagtcttgttaaatgcattgatccggttaggtcttgttcgttcggttgatggtttggacttgaggacttgtgaattgtgatcagagctataaacacaccaaaatgatgcagtgcatttgaacgatgactgaagatttgaagcagtcattgagtttttgaatttgacaaactagacaaagtcatgaacataagcaatagacatatactatgtagactgtagtatgttcatatcgtaaaaacaaaagcagaggatagagtaatccaatgggtccaaactgaaaactgaataaaccagaccaaatccgcataataaactgattactagtacgtctagtaattaagagagcagattgccttcaaccacctgcaaacgcatataaaaacatctcttattatcccacaaggattcagcaaataatcttccagtctgatcctttactgtgcatttgagattgccagcttcaattacaactctatatcctatccgtgtcatctgaggaacactcaacacgtttctgttgatcccagggacataaagcacattcttgatcgtcttctgcccttccctggtcatgaacctgacatctcccctcccttcagacatgataatagatccaatgatggatctgatcttagctctgtatgttgtgtttc

SEQ ID NO: 7119 - DNA, 1309 bp, Arabidopsis thaliana landsberg
ggggtttttttttttaattttattcaatatttgtctaagctacaaagaaagtaactctagactgacaagcgtgaaaggaggttaattagcttagtctcgtactcacacatcatttcaaaagtagagagcaacatcacatgacaacaacaagtgatcccttgtttctgaatacaaagaacagagaccacaagtcgtttggagctgctctccgcagccaacaagtcttgatggtaggcaaacggtccaggtttgctatccacatgttaaaagtatgtttaggcgtggccgctttacattaaaccaaaccgaatctgacgagtctaccaaatcagctcttggtcttagaacagaccacgttcttgatgatgagaagcctttgcaacttatatgttctccaccacccaatcataagaggccatacctcgagaatccttttgcaacttatttttctttccaacatttaaagcacatttattttcaacagattacagttagacacaagcattgttccattgccgtttcatggctataaatagcttattcctcattgtttcaacagaattcaaataatttctacaaattgagattaaaaaatgttcgacgactctacctcaatgcttgcgtttatcctaggtttgcttctcctatcattaacaatgaagcgtaaagagacgaagaaaaccatgttaatgactagccacacgagaaacctctctcttcctccggggccaaaatcttggcctttagttggaaacctaccagaaatactagggaggaacaaaccggtgttccggtggatacattcattgatggaagaactcaacaccgatattgcatgtatccgtcttgcgaatactcacgtgatccccgtgacatccccgagaattgcaagggagattctgaagaagcaagactccgttttcgccactagaccgctaacaatggggacggagtactgcagccgcgggtacttgaccattgcggtgcagccacaaggagagcagtggaaaaagatgaggagagtggtggcatctcacgtgacaagcaagaagagcttcaaattgatgcttgaaaagagaaccgaagaggcggataacttagtccggtacatcaataaccgctgtgtcaaaaaccgtggtaatggtaatggtcttgcggttattgatttaaggcttgtggcacgacaatacagcgggaatgttgctcggaagatgatgtttggtatacggcattttggtaaagaaagtgaatatgaatcgggcacaaaaaacgaagagattgaacatgtggaatctttgtccacggtttt

SEQ ID NO: 7120 - DNA, 1104 bp, Arabidopsis thaliana landsberg
accatgaactttgaggttaagaagtttttttatagttttaccaaatactaagtactagattcatgtacaattgatgtactattgtagacatcactgaccacatgttttataagagctagatcactagtggccatgaaaagacgaatctttcgtgttataagaaagaaaaaaactctacgtatgaacatgttctataagccgattataaaaagatatatgtccatatataataatgcataccgtcacttgtgctttgatctcttcgtccgacagagtaggcttcccgtcagtgtctttagctattataaacatgtcaagaaaatcttgaggttctttcatcttcccatttcgccattgcatgagtctttcatcaacaaaagggtcgttatacttacttacatttctcattgcgttactcacaaccttctcatggccttccaagtccaagaaccttagccacgggacataatctgacaatgcaaaggcgtaaagatgggttaaaaccgtaaacaaagattccacatgttcaatctcttccaaccctggtcccgatccatcttcacttcctttaccaaaatgccttataccaaacatcatcttccgagctacatttccactgtattgccgtaccgcaagccttaaatcaataaccacaaaagcattaccacggtttttgacactacggttattgatgtaccggactaagttatcagcctcttcggttctcttttgtagcatcatttggaagctcttcttgctcgtcacgtgagatgccaccactctcctcatcttcttccactgctctccttgtggctccaccgcaacggtcaagtacccgcggctgcagtactccgtgcccatcgttagcggtctagtggcgaaaacggagtcttgcttcttcagaatctctcttgcaattctcggggatgtcacggggatcacgtggagtattcgcaagacggatacatgcaatatcggtgttgagttctttcatgagagaatgtatccaccggaacaccggtttgttcctccctagtatttccggtaggtttccgattaaaggccaagatttcggcccgggagggagagagagttgtctccgta

SEQ ID NO: 7121 - DNA, 1213 bp, Arabidopsis thaliana landsberg
caggaaatagcgttcttgtggttcgtactttacttgagaaacgaggttcacatgagctggtataatatacaacaactttctcatccgtagatcccaaatacggcattgattatcttcaccaccagatgccaaatgataaccattaggagagaaatccaccgagagaacctgtttgatatgtccttggaagataagaatattcctagccgtacgaagatcccaaactcttgcaagcgaatcaaaacccgaagaagctactaatgatccatcttgttgaaatgcaattccgtagacactacgactatgaccttcttgtgttaaagcatctcaactcctatgtttatatcccacaatctccatgttttatcaaaactcgttgtccggaggcatctcaacactacgactatgacgggtggaatgcaatgcgtgcaagacgatctgaatgacctttaaaagtttgtagaagtgttccatccgttttccatatcttttcagttcgatcagtagaagcagttgctagacattcatcatccacagacgagaacactacatcagttacatgttctttatgacctttcaagacaacaatcttgtttgtaacttgaggcacctcccacaatttaggaaccccactaagagaacatgtgacgagtatttttccatctcgtgataaggagcaaccagtaagaggacgatcatccccaaatttactagaaccaagaaccatgtctttacaatgctttaaagccaatttagtctcagcatttttatcttcatctggatcattccttcgccgattttcacgctgaatccttagagcagctctctttataaaatctttggtaatttctattctagcctctctaagctctgttggacccattggtataaacaaacttttgaaacaagatctagaagaagctcgtgacaagactagttcacttagaagacaagaaggtttggcttaccaaagctcttatttatagcaaagttaacgagatggatcagaaagaaagaaaggaaatctattaaaaaagtgggttattggggttagctttgaattgtgatttgtctcttaagtctaaattcgataggaagcagtatttttatccagatcttcttcaaggttatcagatttggatattcctcttgagtttggtggtggacataagagactttggtattactagggttcatatggaagaagatgctg

SEQ ID NO: 7122 - DNA, 797 bp, Arabidopsis thaliana landsberg
  unsure (1)..(797): unsure at all n locations
attttcaagacaatgtatcagcatcctgagtttctataattcccgacaagagatcaaatncaatttaatgagtttctctaacaagctaatctcgaaatccctagatcccaagttttttttcttgcccaaacatgaaaaatgaaactagagatctatgtccattgtttctttctcttcgtcttcatcatcatttccactgcttgtccatagcttgatggtgcgatcatgtgatacagtagcgatacacgagctatctgctgtgatatctagagaggcgacttttgactcatgccctgctaagcttttaacgagcgagaaatctcttcctgaccatatctggtagacaaaatataagaaattggaatcaaactataagccaatgaaacagaagactgaaaaaaaaaaaaatactaaggcaagggattatagaagtagttacattgactttcatgtcgtatgaggcagtggccagaaagtagccttcttgtggctcatacttcacttgagacacaaggttagcatgagctggtataatgtacaatgactttctcattcttagatcccaaatacggcattgattatcctccccaccagatgccaagtgataaccattaggagagaaattcacggagaaaacctgaagaaacatataaaacagaggatattaaaacaagggttagtaaataatcacttttgcttggatacgaggaggaccaatggaacaaaattagaatcttaccggtttgatgtgtccttggaagacaagaatacttctaccagtgcggagatcccacact

SEQ ID NO: 7123 - DNA, 1289 bp, Arabidopsis thaliana landsberg
caacccaagtctcgaattctatcattatcatcctttctttgcattctcttttcgataacatgtgactgtgattagataaggaattgaaattcgtacggcaaattagatcaaaattgattaaatcatatatccaatcggatagtcaatagctcaactggatttagttaaagaaaagtcaacataaaaattgagattcaaatcgaaatttcgttatgaatatttcagttactaatttggttcaatcctattaaccaattccgaaccaaaaccataccgaaaccataaaattttggtttggttcagttcagtttttaattcacaacatgctactatttttatttgggaaatttaaaaatataacatacaaaaatttataaattagataactaacaaaaaaaaaattatatgatattgtgaatataatgtatatcaatacatttttatccttcttaaaaatcatcactaccaccacttgcagcgactacccatccttttttctcgtttgaatgattcatatgatataaaacattaattggtttataaaagcacaaaaggaattaggacaatcaactacagaaaaatcattacaactaagtaatgcctttatcaactttaaagattttctatagccaaaaagagcagccctaagctacaaatgattgtgatcgattcctccgctgtgacaataaagccggcaagaacatgaacatttccggagacattagccggcgagtaacaaaaacctcccggagacattagccggcgagtaacagaaaactcccggagacaaagactaaacaaggtaaacaaaggggaaaacccaaacaaataaactaacaacatccattaatacttcccggatcagcatctagatatccaaaaaaagatttaacaaaacttaaacctagcaaattaaaacaaatttgagacttacaaaaacacacaaacggattataatacaagaatctcctttaccacaagataaaaccgaatgaaagtgccgtgcgatccactttatactgctccaaggagccacggaggcagtgagacacatccaaaacctagagacacaaagaatgtctcttgaagaaaggaagaagatctagatctacgatggtgaaaaatcttcatctgaggcagtgaagaaccggttgaagactgcctctgccaagaaggatacgaccagatctggtgctaagaaaggcggagacaaaagatccaaacatcaagaacccaaggatgaggagattaagctttacaaatctagatctagaaaacaagaattgatt

SEQ ID NO: 7124 - DNA, 739 bp, Arabidopsis thaliana landsberg
aaagttttaaattaggtaactagccaaaaaaacaattatatgctattgtgcgtataaagtatatcaatataattttatccttttaaaaatcattactaccaccttttccggccaccatctccgtccaccatcacgtccggccaccaccaccgtccaccaccacgtccggccaccaccactttcgatcaccaccacttccgatcaccaccacctccggccactacttccgaccaccactacctccggccaccaccacttccggccataaccacttccggcgaccacaaactccgatcactaccctcagccaccatcactccgatcacaaccacctccggccaccaccatctccggcaaccaccacctccggccaccaccacgtccggccaccaccgcctccgtccataaccacctctggccactacaaccggccaccatcaccccaagccacaaccatatccggccaccacaccatctctagtcaccctcaaaaaagccaatttggtcaatatactactctttatgttagttattatattttttgaaaatatagtgttagtttattaattattttaaaaagtgtttggtttgcaattcaccctttatgtatcatttttacataataatttcaaaagattaaaaaaaaaagaacttgtagtaacaagatacatgtttctttttccaccaaaaaaaaaaaagatatatgtttcttttgttggctaactaggatatgatccgc

SEQ ID NO: 7125 - DNA, 699 bp, Arabidopsis thaliana landsberg
ctcaagaatttggtgtttggccagatagttttttcccagcaatggtgagttctcactctaggtttttccagtggaattttggtcggtaacgatgtgacgggtaaattgttctgtagcgactgattttcgtccaatttgaaccattttgtatgtttttgttaaccggttatataacactaatcgaattcttttataatatatgggtaagttaatcactgaaaaatatacttttgtatttaatttataaataagaattaaaaagaaaatgaaaacatcatacaaaaaaatgttttgggaaatttggaaagataacatataagaatttataaattaggtaactaacaaaaaaaaaagattatatgatattgtgaatctaatgtatatcaatacatttaaacccttcttataaaccatcactaccaccacttccagccatcaccttcggccaccacctccgtccaccaccacctccggtcactaccacctccggccaccaccacctccgatcaccaccacttccggccactacttccgaccaccaccacctccggccaccaccacttccggccaccacaacctccggcaactaccctcagccacaatcactcccggtcacaaccacctccggccatcaccttcaaccaccaccacgtccggccactgatagttggcttttcgtcagttaatcctaaaaaacta

SEQ ID NO: 7126 - DNA, 497 bp, Arabidopsis thaliana landsberg
ctccggtagtttgctgatacccgccggctaatgtctccgggaggtttttgttactcgccggctaatgtcccctgaaatgttcatgttcttgccggctttattgtcacagcggaggaatcgatcacaatcttttgtagcctgcctagggctactctttttagctatagaagctctttgaagttgataaatgcattacttagttgtagtgatttttctgtagttgattgtcctcgttccttttgtgcttttgtaaacaacttgatgtgttatatcatatgaatcattcagacgaaaaagtcactttttaaataccctaacgtcagtttaaaactaactctaacaatataaagtcacttttcaaaatgacttaacaagtgatgacgttaagtgttttaacatcacttgaaaaactgactttaaaactaacgtcaaaagatacaatgggctttaattctttaatggggcttaattttttgctgaatgcaaacacatttgca

SEQ ID NO: 7127 - DNA, 599 bp, Arabidopsis thaliana landsberg
  unsure (1)..(599): unsure at all n locations
tacagaatgtagtggttaggaggggtagtggcactccttttcttttcacggcccattatttctctaaacctaaaacttctctccgttctctctaaatacaaaaagagtcgccgcctaggtttttccgnnnnnnnnnnnnnnnnnnnnnnnagagccggtgaaactctttctctttctttgttttatctcttttctttggcacatctatgatttttctttcaacggaatcatttctagttttctagatctagatttttaaagcttaatctcttcatccttgggttcttaatgtatggatcttttgtctccgccattctcagcaccagttctgtatccttcttggcagaggcagtcttcaaccagttcctcactacctcagatgaagaaatttcaccatcgtagatctagatcttcttcctttcttcaagagacactttttaagtctctaggttttggatgtgtctcaccgcctctatggctccttggagcagtataaagaggatcgcacgtcactttaattcgtttttatcttgtggtaaaggagattcttgtattataatccgtttgtgtgtttcctaagtctcagaattgtttatttt

SEQ ID NO: 7128 - DNA, 904 bp, Arabidopsis thaliana landsberg
  unsure (1)..(904): unsure at all n locations
tgcagccttggaaaagcttaaagcaatggcacaacatttaagccagtgggtttggtatgtctctccttcaccaaacattatatatattctttttacctttgaccatgatgaatgtgaataatgataagaactgaaacatgaatctctgcgattgtgtaggtttcggaagctttttgttttgttttcaagctatacatatgtgaatacacttgatagaatcaaccctgagtcaaacgagctcttgtagagttgttgtagctcgtaatgttggatcattgagacaagtcattgatattttactttttcatttcttgttgtcacactagtatatcacaacaaggtaagtgttcttctctctggtgccatggatggggttattgtgttgtcacgtttggcttatgcactaatgagagagtaaactaaataaaattatacacacagtgaaacttagttaaagatgtaaataagtagttatccaaaaaaaaaatttcaaagcaaaactgaacttgacagtgaattacaaattgaacttatttgcatgaacatgtaaacagaggacatctacacactttaagtaaacagagatcactactgaacgaaactaaacagaaaacatctacacacttacttagtaaacagagaacatctacacacttaaactaaacagagatcaccactgagagaaactaaactagaatccaatgattttgtatgattcatcttcgtcaccctcaaaagtttcttaagttgtggacgcatagatggagatctcttgaatttcaagggcttcgaagttcttttaattntcaacttcanccagcaggtttttttctctttaattggagataccacaatcttcttcgtcttctctttntcgggacacaaaaacggatgcaacaataag

SEQ ID NO: 7129 - DNA, 550 bp, Arabidopsis thaliana landsberg
tgcgagttgtcccccaatgcgacgatgtataaagagatacacatgtactggggagatataatagattctttcctgcaaattaggatggttcagaatcttgaactgttgaagcggaacctacatcatgtgttcaatatatctattagcaaaaacatgttcttcactgcaatgacaagaaacattataatagatcccttctttatcaaaatggattaccttgagcaccgcacatgcccgatgcagctcattgttcctaatgcttcccataccatcagcgttacctgaaacaaaataaattcacctttactataagggaacctaatctgcaactttagtagacattaatctcttctcttcaatgaaactagaattttctcagtacttgaccaattcaacaactttgaaaaggaaagtaatacaccaacctagaaagtatgagaagacatatattaccagtggacaagcataacatgtgaagattgcaagcattggaagctaagcagtttattgttggagaaaagaacctgtaagaatgttcatgactaatctc

SEQ ID NO: 7130 - DNA, 2884 bp, Arabidopsis thaliana landsberg
cctggttgcgaggagattgtgaaaacacatataatgatatatatgtttaatggacctctcattatatttacatgagcgtttgatgttttcatacttcaggagattgagaacgaaaagttgaagctagagcatgtgcagagtgtggaggagaagagtggattacgagtgcaaaatcaaaaattagctgaagaagcttcatatgcaaaagaattggcctctgcagctgctattgagctgaagaatctagctgatgaagttacaaagctctcgcttcaaaacgcaaagctagaaaaagaattagtagctgcaagagacttggcagcggcagctcagaagcgtaacaacaactccatgaacagcgcagcgaaccgtaatggaacaaggccagggagaaaagcaaggatctcagactcatggaacctcaaccaagaaaatctcacaatggaattgcaggcaaggaaacagcgagaagcagtacttgaggctgcactagctgagaaagaatacatagaagaagagtttaggaaaaaagctgaagaagcaaagagaagagaagaggcccttgaaaacgatttagccaacatgtgggtgcttgttgccaagttgaagaaagccaatagtggcgccttgtcaatacaaaagagtgacgaagcagagcctgcaaaggaagatgaagtgacagagttagataataagaatgaacaaaatgcaatcttgaaagagaggcaactcgagaatggacatgaagaagtaatagttgccaaggctgaagagacaccaaaggaggaacctcttgttgctcgtcttaaggtaaaccttttacaaatttgctttctattttctttcagcattcttagttttctataagcctactccacagtctagcggtaggcaaatctagatatccattacctgttcgctccatatcctttatgccatgaccttcggatcaggcaacatatattaaaaccttcaaaacacccagaatatatggttcaaaatatgtaaatagctttacctgatccaatatattctaatatcatgtcctcctatctataatacaagtgacttttacggataattaagtcaagctacttgtgtgtattgaatatttatctggtttttcggggacatggaacttgtgtacccgtgtgtgagcttctatcttgtacgggtaatgaaaatcatgaatcatcatctcacacgttcaaacaatatgagctttaataaaaaaacaaactacttgttttcttgttctgcatttgatgctttatatacataacaggcaagaatgcaagagatgaaagagaaagagatgaaatctcaggcggctgcagcagctaatgctgatgcaaactcacatatatgtaaagtctgttttgagtcgccgaccgccacaattctcctcccttgccgtcatttctgccgtaagtctcactctcacattacctgaggatccttcattaagtactaagtaatcctaaaacgatcacaatctctccttttatgcagtctgtaaatcttgttcacttgcctgctctgagtgcccaatctgccgaaccaagatctctgatcgcctgttcgccttcccgtcttgacctgcggcaagtatagtcactctcctacacacagtataaggtaattccaatatttcccaccttcacaaaatctttaaaatccaaattctttagttcaaaaacattaggcaatctttttattgaaagacaattgtatgtgattttgcaggtataaagaactatatggaagtctgtttgtttgctaacattttccagaacggcaggctcgaattcttttattacaagttgttttttgttttcttgtatgtaatgtctttgttatatctttctgttcaaaatgtggtaaagaaagaggaaacataacatgctaacagaaaaataggaaacatatcatagccgtttcatagtaagttcaaaatttgaagtaagtaattaaaaattattttgctaattcatgaaatttgtgtacagttttttagaaaaaacatttagttgtacaatggagaatagtgtacgaatgcaacagtgaaacacaagaacaccaaactacaccaattatcatcgatgaattactgcaaaccacacaaacctttgatctcttctaacttatattgttatttttaattttaataataatttttacttagttatatctatgctaaattcttatttttttttaagaaatttaatacataccgaatttaatacaccaataacacatgtaaatatttttggatcagagtggttgttacggcccaatggatctagtgagcctaaatgatacgaccatatattgttttttttttggttttcgccaacgaggatttggttaccgagagtttgtttgaacggtcctcagaaattcggagcttgtagcttctcggtgcggtgccttcactttaatggcggcaatatcccctgttcaatgcttattctcttgcaattctcatcatcatcatcaacaacgcgagcaggtgaatctctctgttcttatttcttcataattagcgagaacaaccttcttcttgttatgacttcattcctccgtttttttcaagtagagtgggtcgctttggagattgggttctagggttttagtatcttcgagtctatggaagctttctctgttctctggactccatttgaaccgaaggtgattatgttctagttaacgatttcagtaggatttggcccttgaagctaggattctgtgtaatgcagttggatatgagataattgattgcaatcttttgggtctaataaaacaggagaactttgatctgtgcagtcaagggagatccagaagatgcctttaagaagactgtcgaaatcgatcggatgattga

SEQ ID NO: 7131 - DNA, 2047 bp, Arabidopsis thaliana landsberg
ccaatttctttttttttgtccaccaataaggaccattggttcttttttggcccacttggggacataaatccttgagtgttatatgtatgtgtattccattgattcatataaaggccctgataataatgtttttatcaatgtgataacaactaaagttaggcaaatatgagtttaaccgaattacgtataagctaatactcaatttaagactagtaaaaaaaatcaatgctcccgactgccgtcattaaagattttgatattaatctttgctttattttaccctaaatgtataatgtaagctaatatatatcaaataattgttagtcaaaagtcatcaaaattaacagatttttattaaacagattgtaataagatggaaacctctctataagaagtgctcaaaaacaaaggaactcaatttctctctctctctgatgattttgtttgtttgaagaaaagagaatattgttgtttgtctctcgtgatcgaaacaatgctttgtgattctcaaatacagtaacattttcaacatgctttgattccaaaaatccaaactttcattctctctctcaatctctctatatctccgagcagcgaggtagttgcacggcggccgccatgaatttccatcggcggcgctacccttactacaaccgtctccgtcgtctccttcctctcgttatcgccgtctctctatctctcctcattctcttcgcttttctctctttccttgctccgcctcctggagattccgatcgccttcctccacgcgttcgctactcatccaatgatgcgatcaaagctacaggtttccatattccggttagtgggttttatcattcttcgctaaagtttgaaacttttccgacctatttgatgatttagttggatccataacagagagctggaggcagatcagatcgtgatatctggcgttcacgaaatgctgaattcttttttggatgcagcaatgcaagcagcaaattcgcaagtgcgtaacactcttaatcatattccattagttagtaacactgatcttacgaaaagtatgaaactttcgattagtatggaatcaaggcactgattatcaagtcatacaaaatccgattacttgtttgcagattcgaaagcagtgacgagaaatgatcgatacttggtaatagccactagtggtggtttgaaccaacaacgaactggagtgagttttgtttgacttctcttgttaatacctatcttcatggattatcaaaatacaagcatttgtttactattaatcagctgatgggtctaatccttctacagattgtagatgcagttgttgcggcaaggattctaaatgctactcttgttgttcccaagttagaccagaagtcttactggaaggatgccaggtctgagacagattaagcatacttagctttttcttatgagaaacgttatgcatctttgtaactttgtgaatttttgtgcagtgacttctcgcatattttcgatgttgattggtttatctcagttctgtctggagacgtcagaattataaagcaacttccactgaaaggagggtgtacatggagtacaagtagaatgcgtgtaccacggaaatgtaacgagagatgctatattaaccgtgttttacctgttcttctcaaaaggcatgtaagtttccttctttcgctgaaactttttacttattgcatttaaaatatgtctaagcaaattgtttgttgtctgtattgactatttgcttagggtggtccaaataattgtcttcacaagtctaaccatttaattgttttcacaagtctttggtactattcttttttttggcatgcccatttcgttgattgctacaatattgatgtttgcttcgaaacatgaacttgaagcagtggttgtcttttggattaagcatctcgatttattcttatatcacttttgtctgtattatgcttcaggcagttcaactgaacaaatttgactatagactttcaaacaagttgagtgatgacttgcaaagctaagatgtagagtaaattaccatgctcta

SEQ ID NO: 7132 - DNA, 1848 bp, Arabidopsis thaliana landsberg
aatgatcttgagttaaacattctggaaaagatctgcgagcttttaaacaaatattagagtctatgcagtcaagaggtttggtagatactgagaaacaacaacaatccacaaactttgcagttcaaagagattatgaaagagaaaattctgcaacttccaaccatgcaatgtcatccagaacgagagttcagtcttcttcatcttcatctaaccaggtatatcaatccccgattgtgattatgaaacctgccaagcttgttgagaaggctggtattcctgcgtcatcccttattcccattcacagcctaactggcatcaagaagatccgtagagaaaaacctgatgataaaggaacttcagcaagtaatagtaaacgggtgacaaaagattgtagtcctggaaaccgaagagctgaatcatgtaccagctcgtttgataagaaatctgacagcagaaatgtgcggtcttcttcaaaaaagcctcagcaggtttccaaagaaagtgcttcaaagagttcaggatctgtaagtccaagattacagcagaagaagcttgagtatgataagcgttcacggccaccaacccctcctgattctagcaaatcaaggaaaccgtcaaaccaacaacttgtggaatctacttctcctggtggcagacgtagacccaagggtcagaagagtttgcagcaagttgatgaccaacttagtcaagcaagcaatgaatctaggacgtcaagtcatggcatttgtactcaatccgaaacagaagcctctgcttgtgtagaaaaatctactgaagctgatggtggtaaaagtccatctgtaatcgaggcagccaaagctgtagtctctaacttaatgcagaatgtgagttctgactctcatttatatttctttagtgttagatgacaaatttttttcacttagttctcacaaggtttgtttttattttgttttcagaaatccagtccaaggtttagtgaagatggattgtcagctaacctttcactagttgctttggaacatccaagtcctatttctgttctcgacgcttcaacgtacagagagactgaaccatcacccgtgaagacacaaggtaacaaagggattctatctctagtgtcctagtggtcatcaactatcacagtcataaaataagaacttgcaaacatcaaagtcactttaggattctatgaccaggagttaactcttacatttgtctgtagcttgtttagtttgggaaagtttctcttttacgatttttttccaatgtaaggattgggtgttcagttccttccatttttgactcagagctgatcatgtgataggtaatgttgcccatgattttggtgatgaaaattgtgaggaccagtggaatccagcatacagtttctcagaaaccacatcaagcttttcgccagagataaaccgtaagaagctacagaatgttgagcacttggttcaaaagctcagacgattgaactctagccatgatgaagccagccaagattatattgcatcgctctgtgagaacgcagatcctaccaccgatcatagatacatttctgagattctattagcctcgggtcttctcctaagagaccttggctcaggattgacaacgtttcaacttcacccttctggccacccaatcaatcctgagctgttctttgttcttgagcagacaaagggaagcagcactacgcatctgttacacaaagaagaaagtaaggttctgaaaaatgagaagctcaacccggaacttgtgtttgatctcgttaatgagaatctggtggagaaactagcgtcagttgaagccacgacgaatccattgatgaagtcatatgct

SEQ ID NO: 7133 - DNA, 891 bp, Arabidopsis thaliana landsberg
cccgcctctccatttgattcaagcaaattaagaaaacatttaagcttacaacccgtggaatctactacttctcctggtgggaggcgtagtagacccagggatcagaggagcttgcagcaaaatgatggccaacttagccaaatgagcaataaatctaggactaaaatagaagccaccttgagtatcgaaaatggtggaaagagcccatctgttatagaggcagccaaagctgtagtctctaacttaatacagaatgtgagttgctcttttctcatgctactgctaaaatttttggtactttaaaaaagtttcaactgctaattctctacacatttgtttcttaactgctaattctctacacatttgttttttttttactcagaagtccagtccaacgtttagtgaagatggatcatcagaacatccaagtccagtttctgttctcaatgcagaaatctaccgagagatcgaaccatctcctgtgaaaatccaagctagtgaaggcagtaagacttctctttaagagtctatatacatctttattggaaaaatgcaaattgttttatgttttcaatcatcttgtaacaggtgttaatggctctattaactcgggtgttgaacattgcgaggaggaccagtggaatccagcttatagcttctcaaagacaacaacaagcttttcgccagagatgaaccgaaagaagcttcagaatgttgagcatttggttcaaaagctaaaaagactaaactctagccatgacgaaaccagtcaagattacattgcatctttatgcgagaacagtgatcctgacaccgatcacagatacatttccgagattcttttagcctcgggtcttctcctcagagatcttggctcaagattaacaactt

SEQ ID NO: 7134 - DNA, 1002 bp, Arabidopsis thaliana landsberg
gtaatagttcaaccctagaaaatcaagtgatcctttaactaaagctgattcctcaggtgtgaattctggcaatctatctcctaccatctctctcattattgttggatattttccgtacaccaatggatccaagaaccttaattcatgtaagaaaagattcataaattagtgatgcaaactaaagtgtgcttttcacacaaaatttctgactgaaactttctctataaatgtgtgtgtctgtttgtgttttgagattcatgtaagtgctcatatataccatccaacaaaaaagtcgaatgctcgttttgcagcagccttgtcgagttcactaaattcatttagcgggacgaaccatctcccgatcaaggttgttcctatcttaccaccttgaaatttctgcataaatattaataggttatagactacaaatatgcaccacaaaaaagtaaaattgacgcacaaagaagttatgagagactttacagtatacacatacctgatatctttttctgtataaagatacagtttttgcatgagctagaagttggttatgtgcaactgtataaggttcaactccagaatctcctccaagttcacagccggtgcaccgtcctggtggatacgatccatttccatagcctttgagtgcaagagagagaggctgatttaaagtgatccaaaatttgaccctgtctccgaatctttggaatagaagctcagcgtagtttgtgtagtcctccctattcacgtatcgcacatattagacataaatagatttgatagcgggtgttacagcagagcctaaacaaaagaagaagaaaataaactaaaaaactttgaatcaaaatcgttaatgcacttacactatacgtgtgcttaagaagcctccatattcgtcttctaaagtctggggaacatcccaatgaaatatagaaacatatggttatatgcctgaagtattcatgtaagttaaatgttaaataaaataatataataaaatta

SEQ ID NO: 7135 - DNA, 818 bp, Arabidopsis thaliana landsberg
atacatccaattgtaactcctgaatcggttaagacactatgttgtgtcggcattggaggaggtttgtaggttgcatatcttgtaacgtaatagttcaaccctagaaaatcaagtgatcctttaagtaaagctgattgctcgggcgtgaattttggcaatctatctcctagcatgtctctcattatctttggatattgtccgtacaccagtggatccaagaaccttcacatatgtaagaaaatatacataaattaatattgcaaagcatgtttttatatatacataatgttttgtaatccatcagttgaacatatataccagccaacggaaaaatcgaattctcgttttgcagcagccttgtcgagatcgttagtttcatttagtgggatgaaccatctaccgatcaatgtcgttcctatcttaccaccttgaaatttctgcgtaagtagttcttgattatagactcaaatataccacaaagtagtatcaacacaaagagaaattatgagtttacgatatgtatacctgatatctttttcggtataaagatacagcttccatatgagccagaagttcgtgatgtccaactatataaggttcagttccagaatctcctccaaattcacagtcagtgcaccttcctggtggatactgtccatctccataacctttgacagcgagagagtacggctgatttaaggtgatccaaaatttaactctgtctccgaatctttggaatagaagctcagcgtaatttttgaagtcctccctatttatgtatcgtacatattagacagacacatatctgatgcgatgtt

SEQ ID NO: 7136 - DNA, 1122 bp, Arabidopsis thaliana landsberg
ccacataaaagtaaaattgacgcaaaaaaaattatgaaagattttacattatacacgtacctgatatctttttgtgtataaagatacagtttttgcatgagctagaagttggttatgtgcaactgtataaggttcaactccagaatctcctccaagttcacagccggtgcaccgtcctggtggatacgatccatctccatagcctttggttgcaagagagaaaggctgatttaaagtgatccaaaatttgaccctgtctccgaatctttggaatagaagctcagcgtagtttgtgtagtcctccctattcacgtatcgcacatattatagatttgatagcagtgttacatagcctaaacaaaagaagaagaaaaaaacccaaaaaactttgaatcaaaatcgttaatgcacttacactatacgtgtgcttaagaaacctccatattcgtcttctaaagtctgaggaacatcccaatgaaatatagtcacaaatggttctatgcctgtattcatgtaagttaaatgtttatatatcacaaacatactaaaacgatttaaaatatgattaattaagcacttgaatttggaatttaccatttgctttcaactcgttaatgagattgttgtagtatgtgatcccattctcgtcgactcctccaattagtcttccctctaaatttagcatataatcacaaattaaagttgagtgatggaatataaaattttacgaattctatttataattagatgaaaacatgaagatccatttacttggtaagacccttgaccatgctattgagaatcggtatgcttgaacgttcattctttttagtagtttaacatcatcctgttcaaggttatatgaaaaatctttaaattaaattaaaactaagaaaaaattgaacaaacaccatatgtacacattcgtcattgatagcctttcaccttataaagatcatacgaattacaagcaaggtctcctgtactgcgatctggaactctttctgtataacaatccgagatatgaatatgaatatatatttcttatatttatactttttcatacatgaagatgcatgttaataaataataatattaaatgatgtttatgacctggatatc

SEQ ID NO: 7137 - DNA, 1707 bp, Arabidopsis thaliana landsberg
tttaataccctaaacattttcttatataaccccatttgatgaaatcgttttcctcatcccacttaggcacttttacaaacacacaaaaaaacaagaactagctaaaaggcaaaacactaaccacgcgctccgcaatggctatcacacgtgcctcctttgcgatttgcatcctcctctctttggctaccattgctactgctgattattacgctccctcatctcctccggtttacacttcaccggttaataaacccacgcttccacctccggtttacactccaccggttcacaaacctacccttccacctcctgtttacactccacctgtccacaagcctacactctcacctccggtttacactaagccaactctaccacctccggcttacactccaccggtttacaataagccaacgctcccagctcctgtctacactccgcctgtttataagcctacactctcccctccggtttacactaagccaactctcttacctccggttttcaagcctacactctctcctccagtttacactaagccaactctctcacctacggtttacaagccaacactctctcctccggttaacaataagccaagtctctcgcctccggtttacaagccaacactctctcctccggtttacactaagccaactctccctcctccggtctacaaaaagtctccaatctattctcctccacctccatttgcaccaaaaccaacctacactccacccaccaaaccatacgtcccagagatcattaaagccgttggaggcatcatcttatgcaaaaacggctacgaaacctaccctattcaaggtataaaaaacataataatatacagacttcatgatttaatatctttaattattacaacatttttggtttcataaccttgaaattcgaggtcgaggaccgtatactcgggacaacgcggttaataatacaatatggcatggcctaaatcatccatcctaaatggactaggaaataccggaaattacgaatttactaattagaaaatttggttgattaatttcatgtacgtaggagcgaaagcaaagattgtgtgctcggagagggggtcatacgagaagagtaagaacgaggttgtcatctacagtgatccaactgactttaagggatacttccacgtggtgttaacccacatcaagaacctatctaactgccgtgtcaagctctacacatctcccgtcgagacttgcaagaacccaaccaatgtcaacaagggtctcaccggagttcccttctcgatgtactccgacaagaacttgaagctcttcaacgttggtcctttctacttcaccgccggttccaaggctgctcccgccactcccagatactgatcatcacattttgatttatgatgatgatcttgcatggcattatatatgactatatgaggtctctttaatcaatttattaactgatttttttcccttgaaaatgttcttgtttgtttgttccaaattcatttgattcgttgcattctatctttaatttataataaaattgtcagaggtatgtacatcattgcttgacttatgcgagtgattatgcatgagaaatttaatattgatatgtactattttgaagatgataaaagatacattggttaaagttttattttatttcaccaaaaaaaagttttgaccattgcgtcaacgcctgtatacacct

SEQ ID NO: 7138 - DNA, 1746 bp, Arabidopsis thaliana landsberg
aatcgccgcttgagcttcaaaagaggcaaagacaaatatataggatttgcttttttcatcattagggttggcaggtttcaatgttttgggcttacattatcgggcctttaggtttaattggcccattagttgttcgataaattaaactatacacggatggttttcttactttcgaattgctacaaacaacagactaatctgtttttacatatttaatggttcagatgtcatcaaggattatctgtacaaatatttatattataagaaacattttaatatttaattatgatttagtagagcggccgatccgttttgatttgtttagaactaaaaattaaaatactaaaatcaaaattggcaaacatttgaacgagtctcatttacatgtcctctgaccatattatttaatgggcctatcacattttccgagcccagataacgtctttttcagttctcctatccttttggtcagcttgtgcatggttgttacttgttaatgatggccaacatgtttttgatcgtgcattacacttaggtatgagaatctcaaacatacatgattatcatcaattactcacttttaagataacgtttctttatttcatattcaaatttttaataccccaaacattttcttataaagtcccatttggtgaaatcgttttcctcatcacaatttaaatacaaagaacacaacaaacgaactagcttaaggcaatatacaagccaagcgctcagcaatggcgatcacacgctcctccttggccatttgcctcatcctctctttggttaccataaccaccgccgattactactctccctcatctcctccggtttacaaatcaccggaacacaaacccacgctcccgtctccggtttacactccacccgtttacaagcctaccctctcacctccagtctacactaagccaactatcccacctccggtttacaccccacgggtttacaagcatacaccctcaccttcggtttacactaagccaactatgccacccccagtgtacactccaccggtttacaagccaactctctcacctacggtttacactaaaccaactatcccacctcccgtttacaccccaccggtttacaagccaactccggattacactaagccaaccatcccacctccggtttacactccaccggtttacaagcctactccctctcccccggtctacaaaaagtctccaagctattcgtctcctcctcctccatacgtaccaaaaccaacctacactccaaccaccaagccatacgtgccagagattcttaaggccgttgatggcatcattctatgcaaaaacggctacgaaacctaccctattctaggtatatatacatacttaactaagcctccctgattaaataaatttattataacaacagcattgctaatttctaaaaccttccgtttattaaattcatgcaggagcaaagatacaaattgtgtgttccgacccagcatcatacggtaaaagcaacaccgaggttgtgatctacagtaatccaaccgactctaagggatacttccacgtgtcgttgaccagtatcaaggatctagcttactgtcgtgtcaagctctacttatctccggtcgagacttgcaagaacccgaccaatgttaacaagggtctcacaagaagttcccttggcgttgtacggataccgtttctacccggacaagaacttggagctctttaacgcggacctttctactacact

SEQ ID NO: 7139 - DNA, 3325 bp, Arabidopsis thaliana landsberg
agattttgttaaacgtaacggtgtttttgatttgttggaccacttatgattcttatcaagtatctaaaattagacatttcatgtgcgtagatgtcaattacttgtttctaagaattaagaaacatataagttattgtttctgaaatcgtgtaggataatttatctactaattatggagtattgtatagtatatttggattcaaacaactcatttacgaaaaatattgaaaattcaaaattagtctaccttccaggttatcaagttcgaccgctagtcaattgattttttttaacgtatctatagatattatatagttatataatgttaaaataaaataatcataccatgtttaattaacaaaagatgaaatctaacataacaacgaagtgattataattttgaaatccaactaaaaccaaaaacaaatactaagatagtaggaaatgatcaataagacgagactcaaagagtaataatctcactcttaaaactcgtctttgcagatgcaagataagtaagaaaacaattaggttcaaatatttgagtactaaattatttgagaaagagcaatgaaattattgaaaataagttacggtataataactatgtctatgaattcttcattatgcccagaaccataatcatatagcttagctttgttcctttagtttaaagtgatctgttgagaaacataaggaatgcatattttgttgagttaggatataacttcattgtttaactttttctattatatgcttttcttgttaaggagaacctttaacaatgtttttgatgtcactgtaagcatagcagcatacagatcagtttcaaattaaaggaaacagttaagataatgggaatcaagtaatgtaattatatgaacttcttatttgagtattattgagaatttgaaagttaaaagcgtgttgtgtcgtcatattagatgcaaaacaaaataacattcaagcttgatcctccagtcaacataggttcctagaatgtgacagaatctggttgaacaatggcttcatcagtcttatcgtcatgcttattctgttatccaagtagacaaaagagttgtaagtaattaatgttcacatgtataaccgagatgataacaattgaacaatcaaaatagagaaaacaaaaaaagtttggttgaatcttttccaactacgtccaataacgaggccgttgaattatatgatcaatcgaatcacacacaagtcactaaggctttgtgacgaccagagaaattggctacaattcgattttagaactggagagtcgaacatctctagcgtgatacaaagtcgaacatgtgtgatctctaactatccaagaacctccacacatggacttcgattccttcttcttggctaaattcgatattcactatcaaacattgttaaaccagtctaactctaatacatcgtttaagacactctaaagtaactctttcaatattcactattgaactcttaagtaactctttcgataggtaagaagaagaaaatcgatgtaatacgaaacacttagtcaaaatatgagtttaaaaccaaagagcaccccaagtgatttggtttgttatggctctataccatcatcatcaactaattgatctatttggtacaaaaattataacatcacaacacatttcatgtaaaatgctgtagtagctttagttttctttgatcctttttcattccttcttacctttgttttcttcatcacctttcagaaatttcatgaaccaataagcagatgattttgggtgacgggttaaaccgttcttgtagtctacatataccaaaccgaatctcttggtgtacccttgcgcccactcgaagttgtccagcagcgaccacgcaaagtatccctttatgtccactccgtctctgtttcaatttgcgccattaacataacactctcactaatttacttgataaaaattctttgtttcctaagtttttgtcgcttgtaaaacaagtgaatgaagggaaaaatgttgacttactcaatagcctgggagacgttggcaaggtaactcttgaaatagtcaactctacgcttatcgtcaagcatatcatggatagaggcagatccatcatcttcatcatccatacctgtcgtgttggaccaagagatcttaacctcaggatatatataatagaagttcgatatgaccaaaacaattcgttgcttccaactttatttggataacaaaactactgctcttcttaacacgctatgcattgtactatattaagctgtaccatagagttacaatgatagtaaataccattttcagtgataaagatcggagggtggttatatcttttgctcatgtaattcaaagtctttcggattccccaaggcacaacataaagccaatccgaagcagcctgtaattggcacagattatttagttgattactagcttgcgcattcttgcttttagcagatgtgcaaaaatgtcaataaaatcattagattgagcgtagactaagaagataattcttaccctttcgcctatcagctctccattttccagctcaactgtgtacggagagaatagagggtgaatacactaggaaacaagtaagaagatgctattgggataagaaatttcagagtttgttaccaatcctctccaattcttgtgcttggtaaaagttactctcagcttctttgtttgagacatgagaaattaacctcgacgtatagtggttcaggccaaggaagtcccatgagttttgaagcataaactccttttcttccggagtaaatctaggaagattgtctccaagtttctggcgcatacttgcagggtagtctccaaaaaacaaaggatccaagaacctgcaaaggattttaattttttatttcaaggaatgatatatacttgcaatgtgtaagtcatttgacgtatagttggactttatgataatttgatattaccactttctaaaacacaaaaatggtatttatgcaacccaaacatatgaaaagccctactatacagtgattgctcatttaataagaaagggaatatcacacacaggactatttagggttccacaggtacgttccgaactccctaccattacaaaatataaaatcaatgaagtaattccacaaactattcccaaatgtcataaactatagaaagcagaaatctgttcactacaaaatttcacgacgttatagtgcagccgtggaaataagctacagacacaccacatttctagcttaacacagcagcaatacattccattataaatcttaattattaagaaagcactcaatgcgcgcatcctactt

SEQ ID NO: 7140 - DNA, 2373 bp, Arabidopsis thaliana landsberg
gatgcaagtagttggggcagttgggtttcagcatcgacgtcttgacattcccgactttgtagatccagcaattgcagatctcatcagtaaatgctggcagacgtgagtatagattatttttcaatgtttcagccacaatatgaagtagcagtgcttaaacaacatcatttcacttgaccatgtctcagttaacacatgtaatggctttgtgtgtgtttatcagggattcaaagttaaggccaagttttgcagagataatggcgtctctaaagcggctacagaaacctgtaacaggttccaacatcccaagaccagtccccagttcctcttcattaccaactgaacatgaacaaaaggattgataacagaagaagacgaccaaagtggcaaacacatttttgacgaattcaatctgtttgaaggaaaaaaaagctacaaatgttccttctctgctactttttgcctcagcttcagtgtttgacacagcttgtgaattgtgaaaaagaaagattcatggaagatgacgattgaagaaggtgaaggattgtgctcgtgtgttttgttgtctttgcttgcaagcgatgttcatgttcatgcgtaatttcctctattttgttttccaatattgaaactgtacaaagagagaaagaaaaaacaattgacaaactcgttgaaacgttgaccgaaaacatatattaaaaaaaaatcattgagctctgtctttattcacacacgaacaagataaggctgatctttattattgggatatatgaatcaaaataatataatattttaaaaaactttgcttttacgaaaaatctttgacaatggcgactctcttcactgcgacggttccttctcaccaccgtttcgtctctccatcccaacatccgaaacagagtcttctatcgcagtcgctaagcgtcacattcacggagaatccacaaccaacggcggtggtcacattgcaggagcagcaattgacggattggattacttctccggtgacgcgacggttcggaatcggcgccgggtttacctgggctgggtttttagctttcggtgttgtctccgagcagatgaagaagtcacgactcgatgtgtttcaggaagaggataacacaaggttactcttactcatcaagacttcgaattattctcttgttaagaactaaagatggaaaatttaagtgaatgttagcaattagggatttgataatacaatcaaagacttgagctcatagtttatttgttcttgaatgcgttttttgggtttgttatcatcttcacaaacttgaaatgtttttctgtaatttttggatttggcagaggtttagaaaagcaagaagagatcatcttaccaaacggcataaggtacattctccataacatatgtttcagcaaatagaaaattttgtgagcttccgttgttgggatttacatgtctaaatcgttaccctttagtgttacattgtagcattctctatggtaggcttgttttattttgatgttgttttggggaatccttaatactttttgacgtggttcttaactatatctgctctttgattagcctgaaacttctttgcataccttaacattcatcacgaactcaatctcttgaaaagttcaatttggttctcattttgaaacgggacttttgtcttattttgatctcattttggaaaatacttgtaacatttcgaggtgaaatgcaatctatatctgctcttattgtgacctgaaacttcttgtctattcatggaattgaaccgtgtaggtactatgatctacaagttggaagtggagctactccaagctcaggatacttggtagtgtttgatgtaaagggacaagtacatggcactgaacaagtgttcgtggacacatttggaggcaaaggcaagtcactagcgatggtaatggactcaagaccgtatagcaagggactatgccaaggtatagagcatgttctcaggtcaatgaaggctggaggtaaacgtagagtgataattccaccgtccttaggatttggagacagaaatgtcgaatttggacagggtttggagattcctccatctgcaacacttgactatatcatcgaggttgatacagtttattgtttccaaactattgtatgatgcaaataatgtataaagttcacacttttttgcgtacaagtattttcgtgtacaaatgagacttttctcgtgtcacaagtaaacggcatggtgtttagctcgcagccacataaattcatgggagtattagccatacaccaagtcacccaatgaccaaatgttaaagtaatgacttttttttatatgatatattctcaattttgtactcggaaacaaagaaaggatacgaatc

SEQ ID NO: 7141 - DNA, 1268 bp, Arabidopsis thaliana landsberg
aaacacggttaaattaaacgagagattaagttccggtttaatctggttacaattgttaatcttacttacccaagcaacaaggtactgctctccgtttggtttactcaaatcaatggccttcctgccagaaataagctcaagcaacactacaccaaagctatagatatccgattttatagtcaatcttccgctcattgcgtattctggagcacagtatccgtaagtacccatgactcgagtcgacacatgtgtccggttccccacaggaccaaccttagcgagtccaaaatcagagagcttgacgctaaattctttatctaacaaaatgtttgcggatttcaaatcacggtaaatcacagacgggcttattttacagtggagatactctatcccacgagctgcaccaaccgcgattttcatccgagtataccagcttagtggagtctgatcaggctcaagatctgtttcaaacaacaacaagaatgagagcggtttattaatacaaactctttgattttggggtgattaggaaacacacacttaccaaaaagatgatcttctaagctacccattggcatgtattcataaacaagaagtctctgagcaccagaagtacagtaaccgattaaagttactagatttggatgatggaagacgctaagcatacagacttcaactatgaattcttgatttccttgatgtccatctggatttaattgcttgatcgccaccacctgctcaaattcaattcccatcaaatctttttacaacattctgaaaacgttttgacttttgagtgaaaacagagcatttcttacttgtcctgaatctaaacgtcccttgtagacactcccaaagcctccttttcctataatattcccctcccggaaattcttcgtggcggctgctaactccttgaacgtgaaactccgtgcgccaccacccggtttagggctattcactttcccattaactaaccaaaaccagaagacattgtttacatcatagtcttcataaaaaagaaggattttaaataataatccataatgtcctaacctaaaatgccagattttgagcctgttcctcttggatcgatttttgtggcaactgcaaacacaaaaaaataatcacaaatgatgaagaaaacaaaatttttggagatgtttcagataaaaacagagagattttcttaaaacctgaggcataatcggttaggtcggagagggtatcaatgttgattctcatgtcgttagtttgggtattagcca

SEQ ID NO: 7142 - DNA, 563 bp, Arabidopsis thaliana landsberg
atgtgaaacacttattgaatcattatttgaaattggcttaactttttgtcttttgatgataaaggcaaccattcaattgggtttataacgacttatctcactaatggcataaaccctgacacattgatgactgaagtatgtagatttggaacagcctatttgtttcttaccatcaatagatatattaacgaggttgttgaacactatcatgattttacaagagaaatgaaacacatgatttatataattatatgattacaaccaaaagacatacataagcatcttatctccatgtgagagattctaatcctccacaacccaatagaggaagaagtaacaaacctgaccacaagacaatcaggagacaagtgaaatgttgcttatcctcacaccattggtatttgatatagataattttcgtgtattatcaatggaatacaaaagacacgaccatcaccattgatatgttacaacttctacaacaagagcacaatccaatttaaatatcttttcagaagtgatacggatatcaacataagaaccaacctaaacagacatgagcc

SEQ ID NO: 7143 - DNA, 1215 bp, Arabidopsis thaliana landsberg
cgtcaaagccaaacgatcacagacattaatcaaaggtcgggcatcaggaagcttagctttcattaattagttcttcgtcttttccgcatcataaaagttagactctctagtcacacgctcaacctcctttatttgaccagtcttggcagctgcttcgatgtacttgaagtgaatctcacgatcctcactatcacacagagggaagacattgtaagtcataaaaatacaaattgctgcatggtgcttgtttacaggaatgacagcaggttcttgataaaattacctcatactcaagtatgaacctaggaaaaagtacagcccttcgtacgacttgaattgctcaaagagtttaatgcatgcatcaacaccaagttgctcacagtactccttgcaagcctgcaaagacatggacacgtcagtgtcacattaaacaataaaattcacatcttacaacaatacagcacatacctgaacgattatctgaaggttgcctctcaggttgaccaacaggagatctttcatgcactccattgcccactcgctagaaagagtaccaaaaaactcgacaagagcctgcaaatttgagtagagggatattcagcaacttgaacatcgagttgtttagcaaccaacaattagttcagaggtaatacctgtggctcaatagcatgtgtgttcacaattacacgtttgatatcaggtaactctgagtaatgctgcacaaagcaaaaggaaacgaagttagaggggaaaaaaaaatacatctattaggccaagaatattaaagaagacattgagcaaaaacctttaaagattggatgtaaagtccagccttttaacaaagctgagcaacacgaggccggtcataatggctgaacatcccatttgctaagattgcatcagccacattaggaaaggttaccaaattgatctacaaaacctgtgttgagagtgcactaaaaggtctaagaaaggaaggtgagtagggaaagcacagagaagtaaaaggtggcaactcttttcaaccttagtttgcagaaaagcatgctcgggtaaatttggcttcagaacatccagaaagaaagcagtcggttcacggaacagattttttttgaatatgccaaaggtaagtacatttaccaacatgataagcttctctttggtgaaaacaagttaattgaagatccaaatttttattgttacaccagttataat

SEQ ID NO: 7144 - DNA, 2736 bp, Arabidopsis thaliana landsberg
ttggatatatcacctagtattcttattgtaagcatgttttggtcattgcaggttcttaatgactaatatcaatatctgaaactgtgtttatagactacaacttttttcttccttgttttccaaggtaactaggttgataccggatgctaaaggaactacgtgtaaccagcggttagagagagtcagcggaacagagcatactcatattctccgggttccttttaggtctgagaaaggaatcctccgtaagtggatttcaagattcgacgtatggccttatctagagaactatgctcaggatgcagcaagcgagattgtcggtgaattgcaaggcgtaccggactttatcatcggtaactatagtgacggaaaccttgttgcatcgttaatggcacatagaatgggtgttacacaagtaagagtttcatgtttttcagatgttgttgtatgttgtgtttgcttatggaacatctcatatttggattttttgaatctttgatatgaacagtgtactattgcacatgctttggagaaaaccaagtatccagattcagacatttactggaaagacttcgacaacaagtatcatttctcttgtcaattcacagctgatcttatcgcaatgaacaacgcagatttcatcatcacaagcacttaccaagaaatcgcaggaacgtacgtgacttgttatatcaaaattttcaggttcttatacgcaatactaatattatttgctcaggaagaacaccgtcggtcaatatgaaagccacggggcttttacgctcccgggactatatagagtagtacacggcatcgatgtgtttgatccgaagttcaacatagtctcgcccggtgcagacatgaccatatatttcccgtattccgaagaaactaggagacttacagctttacatggttcaatagaggaaatgctctatagccctgaccagactgatgagcatgtgtaagttattggcattctgttattcaatatggttcacttcggttcttaattggttttgggaattcataaccaggaaaccaaatactttccggtttggtttggcaacatttcagtttattttttgggttgggttatattttgcagcggtacactgagtgatcgatcaaagccaatactcttctctatggcgaggctcgacaaagtgaagaacatctccggtttagttgagatgtatagtaagaacacaaagttgagggagctggttaatctggttgtaatagctggtaacattgatgtgaacaagtccaaagatagagaagaaatcgtagagattgagaaaatgcataaccttatgaagaattacaagcttgatggacagtttcgttggataactgctcagactaaccgagctcgaaatggtgagctttaccgctacatcgcggatacaagaagtgcttcaggtcaggtaattggaattcaatttttaggtatggttatttcgagttgttgagtcggctcgattcggtttggataactgacgaacttaatctaagacattgatttgttcatataaaattaagctaatataatgtcattatgtagttaaaagatatgagtgttttatattttagtctgttaggctatatatatagctatgaaaagaatgattaatatttaaagtgacatttcttgtatgatatatttagcctgcgttctacgaggcttttggacttacggtagtggaagcgatgacttgcgggctcccgacttttgccacttgtcacggtggtccagcagagatcatcgagcacgggctctcgggtttccacatcgatccataccatcctgagcaagcgggtaacataatggctgatttctttgaacgttgtaaggaagatccaaaccattggaagaaagtatcagacgctggtctccaaaggatatacgaaaggtaacaaaaaaaacctaagacaaaacggttgattgtttcttagttaatcatgtttaatttaaacttgctatggtttgtgtaggtacacatggaagatatactcggagagattgatgacactagctggtgtgtatggtttctggaaatacgtatcgaaattggagcgtcgtgagactcggcgatatcttgaaatgttctacattctcaaattccgcgacttggtcacaattcacaaacactttcttcttcttccatataagatctcaaggatctcatttaacttatgatttgttctatttgtttcaggtgaaaactgttccttcaaccgccgatgactgacccggttcagcgttggatgaagtgttggactgtaaaaaagaataaatgatgagtaactttggctatgtaccctatgttgtgtgtatgtatgaaaggaagaatttgttccatcttccatggagtaattacgaatttggtggtacttttgtgttgtctcatgtgtgtctgactgacatgttgaagattattcacgtgaagtttgtagcttataataaaaagtcttcaatggaacatttcatttcacatctaattcgtttcaaagtatatttcaacattatctatttattctagttatgaggtctagttatactgttcacaatctagctcgatttcgctccgaatataaattttctaaataactagagatatgcatcaccatttctcaattctaaccaaattaattgaattgcactaaacattagattatgaaacatagttttttttatgtatgattattatagctaacaaatttaaatacata

SEQ ID NO: 7145 - DNA, 600 bp, Arabidopsis thaliana landsberg
taacattatgatgatgacatataaaagataattaaccatagaaattgtgatatcaaatatatccataacaatatggatcatgagaacacaaagcatatgaatcatataaatcatataaatatgataagcatataaactgactgaacaattgaaaataaacaaatagtaatataaataggatgactgtaaaattaaaacagacagatgtaacatattataatatgacagaacagatgagataaattcatgggtacatatgaaatagcagagatgaatatatgaaacataaataatttgtaccctcccatgcgctctgatgatccagatccttgtccagcttcccttgtcatgccgccaggaagaagatgtttttgggcagtcgcgtagacactccccaaaaacctaattgccgatcccccgtgcaaggtctcgaacggcaccggcttcggaggcacctgccctctcgctcctctgtgcgcgcagagtcacgagatgggaatactctactcgcggctgggctgtgactctgaaatggttctgttctcgtgtaccaagtgccagaggttctcctaactctcgtagagggaagctgaaggagaa

SEQ ID NO: 7146 - DNA, 496 bp, Arabidopsis thaliana landsberg
tgtcattcggtacatgcgaaaaacactttcagtctcacaatccagccgccgagtgagggtatttccatctcgtgactctgcgcgcacagagaagcgagagggcaggtgcctccgaagccagtgtcgttcgagaccttgcacgggggatcggcaattaggtttttggggagcgtcttcgcgactgcccaacgtctgtcgttgtcttcatcgctggttcttggcgtcttcatctcgatcggatgacaagagaagttggacaaggattaggatccatgaagcgcatgggagggtatgatcaattcagttcattacagttttatattctgcatattatatatgtcgtatgtagctttgctctatcgtattataatatgttatatctgtctgtcttaattttacagtcatcctgtttatattgttatctggttatttccagttgttccgcaataatccatgaaccatgtttatatgcttattttatttatatgatttacat

SEQ ID NO: 7147 - DNA, 2927 bp, Arabidopsis thaliana landsberg
aaaaatgttggaacagaatccaaacagtattcaaccggtataactaagagaaatcaaaatcaacgtattttgattcctatatgtcatcaagtatactaataaaaaaaaaaactgaatttagaactaatccgcaaatctgattgtatgggggcagcaccagtacaaagagctacagttcccgatttaatcatgattaaatacgttgtaagaaaaatgaagaagaagttaattaatagtagatctccactacacttttaacaattacatacactcaaaatcttagcggcattttttctaaaggtttcccaaagaaggagagctcactttatctttcgtctctcttcttaggtctagggttctggtggagaagattgtggttgtttcttagggttttctgagagaaagcatgttgttaactacgggaagaaaggagaaactctctgtttctaaaggttctgaaattgaaatctcgtctcaagagtatgagtatggtagtggaaatgtctggtattgtgtcattctcgaagaaaatctagctaaatcgaagcggaagaagctctctgtccgtcacttggatcctctgctcaagtatgattattctcctccgttaatcaaaaccaccgtgcatcgtttcatgcgtccagttccgccgccggatccatttccagaggtcgattttgaggaaggtgacgtggttgacgctgcttataaaggtggttggtgttctggctcggtggttaaagttttgggaaatcggcgtttcttagtgtatcttagattccaacctgatgtcattgagcttctacgaaaggatctgcgtccccatttcgtttggaaagatgaagagtggtttcgatgcgagaaacaagtaagtgtctgagagttttctctttctcttcattgagtttgattcaacactaaatcatgttattttttgttgttgttgaagcaattgattgagtcagattttagtgctggaaagtctgttgaagtcagaaccaaggtagacaaattgggcgatgtttgggctccggctatggtcattaaggaggatgaggatgggacaatgttggtgaagttgaagactttgaaggaggaagaggttaattgcacaaagataagcgtttcttattccgaaatccgaccttcgccattgcctattggtttaagagattacaaattgatggaaaacgtggatgcgctagtagagtctggttggtgtcctggtgttgttagtaaagttcttgctgggaagagatacgcagtggatttggggccaaacagggagagtaaggagtttagccgcttgcagttaagaccttctatagagtggaaagatggaatttggcatagaaaagaaaaggtacttacttcgtgcttcttaaatgaaacaacaccattgtgtgtatttgttgtgttggatcctttgtgcatctttttggaaaacatacattgtaatctgatttttggttccaatttttaggtttcaggtagcgaggaaagttcgcatgcagttgaagaaacagctgcttcaacccgcataaggatcactgttcgaactgccttgaaagagaaaaaagctttgggtactggaatcaatgtgaggacgacacgctcttctagtggagctatgcataaccctcttcctgcctctttcaatggaggagatgttgcagaggctggtagagtatctgtcactgtgaatgaaacaccgctcttcgaaactgcagctgtgagttagatatttcctcccgtccctctctatctctagttgcacgctattttaacagtcttaagttttgaatcaacgagttaaggttataactttttcagtgaatgtaacttgcttgaagcaatcttgctccaatgacataaattattgggtaattagggttaactttgtgtgtttcctgcagcagttatctggagaactagggaatagtttggctgatgttgtgatgaatgagagcgctccagtcacaagccaaccggagatagcagcacgtaagtgttatatcattctttaccttcacaagtatgatggttattgttattggtagttgtttgtgtcccgaaatgaatctacatatttactgattctagcaaaagagtttcacccatcggtagtcctgggcgtagctgcagcagtcaaaacacaaggaaaaacaactccgaagaagaaacttcaagcgatgaagaatcaaaagagctctacaaatgattctgttggagagaaggtgagtgttaacaagaggaaaagaggacagccacgcaagttcatagtcgcagagcctaagcagaagattggtatggtgtcttaactttagtggataagtaaaccagcatttgtttctttgcaatcttgaaacattcttggcataataacatgtaggtgtgtctggtaataatacaaaggctgccactattgaacatgccgatatgactgatgatgataggcctctcgcttcatgggtccacactggaaattcatcatcgggtactgctggattaaatgctgacacatcttttacacagttggtgctcttttagctttcggttctcattgttttgcttttcaccttgttccacagggcaatctgtttctcggactcctgatatagggcttaatacagttgtggaaaagcatgtcgatattgtggaaactcccccagggagagagtcgacaatggttctgccatttgtaaagaagtcacagctttggaaagtccttgaatcaatggaggtcttcaaagtcgtgccacagagtccacatttcagccctctgctagagagcgaagaagagtgccgtgaaggagacgccattggtagaatgagtgatgtttagttctcagttagacccagtcaacaatctacaagtcgacgatccaaaaagcacgattagcaggatcgacgagtgtttccacaag

SEQ ID NO: 7148 - DNA, 1285 bp, Arabidopsis thaliana landsberg
taactgtatattttgatcacaatttgcttaagattgatcaggaataagttttgcttggaatccaaatcaactcttggtgtcaaattttccaccagaactaatcaggtgagtcgaaattttctctttacactcttaaaattacctgcgtggtagtaaaattctgaatagctggttttagaataagagaaatctgaacaaaaatcatttcagttttcaagtatgtatgttaaaccctagagctctgtgaaattttaacaatagtttgtttgtttctgtttctggtgtatctttagctatattccatgaagtttctagtcttgaataatgtgtatagtttatttcaagcaatggctctggagctttagtttgtttaaaagtgcatctgctctagtcctttgatttggatagcaaataagtgaaagttcttgtccctataaggtttcttcagattaatggtattgatttctcttttgtcttcttaagatttttattcaagagagaatcttggatgtctgcttttctcattcaaaaatttgtcttcaaaaagtgatttttcatgcttgaccttgtccacctttgaactctattaaagtcaaccgatcaaatttgaagaaaaaaaaaaagcttttcgtttcacccatgatggattgggcaacactgccaaaggatctcttagacctgatctccaaatgtctagaatcttcctttgatctcatacagttccgttctgtatgttcttcatggcgatctgccgcggggccaaagcgccttctctgggcacataacctcccgttcttcccctctgatgacaaaccctttctctccaatgtaatcctccgcgtcgcgcaccagagtattttacttatcaagcctaatgaaccgcaatgcgaggcggatctgtttggatggattgtcaaggtttgggataacatatatgtatctcgtaagatgacccttctcaaaccgttgagttcttcaagaaactactttcctcagcatttacctcgtattttcgatatgtctaagtttacggttcgtgaattgtgtcgggaagtcaagctctatcatcctgattactactgtgtccctggacacacagctttagagttggagttggggaaaactgttgtcaagtacctaaaggatgacaaattcgtgttgcttacaattcttgaatatggaaagttagctgtgtttaggtcttgggatcgagaatggactgtgatcaatgattacataccttctcgttgtcaagatttgattatgttcgatggacgtttctttg

SEQ ID NO: 7149 - DNA, 801 bp, Arabidopsis thaliana landsberg
  unsure (1)..(801): unsure at all n locations
gctcaagtacatatcaacaagcaacatttcaccacatgattttatcaaaaacttcttatcaccaccaaacgacaggagtcgcaaccaacgtcaacttcaaggaactgtaatccacaaccacagtcctnccgttgttatcaaccgcaaagaaacgtccatcgaacaacatcacatcatcataaggagaaggcatgtcattaatcacagtccatgctcgatcccaagacctaaacacagctaacttccccgaaacatgaatcgtaagcaacacaaatttataatctccatcacaatctagatacttaacaacagctttctccaaatacaaactctctacaatatcaccaacagtattgaaataatgaagcttgaattcacgacccaattctcgaaccttaaacttggacatatcgagaacacgagggaaattctcaggaattgagtttcttgtatcacataacggatctaaaagagtcaccttacgaggaacattaagatcttcctcgactttgatcaaccatccaaacgaatccgattcgatacacggttcatgaggcttgataagtaagatactccgctgcgagagacggaaaccaacggcggaatcagggaagagactccccccgttatcggggaggatcgggagatgatgtgttggaagaggacttttcggctcggcggcggatcgccatgaagaacaaacggaacggaattggatgagatcgaaggaagattctagagattttgaaattaggtctaaaagatccttcggtagtgtagaccaatccaccattgatgaaa

SEQ ID NO: 7150 - DNA, 1604 bp, Arabidopsis thaliana landsberg
acgcaactgccgtttgtatggcatacaaatatgcacgtcaagtccttgtactacccagtcccaaggaccatctgtcattacagggactgcatcagacaaattcgtagcagtagggattcttgatacttgcattcttgtagttttaaacactcgagatccattaaaagcaagcataagtccctcaagaagcactcctatacaggcattctcagaaaaaattgattgagcctccaacttaacctccaccccatctcctacttcagctgaaatagtcaacgtttccacatcaatagcaaacatagattcctttttcttctgcttgttaacagaattggattgatttattttttcactcgggccaccatctttcacactagagatgcctttattgcacccgctttcaggttctttatgcctttgtgcatacaccagggatctcaaacgcaaaaacagttcataaaaagatagatggacgtcaggttcccaacccagcgaaatatgagtagcactgaagagagaacagacatcaatttcattaagaccaccggatcgacgtacaagcttagcattgtgcatatcaaacaatatgacattcgaacaaggcgtatgttcttccagatactcctggtagatggattttgcccttccaagttccatttgagttgagagtttatccttgttgagacaaaagctaaactgtgatatttcaagagagactgagtacttcagtcttttacaagcttcaggagcagtggacagaatgctcgcagtgcgtggtgtgccgtcagccagtgaactaaatgaaacccgaccaccttgtgatccataattgacagatttaggatcgtcaataattgtattatccaatcctgtatcatcacagaaatttacacagcaacgttcgagattgatgttcacaagcctagttcctttcccggatcccttggatggttgcacactaacagtcttattcatctttttcccagtaacagataatgtcttaaatagagctttgaaggacagagcattggttatgagagattgaacgcgcttgaaagaaaaatagatacccattccagtcacatctactgagagtaccaatttacttctgaaaccaacctcgtcagatgatgtcctatctcttcttccccaatccaagctaacctttgctatatgcatcaacgaaccagagtttggctctattccgaaaaggtgttctctaaagcattcttggtactcatctgccaaatgcagattcagttcaccaagttcaacatgaactgctgtgcccagactcgaaacgttatttgcaaacacatgtgatgactgtgaacaaaactgcatatattacaccaagcaaaaaaaaaaaagtgtttaacatcctagtaaaaccaattcatatgttgccagcaaaataaagaactatacaatcaaggatgtgaaaagtttatggccctatctcacaactacagattaagttctgttaatatataaagactactttagacaaactttatcagatatttctagtacaagatacaaataatgagatgtacagcacgatagctttgattcatgtcaaaccttacagatatacatggata

SEQ ID NO: 7151 - DNA, 1872 bp, Arabidopsis thaliana landsberg
attggattttttttttcttttttttggcaaattggatttggtctagacagaaatttcaaactgattttttcttaaaacaggttaatttaataggatataaaagttctgtgttctatctggataaaaacgtgtagcctaaaaccaaaatgaaaataaaatatccattctgtctcattttcagtttcttacaatgtatttaaggatttgttccatccatggttgtgaaatctgtgtgaaccaaaaaaaaaaaaaaacagaaattttaatattcaaactttatattaattgttgaatatttcaatgttaaaaacagtgaaatgaatcaatgtcacaacagttttaaccaaaaggaaaaagaattggtgtcacaacaattttgaccaaaaaaagaaaagaattgaggtcacactcacaacaatagtcaataaccaaagctactttagcttcatggatatggaccaaacataagttatgaattataatactgggccgaaaactcaaagcccatatgtataagattcacgttgttcgaaatcttttcccactaaacaataattttataattaaacctaaagtatgtccacgtggataccatcaattggttcaccacagcattagctttcacatcacacgagaagcttcgtctctaactaaaaccaaaaatactccagctccttcaccactctctatttctctctccaaattcatttcttctctctttaagacaagaagttatggcggattggggcccagtgttgatcgccgtgatcctcttcgtagttctatcgccggggcttcttttccagattccggcgggaggtcgagttgtcgaattcggtaatatgcagacgagtggcgcttcgattctcgttcacgccatcattttctttggtctcatcactatctttaccatcgccataaacgtccacatctattccggttaactgtttagccagacaaaccggtgctgcttggttttatttcaatttgattgtaagggctggatttgttttgtttgtaacattttcggatttgtgaatataatcaaaatttcaccaaatgatacaacatccagttttgtttttgaatctggtatcaatctgtagagtttgtttgggatctggtttaatttggttttcaaatgctacttgacacctaatgtacatccacctaataagtgaaacgacgacgttttactattattgggcctgtggtccgttaaaaagcccaatatgctgtatctcgtttaatttcaggtgaatctttcgacgaccactctctctcttttcctctttgcaaatccttgaagaaatccaaaatccatagcaatggcgacttcgatagctcgattgtctcggagaggagtcacttctaacctgatccgtcgttgcttcgctgcggaagcggcgttggcgaggaagacagagttacctaaaccgcaattcacggtgtcgccgtcgacggatcgtgtgaaatgggactacagaggccaacgacagatcattcctttgggacagtggcttccgaaggtagccgttgatgcttacgtggcacccaacgttgtgctggctggtcaggtcacagtctgggacggctcgtctgtttggaacggtgccgttttgcgcggcgatctcaacaaaatcactgttggattctgctcgaatgtacaggaacggtgtgttgttcatgccgcctggtcttccccaacaggttattgcttccttccttccattttcaaaaaaaattgtgttctgattatccaattttttgtatggaatcaagacaatgttgattgggatttaggggttttcattgtccattttcagttatgaaaagcttattgaagagtcgagaacttatatggacaattaa

SEQ ID NO: 7152 - DNA, 1493 bp, Arabidopsis thaliana landsberg
atcgacaaacagaagaagagaagaagccatgaagctaactagtacagtttcaatttgacgacaccgtttcgaaattgggccagagagaaaactgaactggatcttaaatcagcccaagccgttaactataaatttgtaacattagtcacggactcacgtgtcacgtccttcgaaaacaacgtatccgcacgtgacatcgccaccggccgtttcttttcttttttcacaccgcacaaggaagtttaggtttcttcaaaatcacaaaaccaaacaacaacaaccaaaaaaaaaaaactcaaaccattttctctctaacttctctgtcatttctctctctagtggcaaagtatggcggattggggacctgtagtagtcgctgtgatactgttcgtgcttttgactccgggacttctctttcagattccggcgagaggtcgtgttgttgaatttggtaatatgcagactagtggagcgtcgattctcgtccacaccatcattttctttggtctcatcaccatcttcaccatcgccattcgtctccatatctataccggttaatttcaccgtaccggattcgtaacttcccccggttgtctagttttatggtttgttttggattttgtttcttctctgtgtcttgtcaaaaacgttatggaatttgtgaatctgaatatgcattaagttaatttcaaaattcgctatgtttgattctcggtttggtttccggttcaatctggttatggcgttgatttgaatttgatggtaggcactaggcagttagccttagtttggtttattggtattcgagttcaaattggaattgagtactaaaatgctctgttacttatttctgcatcttgagttcttatggatttgcttacgaaatgttcaattttgtttggtctggttcggttcgttctgaaacgaatgtcgagagtcttttgcttgactcgaaacttgccttgtgtccagcgtgtagaggtttgtaagaataaatgggctttaaaattaagttataaaggggccaacacatgatccaccaagaagaagtgatccggttgcatcttagattctcatgtgatgtgattgaacgttgaaagtatacagaagtagacctgtaaagatgtttcacactttcactgcgtactacactagtgagtcagtccagtgactgcgtatgagtaaagcgcgtcgacaccacatgaacacacaaaaacatgtcaccctaaaaactgtgttcgttagctcattgtaaattgcagtatatggcataaacaatgtttctacaaattccaagaacgtaataatcaagacaataaaagtgactgtttctaaaaatataaaagagaaaatatattcagctacaccaattataacggaatacgtggttatacataccaattttagaaatgtatacagactcatatatactaatatgtggtcaacatcacgaacatctatttctggtattactaatgatctaaatccggtgt

SEQ ID NO: 7153 - DNA, 1947 bp, Arabidopsis thaliana landsberg
acccttcttaatcacaccttcgtaaactcttcataacaacttacaacttgaattaggattcagcattcaccaagttagtcatatgacagaaaggcacaaaatacttttaatatttagtaaacacagcaatataatcaagagggagattcaacatttacctcaaatatgtcaattgaccaaaacgaccctcctctaatttgaaagccagcgccacaagaggtccatctggagatccagtcaaggttacctgaaactcaattatttagaaccagtacattttctccagtaaaacaaaattacaagttgagtaccctctcttcattattattctggtcaagagcatagttattgacttcatttggagaagggagaaaactgacaacaccatctagtagaggttgtactccctgcagattaaaaaaaaaagggagcacggcagatgatgaaaactttttaatacagacacaagagggcaaggagaaacgtaagtgaatatatcatccaaacttgcgcatatatcatctttggattccaaaaatcaattaccttgtttttgaatgcactacccataaatacaggaacaaacttttgtgctatggtagctctacgaatagcttcctgcacatatatacagcagaccacaaaagttacagtaacaaaatgcaagtaaaagagtaataatatacaaacacggcaattcttggacgctaggaatgaaagataacactacgaatttaagacaatacctaaggcaagctagaatccacatgttcattagtcccttgggattgatatctgttgagtgaaatcaactaactaaacatcataagttgccaacaatatctatctattttccaggaaccatttgatctatttcacgcaaagaatttgctttcaaaccaaaatgaaaaagaacaaacctcaagctcagcagcagatacaggttcatcattcagaaatttctcggcgagtacatcatcaacttcagagactgtctctatcaattctctcctcttatccccaaccaaaccctccatatcagcaggaatatcaccagccacaacattctcactgcaatttatagaaaataaaaatgtcacaacacatacagatgccccactacaatataagcaaattctaaaaaaaagtattgtaacacaaacccgcttgatccatgaaagaaataagctttcacatgaataaggtctataagaccctggaaattttcttctagaccaatgggcacttgcacagctgcactatgatgtcgaagcttagctcttgcctagtgaagtaaaaaaaagaagaagttataaccagtaaagctaaacttgatcaaactcattcaataactaaaaatagaatgatcatagttttacacacttggttcaagactttccatggatctgctcccattctatcaagcttgttaataaacgcaactctcgggacttcatatctcctcatttgcctatctaccgtaatagactgactctgtacaccacccacactgcataggactagaatcgcaccgtctagtacacgtaaagccctctccacttcaatggtgaagtcaacgtgaccaggagtatcaattatattaacctgacaacaatcataacaacaaatttcaaagctcaatgcaataggattactacacaattaaacaaccaaggccaattttgacgaatctgagaagaaattagaatcacagaatccacaaggaagatctttttttctatctcctcaccttgtaatccttccaagtacagtaagtagcggctgactggatagtgatacctttctctcgctccaagtccatagagtccattttagcgccgacgccatctctacctctgacttcatggatctcatggatccgaccggtatagaacagaacacgctcagtcaacgtagtctttccagagtctatatgagctgagatcc

SEQ ID NO: 7154 - DNA, 1940 bp, Arabidopsis thaliana landsberg
caaattaactccatatctcccattacctttgaaatattcagaatgtaacgtatctatgtaaacaaactttaagctataacgcagaactttgaaatggggaaatttaaactgaaaaaattaacgcgaaagagtacaatacaaacgagtttttgacctaatcagttactaagaacttacggatactcctaccatgaaaaatcaaactactgtaacaaaaaaaagtaaatgctaaaaacaatgaaagtaatatacaaagaaacaagtcaatgagaaactaacttggggctaacaactgaaccggtttggatcctaaatctctgctctaattaaggccctatttcttcaaaaacttggtacagcttgtggggactgaaccagctggtttaaaccggtttcgttgtcactggttggttccttcttccgcctcatctctatgactttccggtggtggttcgagtgcagctcactcgagaatgtcgggctacaagcgggtctgtattccggtagcaaccgaccagacttgtaccggacaccgcacgcattgcacagggtcttggctcccattggcccggctctccactgcggagttttctgaacgccgcagtggctgcactttcgctgaggttgcagctgctgcagctcaccggagaaaacagactcggctgaccttttcttatgcttcttgggaaacggtggcctctctgacgtgaccacaggctcgagcagctcagcgccggagaaccacgggctggaaggacccgaagaggaggaggaggtcgaaccggacgaggaaggacccgaggaggacgacgaaccaagcgaccagaccttgaggccattgcggttacgtttgctacgggctttagccggaacaggggatttgaaacaggtctcttccgtgactgcagtcacaggatgtttccggtcacccgttaaccacgccggtttctcagtcggggttccggtgaggtttggacccgaatattccgtgaaggagtcctccacgaaatgagagagccactcaaggttcgctaaatcatccgccttcaccaaaaagaaacaaaaatcagatacaaattcgtgggaaaaagaatcaaaactttaatccaatggtttatctaattaccggaagagagagttcgcttgtagggagagaaccaaagtcgtcacagccggagaaatcgctgctccggcgaagagcgtctccgtcgtcgttgggttcctcagaggaaacacagaccatctcatgttgagccttgaggtcagtttcttcgtcggcaaaaacgtcatcgtttgacaagtcaagcaagtcatctacagagaaatcgtcgacggaaaagccattttgagcggtggtgacggcaagaaactcttcgtaaaccggagaagtcgttttgagagccatctctttcctgacgctgctcttcaacgcggcttgttccattttcctatcgagaaaaaaactaaacaacaaccagaaaaaaaatgaaaaaaagaattcaatacttatgtccaatttattcacattctttttcaaacgaaacgtaaaaaaaaacgttcctctttttcgcaattccaagagagagagaaggaataaaaaagaaatcacgaaccccaaaaaaaacagacgaccggggaaactcaattacgaaaacgacccacaaacagagtcagtcacgagactgaaatgaaaacgcaacgaacgaagcaaattcaaagaacatgaaaagagacatacgaaacccttaaaagaaaaccctaaaattggacaggaattaggaaaaagtacctgatacagagagaaggagggaggaaggagcggtggcgagaagaagaagaagaagaagaagaagaaagagattaaagattaaagaaaagggtcaagaagagatggttctgtgactttggtaaagcattcaatttggtaataaaagcataaa

SEQ ID NO: 7155 - DNA, 473 bp, Arabidopsis thaliana landsberg
gtacggacctgaatatactcatgatgagtaacattcccttgttttatttttgtgttgaaacctgcaaaccgtggaggcatataatcaacgtccatcatgtgtggaagaaattggtattaaaaaatggctcagaattgcacttttcattattcatgtgtttttatattcttaaaacatcgaacagttttgaaggtaactgtcaattaaaaaatcaaatttaccagcaaatatatcttcactaatattgatgacccgagaggccttgctgataccaccacgtgtaatatgaaatactctgtcaaagacatctggatgaccataatgcatgcggatcctagaattcagaaataatagaataaggattccatctgagttcaagttgttcacggaagataaaaattattggtagtaacttactctaagggttttgccaatactcgttgacctagagttacaaagctggtctcttgatt

SEQ ID NO: 7156 - DNA, 1147 bp, Arabidopsis thaliana landsberg
  unsure (1)..(1147): unsure at all n locations
ggcatattaggtaactgtcttgcaaaaatgttcttcaacccaatcaagctggaatacattcaacaaattattcataaaaaacgaggttagaacgaagaatgcatagctgattagaagctaaattcaatggcaggagacaaatgatggaaggcattaccacatcatatgctcatcaatggaatcatttgagtaacaaacaaatttgagtcgtcctgcttgctcctaaatgaaagatatcaccaaatttgtcaatggcgattctctgaactcatctagtaattcattagcatagatccagtgataagctacctctcttttcaaagcctcttctctggcaatgtaagctccgctagtctggaaattctcagccaataccttaacagactcatcctttggcacgagccctgagattgagcttcctccaacagtgccactcacaccagtcccaaccacagatgatccaccatcttttccaccatcagagctctcaagcttcaccgtggagctttccgtcttaagtttagtgttgcgactcgaaccgttgactccagagctggaatcgagtcgagcggcggtgaatgtgcggatagaagagtcctggtcctgttcaggagcaaattcgtcctcgtcatcatccacgactatatcctctgattcatcaggatctgaatctgtatcggnnnnnnnnnnnnnnnnnnnnnnnnnnnnnnnnttggaggttaaagcgccgtcgcgagtatcggcagagaaggaggaaggagggaaagaggaagaaggaggggcgtgatcttcagaagcggctgcattcgctgccgtggtggcggcgagtttgcgtttgtggagagaagacgtgacggatgcggaggcggaatgagaaggagaaggagtctgagaactgcgggaacgattgtcggcgttgaggtgggaagagtgagagtccatcgaagcagtatagtgaaggtgattgagcaaatcgtgacgaaatcgagagtctagggtttttgctcagataatttgggggcgggaaagactacgccgacgaacggaatattctggcatcgttttttttttttttttttattgatccaacaaattttaaaccgaaactatacgagtaattgtaattcctatgagtaaattatgcagt

SEQ ID NO: 7157 - DNA, 1030 bp, Arabidopsis thaliana landsberg
actatattcaaaataaaaccatttttattttaaagctgttgtctttgtgtatactgtataggtaataggcggattacgtgtttaggtaacacttatatttctctataatgataaaaattaattagaacacgtgtaaatatgctggcaaaacaaaagacggatttatgataatttcgaagtcaaatgatatattaaattttccaataaagactattagaccatttcaatgtaataatttaaaccaaaaccgttataaaacaagacaaaattaggtaaggccaaacatcaacaaccggccaaaacaaccaaaccctattttattttcgttctgttttcttttggctttttggtcgttttcacgtttgcccaaccaaccaaacaaggagactcaaacggaagaaacaaacaaaccaaccaaaaccccccgaatacaaaacccaaaccaatcagaagctctttctttggacacggatggctcaagccttggctcaaccaccactggtggtcaccaccgtcgtcccagacccgccgccgccgccaccaccaccgcacccaaagccgtatgctctacgatacatggcggatcttcttggccggattggtataatggatacagacaaagatggtaacatcagcccacagagtccgaggagtcctaggagcccaagaaacaacattctcatggggaagtacgagcttgggaagcttctcggccacggaacctttgcaaaggtttatttagctcaaaacatcaaatctggagataaagtcgccattaaagtcatcgacaaggagaagattatgaagagtggtttggttgctcacatcaaacgggaaatctctatcctccgccgtgtccgtcacccttacatcgttcatctattcgaggttatggcgacgaagtccaagatttactttgtgatggagtacgttggaggcggcgagttgttcaacacggttgctaaaggtcgattgcccgaggaaactgctcggagatatttccagcagctgatctcctctgtttcgttct

SEQ ID NO: 7158 - DNA, 1343 bp, Arabidopsis thaliana landsberg
acataacaccctaacaatgattgaaacttttttaagtgaatttctagtgattcggaagacagaaaaataagtataacatggatgaagaaagcatgtcaagatagccaaagagactgcctgaaacctaacccgcaagattcaacatgatctcaaattattataccttttaaacgcataataatccaaaatccacgaacttaaaattgaatcatggaggtgaaaaagatcaggcaagtcatccttggctattaaacatgactcttttcgccatattagacctctcttcttcattatatttaactctctttatgtctcatgccttacattcatgtgctctcgttttatttataacccttgagagaaggaatatatgcatattgatttcaatatttatctctttctttttgcatgggataaatatagtcaactttgaattctttaacacgggaatatgttcctttaaatggaccatgattcgggtcactaagataatattcttgtcggttaattcacaaaactatacatcgcatttgatttgtgggtgtaagcgtttccacaatgtaacaactctacataaaataaaacaatgtacatattatgtgactttaattaaatcggtgaatcaaatgcagatttagatgtggctatttgaatcagtatgaaacacatgtttcagtttgtaaattcgaacatatctttaaatataatgttaagtttggatttaatagtttatgatttatagaacagcatatatatgattaatagaaagtttaaaacctaataaaatattggctaacgataaaaaggtttttcaacatgtacatgggttaacacattgtggttaaaatgtttcaatttatttcatattgtttttattctcacaactttgcatgcatacggtcccttttatctaagttcaaattctaataatagtaatcgagtatatatacggtccctactcccttctatctaagtggaatgtctaaaaaaagtatatgttccttcgaattgatgcttctgccttatggtatgggcaatttactttttctctaatttcaaatttaaagtagttttccttcaaagtccaaaatcggaaattttgatgatatgttgcatttctctatcacctctttcggatataaaaagttttgaccatcaaatgatagaatcagaagaccgtaatttggatattgcacatattctagagtagtcgattctctatttttcatatcattttcactaggacccttgagaatgtgatttgatttggtttggatatcattatgtcctattcttaagttttcattaatattattcactggcaccggtccggaggttttttt

SEQ ID NO: 7159 - DNA, 545 bp, Arabidopsis thaliana landsberg
tcaaatatgaacattatctctaatgatttttcttgtcatgtccatcttattttgaatgaaggtaaatttctgttatgagagagaagaacatataaggatagccaaggagactgcctgatgtcttttgatgagtaaaatggtcattgcttgatataacttatagtcacttgtcaaacatgacactaacccattttactcaaagaaacaggcaagtcatccttggctaccaaatatgattcttctattcatctttgacttctccttctaataatgtatacactcactttcatatactataacaaaaacttttgaaaccaactgcgaaaatttgacatttttgaaatttaacactttaacaaagaatgaaagtttctgaagtgtaaattttatagtgattttgaagacagaaagaaaagtaggtataacatggatggaaaaagcatgtcaagatagccaaagagactgcctgaaacctaacccgcaagattcaacatgatatttgacctattatactttaaaaggtataataatccaaaatgcatgaa

SEQ ID NO: 7160 - DNA, 1806 bp, Arabidopsis thaliana landsberg
tggtatagttccaagtttatctgttggtatacacttcgttgctttgctcagttgtatttgattatgtagatgcagaaacaactttagtaacccactctcctttttctggctttgaattttattatagtaactgatggggaagaaagcgaagaagaaggcccgagctccaacaaaggagattcagaccatggaaatttccaagaaggtctcagaagagccgcctagtcaagccggggaaattgctgagggtgacgttaaagcagttaaggagacacaagcttgtgtgcatttcgataaggctcttaatttggagaaggtgttggataagattaagtcatcccggcagattaagtgtgcagaatgcaatgaaggagtgtatggaaagagaggaactaaagcaaagggcagtaaagggaagaaggatttttcttcttctgatccaaaatctaataacaaagccatttggctatgtttggaatgtggctgttatgtttgtggaggtgttggtttaccaaatggacctcagagccatgttttgcgacacagcagagtgacacgtcaccgattggtgattcaatgggaaaatcctcagttaagatggtgtttcccgtgccagttgcttctccctgttgaaaaagaagataatggccagaagaaagatgtactgtcagaggttgttaaattgattaaaggacgatctttgaacaatttagcttcatccgatatcgaagatcagtgctcaggaagtggcagtatcactagtgatatcaaactagaaggtgctgtgaccagtgatatagaagcaagagatggttatgttgtgcgaggtttagttaaccttgggaacacatgtttctttaattcgataatgcagaatcttctttctttggatcggttacgcgatcacttcttgaaagagaatgggtctggggtcggtgggcctcttgcgtcttccctgaggaaattattcactgaaacgaaaccagaggcaggcttgaagagtgtgataaatcctagagccttttttgggtctttctgttctaaggcaccccagttccggggatatgaccagcatgatagccacgagttgctacgctgtttgctagattcgttgagcaccgaagaatcggccttgagaaagaagcgtggtgtttctgataatgatgagaaatctactactctcatagaatctgtatttggaggcgaaacgtcgagcattgttagttgtatggagtgcgggcattcctcaaaagtctatgaaccatttttggatctctccttacccgtaccattcaagaaaagccctcctaaaaaaccacaacctgtttctcgagcaaaaaaagctaagcttccacctaagagagtcccaaagaatgtgtcaaaagtaagtaaggtttcaaaagttctcccaggtatggttctttcggaactgaactcttccggaaaatctatggctgtcacagctgattcggatacatcctgttccagtttagcaccccttgataatggtccggttttagaaactccttcagttctaacccttgacaataatcaggcctcagaaagtgcatcacaaagtgatactggtttcgatggctcctggttggattttatcggaccagaaacctctggagatgagacgaatttggatatgcaagaagatggtattgataatgtcattacagctgaggttaatcaaattgttcccagtccaaatattgtggcgaatagctcagtttcatcgggtgatcagactttggaaggtaatacagagaggctgatgcaagattatgaagaaattgcaaa

SEQ ID NO: 7161 - DNA, 745 bp, Arabidopsis thaliana landsberg
agtcatcatgttcggaccataagttatcctgttccgtatcagtatctattgtgatttcagagacctgctttgaatcttgtgatccgatggaaagagtggaactgtggaattgtgatccgatgcaggtttagcggacacaacttctgaatctttgctgactgccccattcttaaggacctcctttgcctgagaaaggatttgttgctttttaggaggaagtttcatggacggaacgggtaaagagagatccataaagggttcatacacttttgagaaatgtccgcattctaaacaagaaacagtgctcgatatttcacctccaaatacagaatctatgagagtaggtttctgatatgtagaactgtcattactatcagaaacaccaagcttcttcctcaggctcgattcttcaatgctcaaaccatccaacaaacatcttagcaactcatgactgtcatgccgctgatatcccctaaattggggagcctgagaacagacagaaaagaaaaggtctcctggatttatctcattcctaaaaacgcttgcctctgaatttgattcagcaaatagttccttcagggaagaaacgagaggcccgctaacagatagatcctctttaaagaagtgctcacgtaaattgatccaaagagagaaggttctgcattacagaattaaagaaacattgtgttcccaaggttaactaaaccttttacagcataaccatctttttgcttctataccacca

SEQ ID NO: 7162 - DNA, 551 bp, Arabidopsis thaliana landsberg
  unsure (1)..(551): unsure at all n locations
ctgctcgggccggacggcttcaagctctccgacgcggtcgagatgcagatcgatcggctggtcgcgacccatgccgagatcccgcgggcggcgtcggccgcgatcggccgtgccaagcgcctcgacgacgccgagggccgctacatcgaggcggtcaaggcctcggtcgcgcggcggctcgacctgaccggcctcaagatcgtcgtcgattgcgccaacggcgccgcctacaaggtcgcgccgaccgtgctgtgggagctcggcgccgaggtcgtccccgtggcggtcaagccggacggcttcaacatcaacggcaactgcggctcgacccatcccggcgtgctgcaggagcaggtcgtgatgcacaatgccgacatcggcatcgcgctcgacggtgacgccgaccgcgtcgtgctggtctgcgagaagggcgagctgatcgacggcgaccagctgatggcgaccatcgccgatctctggaagaaggacngccggctgaccggcgacggtctggtggcgaacgtgatgtcgaaccttgggctcgagcgcta

SEQ ID NO: 7163 - DNA, 497 bp, Arabidopsis thaliana landsberg
tttctgctgaattcagtcaagctagttgcattggttgtgatcctggtataggggaaagttcttcctcggtgaatccttgggacgaggaagagcttcctttggtggttgcagattcgcaaattttgtacatgccatacaaagaaatatcctgtaatgataaatcagttgaaggtgagtgtgaagcttcatcttcatttgttactggtgatcatgaaccacaaaacagtgattttgttgattttggcggtttatttgatgagcctgagactactgagggacctgtttttggacctccttccaaggctgaagcctcgggagttggttttatggcgttcagcagcgagtctgatcctgaagaaatcgatgattcggatttaccggtgtctgtagagaggtgtttgggtcatttcacaaaacatgagatactgtcagatgacaatgcttggaactgcgagaactgttcaaagaacctgaaactccaacggttgagagaaaac

SEQ ID NO: 7164 - DNA, 2154 bp, Arabidopsis thaliana landsberg
ctcaatgccaacactgaatatcttcaccgcttcctccacgggagctctgataaagtgcttttcaaaaagaacgtaccggtggttacctatgatgatgttaagccttatatcgaacgtgttgcgaatggagagccctcggatgtgatttctggtggacctatcactatgttcctccgtaggtaaatttctcatatggcaattaatggatcaactagttttgatgattttgacgatgttggttgcttttttatttctctagctagtactcttacatagtagtctaattataagtttgggtggacctctcgctatgtccctccgaaggtaaaatcatcatataactaattaatggatcaactagttttgattttgcttggtatgactttagctagtactcatatatagtaattttttgtgtgggtggaattttttgtgtagcaccggaacttcaggagggaaacaaaaggtatttccagtgaacgataagtacattgaaaagttgggatacgttattgctctacgatctctcgctatgtccaagtaatttccttctcttaagtgttataagttataacatatgtaatgactacatcggattgccattacgtaaacattagttcatttgaatatgtttatgctaagaaaaaaattgatattcatcaactttaaaatgtaaaagagcttctaaaaaattaagttggtgctgagacatgaacactttcctttaatgtgatttctcaaatgataaataagatactttgtatattatatctttaagttagtgctaagatcttttttgttttggactataggcattttgatagcggtggcgagcaaggaaaagcgatggagtttcattgcactaaaccgccatcggaaacaccctctggtttaccggtctttgctgtattttcaagcttcttcatgagcgattacttcaaaaaccgaccatcaaaatgtaattctgagtacacaagccctgaccaaattatattgtgcccagaccataatcagagtttgtattgtcatcttttatgcgggcttgtccagcgagatgaggttgtgagagtaggtgcagcctttgcttttgtcttggttcgagccatcgattttcttgagaaacactggaaggaattgtgtagcaatatccgatcaggtcatgttagtgagtggatcactgaccttgagggcagaaacgctgtctccaccattcttcgaggacctgatccaatattggctgatgttattgaacaagaatgcagccacaagtcctgggaaggtattattacacgactttggcccaaagccaaatatattgattgtattataacaggacaaatggctcaatacattccaatgttggagttttattccaacaagctgcctatagtttccacaacatatgggtcttctgaaagtacatttgggatgaatatggatcctctctgcaaaccacaagatacctcctacacatgtgcgccgaacatctcctacttcgagtttctacctgttgatcacaagggagacatggcaagcattgttgatcttgttgacgtcaagttagggtgctactatgaaccggtggtgactaattattttggtctacacagatatcttattggagatattctacaggttactggattttacaataacacacctcaatttagatttgtacatagaaagaatgtggttttaagcgtgagatcggagataacaactgaagaagacattttaaaggccttgaatcatgtgggactggttcttgaatcttcagatttaatgttgatgggcttcacatgctatgcagatatctccacatttccaggtcactacgttttttactgggaactcaaagctaaagacgttcaagatgttttcgagcttgaggagaaagtaatggtgaaatgttgctctttattagaggagtcatttgatgaagtatatagaaaaaataggagtaaagatgagtgtatcggacctctagagataagagtggtgcaacaaggaacattcgattccctcatggaatatttcatctcccaaggaggttcgattgctcaatacaagacacccatatgtatcaactcttctgaagccttagcagttcttgaaaacaaggttcttgctcgattctttagcgaaaaatctcct

SEQ ID NO: 7165 - DNA, 165 bp, Arabidopsis thaliana landsberg
cagcaaatgatgaaaagagcgaccaaatctcctaacgagccacatgaaagcaccatcataacgagcgaccacccatcattgtacgcacttctaaacgtacaccttcacacaaagagcagtcgcagccgaggggcgcgcatatatcgaatatacccacaagggaaa

SEQ ID NO: 7166 - DNA, 654 bp, Arabidopsis thaliana landsberg
  unsure (1)..(654): unsure at all n locations
tgttttacttctatatttacaattttaatgtttctaataattattatgttttgttaaataaaaaactacattatatatatatatatatatatatatatatatatatatttaataaacctacttaaaaacttcactattggacaataaaaaatgtaaagattcaacaaaaaaactctaaactttaaattatttaaaattaatattataaaaatgtgtgtgtgaataagcaggctactaatcacagtaaacatagatgatttgataaaatatttcttaagttttaaagccttaaatcaagaaaaaaaaacttatgagagaaaagttttcagctcacttattaagcttttctatatataagatataataataggttattgacaattattttaaaaatcatataaataactcatccttaaagtcttcaattaaaaaaaaaaacaaaaaaacaaacaaaaaatctcctcataatattttaaaatttgaattttataaaaatattaaattttgaaacttgcatatggactaagtatgaaattattcatagtccatacatctatctcattagttatctttggtaatgaacattaattngngtctagttatattttcattcctgcttcaactctctaatgcaatcatttcttatgacgtgtt

SEQ ID NO: 7167 - DNA, 693 bp, Arabidopsis thaliana landsberg
tactccttagtcttttataaagagcatcaaacgattcctcttatcgtatagcaacattcttccaatactttttgagtcgggttcaacaacatcgtcaacatcttttgctttgagttcccagtaaaagacgtagtgacctggaaaactggagatgtccgcatagcatgtgaaacccgtcaacattgaatttgaagactcaagaacaagtgtcgcactagccatcccctttaaaatgtcctgttcagttgttgcttcactattgacgcttaacacaatattctttctgcgtacaaatctaaattgaggtgtgttattgtaaaatcctgtcacctgtagaatatctccaacaagatacctgtgtagaccaaaataactagtaaccacggtttcataatagcaccctagcttgacatcgacaagatcaacaatggtgttcatatcttcctcatgatcaacaggtagaaactcaaagtaggagatattgggcagaaatgtgtaggacacatcttgtggtttggataaaggatccacattcaccccaaatatactttcagaagacccatataccatggaaactataggaagcttgttggaataaaagtccaatgttggaatgtattgggccatttgtcctgtaacaatgcattcaataaactttgctttgggccaaagtcgtgtgatgataccttccca

SEQ ID NO: 7168 - DNA, 1099 bp, Arabidopsis thaliana landsberg
atgcacatattttataaaaaaaaaacctttttaagtgttaattagctattagatgcatcattctttagaatctaattagttttgagttgtgaaaatgacagagcttttataaattgatgatttttgtcttaaaagaaatctttgagaggtagctagagagagatatggaaagaatgtcagcttgtttttgtcttgtgttcctctttttaactgttcttgtagaagcaaagtatcttcctgagagaatgtcatgtttttttttttttcatggtggcgaatgtgattatgctaaaaaagttttcagacagatggtttctgatggtgtggctcctgatattatgagatacatcatttggttagatggactatgtacattaccgaaagctagagagatgatcatatgtgagaaagctacggatagtatctctaaaatcctctgatggaaaacagagagaaaagttatctctttctatgctttcaaagtgagttcaaggcaagcaatgtaaaaagtgtaataaattatggacttgcacaactcaaaacaattggtaatgaattgaaaactctatatcttttgatatatagtaatgtcaaatatgtatatattgtactcccaacagccaagtaagaaccaacgacttgatcatatatttccgcaagaccagaacaaacattgcaaaatatatatacaagtcaatgtgatccaatggcatatctttttaccaattcaagattttatctttaaataaattacccataaaagaaagcaagatagtgacattggacagtacctaccgaatccttctattatttaaacaaactacatttaaatatcaggaaaatgtcaaaaatcaaaccacaagaagtttcagatcaactttctctaaccatcatcattcattcaccttttggtttgtggtctgaccaatctgcagagagatagtgcaagaagaaacaaacaaagtcaacaaaatccaaacacatgttttcgtaaagaaaatgtttggggctttatatggcttaacaaagtaagtactctgaatcagagtttctgatttgactccttcaacttctttacatagtcctatggaagtttact

SEQ ID NO: 7169 - DNA, 1325 bp, Arabidopsis thaliana landsberg
ttagagtcacattaatctattcgtacaaaattctggctttttccagcgtcttcagttgttataacatcccaagtttcaattctataggcctaattatggagggctttttcttccaagttcttctgaggttttgacccaatttttgtaattttcaacagactaaatgagtttattataaatttggtcttcttaaaagcctctcttatcgatgcggcaaaccagaattagaagcagagaagatcgcactaaacatacccatgtcactagactttgttgtccacgcggtaaggtatgatcgactggtttacgaccagttaggagctccagcagaacaacgccaaaactgtacacatcgctctttgagctcaacgttcctgtcattgcatatctgaaatacattacacaaaaaggtgtaagcatagattcgtcaaagatgcaatagacacataagggtaattaaaaagtgataagaggaacgaaatccatgtgaatgaaaaagtgactcataacattagagcatgagaaccaaacatttttgaatgaagacatgtaacccatggtttagtctgaatgaaagaaactgaaaaaaatcttttcaaggtaaagaaaatcttgaaaaagacgttactctggagcgtggtagccaaaggttcctagcacacgagttgagtgaaggcgagcagccatgtcaggggcttgatcagacagatcaaaatcaccaattttggcaacatcatcatcaaacagaagtacgttgctggatttgatgtctcggtggataacctgagggctcaccttctcatgcaagtactcaagtcctctggccgtaccaacggcgattttgactctctgttgccacgttataacaggacctctaagtgctcctttggcaccttttttgcctgcaccaaagagtcaccacgtttcattagtttcttcctcctgtatcttactttctagatagttaagtattgagtgactaatccatatctaagcaacggttcacatttaatcactcaccatgaagagtatcatgaagagatcctttaggagcaaattcataagcaagaacacggagagggccatcaacacaatagcccataagtgcagtaacattgtcatgtcgcaatctcgaaaccattgatatctgttaaaagcttctacgtcagtaacaaaacaaaagtagacagaacattcccaagggagtggtttgatgctggactatttgcacataggacataagaagtaggttaagctgtttttggcgatattgtacaagataaaaaatgcagtgatatactttatagtatctcctggggaagtaa

SEQ ID NO: 7170 - DNA, 563 bp, Arabidopsis thaliana landsberg
caaaccccataaaacacaaaaatagtacaataaccaagttgattattttaaaatttaaacaattgagaaaattcggcatactggtgtcggtgatgtttcctttctacctttctcaagaactctcctccggtgactccggttttctgcagagaatcatatgcatcggagagaatattccggtttcacctcctctggtcaaataatcagcagtcttaaacaacatctcatgaacatcaacagttcctttaggagcaactccaaccgctgacaaaatctgaaccacaatgtgattcctccaataagcaagcctacccatcttaagcctagtccaccacggctcagccggtggactcgccagatccttctccttcactatctcaaacccaacctttttagccgtctcagctatatccacgtaagccctaagccctggtaacgcatcgcctctctcaatcccttggattaccttcacgtgttcgtcatcctccgccttacatttctccgtcgtaacccactcgtacgacacatacatagatccggggttcaacaccctgtagatctct

SEQ ID NO: 7171 - DNA, 1681 bp, Arabidopsis thaliana landsberg
gagttctagttcaagttttttgacaaatccttcacttggttaagcctgagctgacgcaaagatgtgtacgtgtttgcagggacgggcgttatatgcagcagaagcagatagactaaggaactgggcagagaacaggacgaggttgtcgttaacagacgcgatggagatgtatacagagaatacttgggtctctgttttctctctttctgttgtttgcgctttcatcatcttacaaagcacaacacctagctcttttccaggcacataacaaacatcttcctcggatgtgttttaagaaaattgtaaacgtacatgttatgtataaaaaacatatatataacagaaccgatttgttcatgtaaacacttcttatagttgtagaatgtgtcgttgttgaaaacaatgaaaaaatagattgtaaacttttatcagattgtagtattttctagttttcactagttgggcctttaaaggcccattaagcggagttaaaaaaacacagctccaataacattgtatcaataaaaaaagtggagggccatcagataggagcgaaagactgtgctactgaatagtaatcatggagatcatttgaactatgcattattaatcatcacttgacccttttttccaaataaacaaaaacaaaccaaagattgtttggcctcatagagaagattagattttatcaacaaggattaattcagacatatgcttgtctatttttttgattaaatcattggccaaaaaaatcgattagaagaaagattgaaaaacaaaagtcaaaaagtaggactcagaatatgggtggtgatataacagaatggtcggcaaataggctttttacggccgtttttacgacgaacgagaccttaaatatcaatcgtcactgtccggaagaaaaaaaaaaaacaattttgtaatacgacaataacaaaagtaaaggttggagaaagtataaggatttgattacgagagcaatttgtagcttgagagatgataagcttctctctctctttgggtttttatacagaaaataaatatggagcgctagggttttctcactcgttaagattctgacatgtgtccactgttacatctgacggtgctcaacatcacacaccgctacggacgttgttgggcttatcatagtttgggctttaccagggcttactatcaaattagaaatcgttcatgtagccgagtttggatttaagttaaaaactggatttgggttaaaccgttaaaaccggccgaaactttggattcacaaaatttaaaatcataatcttttaagtaaatatggttttgagtagtcaaaattagttatacaaactcttaatgcaaactctattttccaaagttacatttctatttttatttatcaattctatgataaaaaaacgaaaaaaaaaacgaaaatttcaacaaaaaaaagtccaaagtgttataaataaatgttttattttatggtggttataaatactataaataataaagaaaatattacatccgcaaagatcagaatattaaataataaagagaaaaaagtgagattatctttagacgattattatctgatatttttgtattaaataaaaatccctcatctaattattaagaatttaatatattttggatataaataattacgagtttattccacacattttatttatga

SEQ ID NO: 7172 - DNA, 1410 bp, Arabidopsis thaliana landsberg
aatcacaggccactaaacataatcaaccaaaaacagaattaaaaaaaaatatgaaaaaaggcctcatatagaagattagagtttatcaacaaggattaattcagacatatgcttgtcaattttgattaaatcattggccaaacaatcgattagaaaaagattgaaaaacaaatatcaataggactcagaatatgggtggtgatataacagaatggtcggcaaataggctttttacggccgtttttacgacgaacgagaccttaatatcaatcgtcactgtccattacttttaccaaaaacaaaaattaaaaccagaagaagaagatgaaaactgaaaaacagagaagctaatcggcggagatctaaagaaccctagagaagttgataatgaatgtgtgattactttctcacgccttttatacagaaaaacaaaacaaaaattgagagctagggttttggtttatttgacaagattagctaagatgttgacacgtggtacatctgacggttgtgatatgttaaatcttccgttttttcctgtggaaacgacatgcagtttcatatagatacttctaaactacatactgtttcttgtagaaaaccgacttttatttccctggcccaaaggcctgtcatgggtccattgaactaacacgcaatgtggatcataactattcactagcctacgtggcctttttcgaattaaattatgtcttaaaatcttgtgttatttgatctttttgtaaatcatgattaaaggagattttacaatttggtattattaaattaagattaatctttttaaaaaaccaaaggttactcaaaattacatatcttaaaaataattgtatactaagtctttttaaataaatttcaaaagaatttcatgaacaaattattagaaacaaagtttaaagtatactgcaaatatactccacacacatgaatttttaaaagtaatatcagatttgaaatattgaagattgtaaaacgtacgattaactttatatccaagattaagtggtcaatttgttttacgtttttagatatgtttgatatatttcaaatgcacctttggagtttggaccatacgcatattgtcttgataactttgatacacatagttaaacgtattaaatatcctctatttttgaaagtcaagaaaaacaaagagaacatttaaagattataacatgtacatttgagatagttatcttcttgttaagagttaaaaactccttaagctaaagacttctctatccgaggaaggaagagggtgtgaatacttcatttactactttgctttcattccttttttcctatctacacttttatgttctctataaaagcatctcacaaggattttcatgattaatgcctatctttgggacttttaaaaccggttaaatt

SEQ ID NO: 7173 - DNA, 2210 bp, Arabidopsis thaliana landsberg
aattgattcaatctaattagctcgaaactaaattgatatcatctgattatacagtatagtgcacaaactcgtttatgagttccacggttttccttatgcgtatcagggctgggctattttcctgtgaagagcctccatacttttggccaatttataatttatttttggattggtttttgtcttggccaaaacaggcgtgcaatgagtctgcaccaggccgtctcgctctgtatggaccactgtgatgcagcaggacttacaggtgacgatagttggttcaagactgtagtactaactgggggaagcgcgtgtttgcctggactctcaggttcaattactattagcgtctttcttttgcaaatgccatcaatttactcggagatacgtgaatggcgagcttatgggttctgttttattttgtgtgatctgtatccagagaggctagagagagaactgcaagatcaccttccttcatctataagtaacggaatcagagtaatacctcctccttacggcgtggacacatcatggcatggggcaaagcttattagtaatgtaagtgatattatttttcattcatactcatgaaccattagtaaatgatacaacagattatttctggagttctactatctgagatctacctttcatattatatacacgttgggcgcatttggtgaaataagcatagtgtgcaaataatgatgcataaactcacctttacgtacttcatttctataccggacatttatctgaagcttgttctctagattaatttaacatagtgaagtctcatgaacttagttagcctcacgcaattgcggttgtcctgattactatgcgcagttgagcatctttcctggtccttggtgtatcacaaggaagcagttccgtcgcaagtcaagactcatgtggtgaatctttcctaccatcgcacagaccgagtgagaggcaggttacagctgttataaggtactttgcaagtctttagataagtatgtatatgtatagagtcatacttgattgtactcaaaagccataaagaacaaacagaaaacctttttatatacatacagtatttacgagagattgttgaaactcttggtgatttatatatcctaaccatttcactatcttctagttactatttacttcattggtcaattttatataagaagagacaagtagacacacaaaggccattacaaattatcatttagaattttttgaactccctagtaacaaaagaatgagacagtacaacagtaaaacaaatcgtggatatacatacatcctcttcctcaggttgttgtaataagttcattgcagaaattcggatttatcagcctcagaacaacttaacaaaaaccaaaagagccgtggaaacggtcagccaaagacgggacgacgaggtagttgctgcgtttacctctgctgatgtctctggaggcaactgggatccggcagggcattcgagaccttctttaccttctttgcactggttagcgaaaagtccaggcgggtattttccatagagattgatgtaactgaacatagtggttgcacaatccgagctcaggtcgttgagctggtcagtgtaaggacacgcaaagtccttgaaggcgccacaacattcttttggtgggtatttgggacctttgcatttgctggttatgatcgtgtagttcataaactcaaagttcacaggacatgctgtttcatagaaagaggaaaaccatatcacttagaagaatacaaacaatttttatctcaatatatcgggctgaattcacacgaagcaaacgcccaaataactgctacaattgtcaattcacacgaaaagagttatggagatgaatagcaacatttgtagaggtcaagaggatcatcattaagccacatgactaaaagtaaacaagtagagaatgccaagaactcacattttcctccaacaattcatagctaggaatcaagaatcaagattgtagtcaaatatatggtaactagctatctatatatggatccgtctataattagaagctctttactaagatcttcatactaaaaggagaatcaattgctggaatcattagaaagtatataaaaaacagtaaagttatgggaagaggagagatttaagaaacttgcttttcttggtctgaagcaagtttctgccaagaaccaaactctgagattagaagaccccatcc

SEQ ID NO: 7174 - DNA, 1943 bp, Arabidopsis thaliana landsberg
gtgaatgaatatcccaaagaagaatgtttccctcaactaatttcatgttgaagactgctggtctttggcaatcagatggattatacttcgaaacagatgaatccaacagaacatcatttgcagaaaccaaagtgtacaagcgatgagggcgtgttggtgctgcagaaaatacgtaacaattcatcaaaaacatgaaaatatacactcgtatcggtcatgccaaatgtaaaataacattctttttacttacgagataagcccatccctgcaagcatttttccattcccaagggtcagatgatttttgtatcttcgatcatcaattgcagcggcgacagtagttatccagggactatatgataccaaagttttcggaaagggccctccgtttcctgcagcttgagcaacgaaaacaccagcttttacagccccaagaagggtagcatcaaatggattcaagaacgttgtcttggtagttgtgggaggactatttggaccaactgagaggctcaggatatcaactccatcatgaacagcctgtcatgaaaatctcttttaatatcaacatagataatccccatggaaagtagcagttataagattacttgactcgttgaaatctaaaatagataaccggagcttgtgttgctgaacgaataaagcatatgcagcaggataaatcatttcatctaagcagagagatatttccatggtactttatgatcagtcttttctaacttatgttaagttcttactcttacctgatcaattgcagcaacaacatcagcaacaaagcctccaaaaagccggtaaagagccttgtaaacagcaatcctgaaagaaattatttagccttttagtctctgaacgtgaagaatacaaactgtcaataaatctgccattttgcacatctgcctaccttgcacgaggagccatcccactcgcttttccaaattcataaccatgcatcctcaacggaataccgttattcccagctgctatagctgctgtatgactgaaaatccagcataatcagatttgcttagtacaacagcattatctccccctaacacctggagacaactttaaagacaaaccttccatgcccatcaccatccattggcgatgcatagtcgatatctgggttaaatgccccagccgctttagcagcttcagcaaaatgttgggctccaacgatcttcctgttgcagaaactcttcttggtatgaggatcttcttcacatttccctttgtaatgaggaagagggccataaggtaatctgtgatgagacgcgaaactcgggtgatgcggataaatccccgagtcaacaaacccgataacaatatcttctcctgctctatcaaaaccgcctcctgttggccaaacatcggttggaagtcccaaaaactctggtgtatgtgtggtgagtctcctcactttccaatctttgtctacagatctcacaccaggggcgcgacgaagtgtttctgcctaccaaatatagtgaaatagtgtaagggaacatgaaagttaagaactatttagaaatgatctgaaatcgatttttcacctgctcaggagaaacatgagctgcaaatccatttataaggtgtttatagctgtaaagctttttgtatgatccttcctcaaagagcatcccaagaatcatatcgtgcttcctctctaagtgacgagcatacactgtcaccaattcactaaaaaagtaacagcctgttacactagcaagcaatgtatagacactattccaaaagtaacagattgttaatctataaagaatctttagtctcttaaaccaaaagaatcaagactaatcatagtgaccattcgcactctagatttgctgtttagaaaataattatccatcatgttggtactattacaattgaagaagagaaactatctaataagaaacttgatgtggt

SEQ ID NO: 7175 - DNA, 748 bp, Arabidopsis thaliana landsberg
tgtttccccaatgggttatctcatgcacatttgtttgattaaaactgctgcctagccaggatttataattgctatctattctaccaagtcaagtcatgaataggcaattttcatcattacgagcatctgtattttaagtaagcttttcctccatgagagcacatatttcccataacctgacattttttttgtacaacaggtatcataactcaatgcataggccgtcaggaggatatggggacaaatatgattacgaaggccgctatggagacagagatgaagggcgaagtagttatgggaaagagagagaatatggttacagggatgatgatagaaatagtcgtgatggcgatcgttattctagagactctgaagaccgatatggaagagatggtaacacggatgacgaataccgtggaaggagcagaagtgttgataattacaatggatcaagaggtaggagctcggacagggaacggcctattgaggatgatggccaatcctcatcgcggtatgttgattaaatttataatctccctctttaaattggaccgacaaatcaaagatattttaaggcgacaaatcaacaatattcggatgtgcgattgcttagatgtcctcgaagtaaaaaaagactcgtcttgcgtcctgcggatcataccaaaaatttgatgaaacatttctctttgttctgtacggatagtggtgcgccagctgatgatcattctcaagatgggaggaaattttc

SEQ ID NO: 7176 - DNA, 2411 bp, Arabidopsis thaliana landsberg
aaactcgcttaagacctgagttttaaccaaatcccaatgttgtttaaagaacaaagcagtaaatccatctaggcctagggcactttcacaattaatagaaaacactgcattatacacttccaattctgtgacatcttgagttaattgctgattcatatccaatgaaacctttgcttgaaaaccattcaaaaaattatcctggcctattggataagaagatgaaaaaagatgctgaaagaacgaagaagcaattttccctttctcactaatcttggtgtgttcttgtccattttcatccagaaggaagctcaaagagttccctaatctagaagatttcaaagaagcatgaaaaaaccaatgtttttatcttcagcaaacagccatttttgactacttttctgtctcctaaagagttcatcatcctcatcagcaagacccaattgatctttaatatatgcaattctaggccaatttggaaactcataacttttcagcaaatccaaatctttcctcaatctttgaatcctactctaagcattagtatcagctgatttttttccatacactaatagctcttcgacattcaataagactaaagatagaggagtgagaaccttgagacattgcattggtccaagagttggaaatcacttgaatacaagaaggatcatcagctattcttttgtcataacaaaactgtccacgaaacaactcgttatcattaataaacttgactaaaacaggacgatggtcagatccaaatctctcagaaaccactggtgagaatttggaaacaaagaaaaccaagaggaattcccaaagcatctatccaatctacactgaatccattgaccatttctagtccctccccaagtaaagccattgcttgtactacctagttcatgcatatcacaagtattcaacatgtcttgaaaagattgaaacgaagaaggtactcttctcggacccctctctttcccgttttcgacttaatatcattgaagtcacctatcatacaccaagcttgcttccgatgtgatccaagactacacaacttatcccaaacctaaggcctaagatatgtcaccagatgcccataaacacaagaaacaaagcatactttatttctagaagaacactgaagatccaaaagatgtttatcatcaaaaagaatctcaatgtccaaatggcttttccaaaagattgctaagccaccacttctcccttgaggttctattgtatacatatagttataaccaagccaatcaataacttttgaaacaaactcgtcaggattcatagtctccatgaagaataaaatgtccgagatatgattttttttcatctccttaaggtgtcgaattgtccaaggattcctcaagccttgacaattccaactaaggacgccttactgatccaacggtggttcacttggaaccaccgtattcttgtctctcttgaaactttgagcttctgtaatgtctgagggttttcttttccttttgaacaccttttcaaaatgaggagaggcaggagactgaataaccttattcttcagagacagctcattaactagtttttctttcctgaactgaaaaggagtgaaatcctgcattatatgatgtttaaaccctgaagtggaggaactagcctcaccaacacatgtggtaaatccagtactaatgtccaaatctagcatctcagctaacaaagtattctctggatgactatcaattgcaacagtagctgatagaggatttgctggcaaagcatctacccttcctttgggagcaattgactgaaagggaaactcagccagcctcggtaaaaacatcttcttctgtttgcctttctcttgtaatgatctcacatcatgtttgatggaatccgagactttggatgggcatctatttttatcatgagttaatctttgacacaagaaacatctctttctaatccgttcatactcaaaagaaattgtgacaacttcaccagatggaagttgtacctctttattgttacgaagtggattggcgacatgaaacaaaacccgaacacgaacatagtcctgaaactgtgatttttcagagtccatcaccacctccttcacttccccaatacagctcgtgatctctttaattgtgtcctcagtataatagttcaccgaaatattcctcactcgaccccagattggaagaaaattcagataatcaattggaggattctcaatccatctatccatgccgacaccgcgatttatcttctgtccaaactccaattttcataatttcttctaaatcttcgtcagatctgaagaaaaattggaatcgatcctttgagagaaaaacacctaaaacccgagaagaaattctccaaattcgtggcatatgtaatatccaattagacatcct

SEQ ID NO: 7177 - DNA, 761 bp, Arabidopsis thaliana landsberg
  unsure (1)..(761): unsure at all n locations
caaaagctataatttcagttccaagttcagggaacttactctctgatgttagctcagatagatccattgttgttactccttctgtattctcatctggttactgtgatgcatcttcctctggtttcacttctccgggtgtggcttatggtaagaaaacaagatcttgggcacggaaagcaaaagagaaaacagtttctagacaagggttagagatagaatcttctgtggattcggttgaggctggtttgaaaaggaaatgtgtggagaaaggcaaaggtgtgatcagatattccaaaagaactaaagatacggtggttcctagtggaccgccgcaggatcaataggtatattaagttagaattgtcaaggtgtgaggaatccttggacaattcggcatctaaaggaaatgagacggtctcattttcctgatatattattcctcatggaaacgaagaattctgatgatttcattgtacaaattcacggttggttagcttatgataactttaggactgtggcaccagatggtcttagtggagggttggcaatcttttggaaaagtgttcttgacgttgagatcttatttgctgataagaatctgatagacttaaagatctccaacacttcaaaggtttggtttatctcctctgtatatggtaatccagtttctcnccttagaccttatagattgaaacnggatttctaaaattggtgttgtaagaaaggaacttttgtgtatgataggtgacattaaaaaaatt

SEQ ID NO: 7178 - DNA, 1853 bp, Arabidopsis thaliana landsberg
ataatctattggcaaaaaaaaggaaattatgtattttgttctttcaaaaactattactatggttgcacagttgacattcttctgtgcaggaacatttaccacaaatattcccaatggactcttcttatctaatacgttgtttttattttttaacaccatcttatatatgttcatttatccaccttcttaaaattataaacaaatgtttaaacagattctctctaacataacgatttaccgagttacttcatctgtaaagtattgagttttggataatcttgaatcaacaaagttttaatagagattattgcatacgacaaaaataaagaagatataaaaaaattaagatcttggtgggttctcgtagaattgtgtactgcgcatggacttgttttctggaccttggttatagagaattcctttaaagagatgaccagctatgcccaccgtcgtttggtatgcgtattggccctctccatcatcggtaccactcattctgacgcatcggaaaagtgcatccgagctcacttcatctggaaatcttgtctctcccatctctaaccctagcaaagttacacaaagttagggccaaaacttcacaacaaacatttatcaaatcctaacaacaaaactatgttcatttttcaaacacaattttttgttctttattttacttagcttcttacattaatatttaatagtttcatcattttgaaatggaatttcatttttacatttcttagattgcttattgcaatttcgaaatgatatttgatcaaagtaaaactgatgcattatcatgtaaaaagaaagatttattaggcaacaacaatgaaaaactactgaaaccaaacctgatgagtctaaagtagcatgttgattaatgtctctatacttcccaactctgccgctaccgccggttgggttggaggttggcgtctgtagctgctgctgccgctcacggcgtttggcaatggggatccacgtgctcctcacgtgggtgggacagtggagtccgttactcttgcagcaagttctacaccgcccgtgcgtgcaccctttcttggcttggtttccacactcttgacagcttatcgttagagatctcgatgacgtggtcatatcacagacgtcgatctgacccggatatagatcgaggcttggctgctgccatatctgattgttgtggctcgtacttaggttattattggtgtttttgtaccaaacccaatttgtgttttgttgattgtcttcttcgttgtttcttgatgatcctgtcccagccatttcaaaattcgacatagctccttctctaaccctaatcttgaatttacaatatccataatttaaaaatcctagttaccatcaagtcttgagcttttgataactccggccgcgttgcctattttcttttagtgaccttcctctccggtcatattgtgtgctttcattgcatgactagttgttgtggtgacaaaagcgagaagagtaagaagagagagagagctttagatgtgagctttgtgaatcaatagtgaaagcaaaatgcctctggttcttctgttcgtttgactctcacgaagaacgtttctccctttgtctatacctcttctatattttctatcttcttctttatctctttttctctaactctatgttcatcactactcactagtactcatctcatggactatagcttgacacgtggacgtaatttgaccggaaaagtcgctatgggttgtgtcccaatgtaatattaggatagcaatcgcatcctggtttttagttaaggtaatttgcaatttaataagataaagaaaagagaccgtataaatttttgacaacttgtaaat

SEQ ID NO: 7179 - DNA, 595 bp, Arabidopsis thaliana landsberg
  unsure (1)..(595): unsure at all n locations
aatcggacctgcattatatgcaaaccaagagagttaccaaactaaaccaaacgtttcaaaattttgcttcataaagtgttaattttttgtatctaccttcttttgggttggtccattcaatttcacacagtgtagaccaaagaatctgattaccaaagagttctcaaatgctcgaacatggttataatatgctgcaagcatccccagaagcacctacattaagaagacaaaaaagacgctcagtaattgcaatctgaaaagttttggtaatagccagccaacactctctaaccggtaacttgaaaagaactcacttttgtttccgacttcttcattgtttttatcatgtaacgatcatcgtttgttaaataaaaaaaactcccactttttccaggggatgatagttctcgaagggcatcattcccacagatcgataacatgtaatcagctgggtctactttgaatagcttcctcaagctcctggaaaattaaaccataagcaaaacatgtcaataagtaagacaggatttgtagcaatgtgaaataagtaaaggaattnttttgtctaacctgaaactagcgggcataatctttt

SEQ ID NO: 7180 - DNA, 639 bp, Arabidopsis thaliana landsberg
  unsure (1)..(639): unsure at all n locations
ttttacttgtttttcattgtctgcgtaataaatctttatttgtactagataatgcatcacttttactttgatcaaatatcatttgtaaacgggtcaaagaaaaagatctccgaaaaacataataatttcaaaatggtttacatgcatgtataattggataaatataactttttatgatcattaacttaaaaatcaagtttcaaaagcgagaggagcaccaatcttagcagcagtggtctcaacacatttattccacatccgtttgctcctaggaagaatcgcagaagcaacatcttttagctcataagtggcgaacacaaaagtcatcaatccttcgtgacattctcttccaatcttcaaaaagttcacacaacaatcctgcgaaacgggcttgtcgtcgatcaatccttccgtcatctcaacattgcatttcgagctcattttatccgaacaatcttggagaaatttgatgcgccgggtcgtcatgtggcttaagagttcgtggtcgtactcgtaagctgcagcgggttcgtatgccaatgattcaggagatattggactgatctcttcttcttgaccaatagtttgatnnnnnnnnnnnnnnnnnnnnnnnnnnnnnnttatgagaaattgcttctc

SEQ ID NO: 7181 - DNA, 2224 bp, Arabidopsis thaliana landsberg
gaccaaatgaagaattgaagaagaacaaaaaaaaaaggaaataaaaaaaaagtcaaaataaatggtcagtaaaggattttgaccagaccggagcggtccatccatagtttcccactaccttccctgatttagcacagaagaatggcaatttgcatgccatttatttcatctattcctccttcactctataaatacattttaaacaaaatcaatctcttccatacacaaaaaatcaaacaccttttgagagcggttattttttctctatcaactaatacagtaaccttacgggtgtttatttgtatagatctctgtggttttcttggccaactctagtgagatctttttcgtttctcgaattcgatgaaaatgagacgaggcaattcaagtaacgaccatgaacttgggattctacgaggagctaactcggacaccaactcggacacggagagcatcgctagcgaccgtggtgcctttagcggtccgcttggccggcctaaacgtgcgtccaagaaaaacgcaagattcgccgacgatcttcccaagagaagcaatagtgttgctggcggccgtggtgatgacgatgagtacgtggagatcacgctagacatcagggacgactcggtggccgtccatagtgtccaacaagcagctggaggtggaggccacctggaggacccggagctagcccttcttacgaagaagactctcgagagcagcctcaacaacaccacctccttatctttcttccgaagcacctcctcacgcatcaagaacgcctcccgcgagctccgccgcgtgttctctagacgtccctccccggccgtgcggcggtttgaccgcacgagctccgcggccatccacgcactcaaaggtctcaagttcattgccaccaagacggccgcatggccggccgtcgaccaacgtttcgataaactctccgctgattccaacggcctcttactctctgccaagttttgggaatgcttaggtaaataaattacttcttactaagcaattctattagtactatatgtttccatttttgtgttagtctcatttttgttttgttttttactctaggaatgaataaggaatctaaagacttcgctgaccagctctttagagcattagctcgccggaataacgtctccggcgatgcaatcacaaaggaacagcttaggatattctgggaacagatctcagacgaaagctttgatgccaaactccaagtcttttttgacatgtaagcttttttttacttatcttcacctaacccacaataaatatctaacgcgtaatcactatttgtcgtttaatattgactcttaatgaaaatcaaacggtcatcagaatttaaggaccaaaagtaataatattaatcatttgtggagttttggtggatttgtaactaatatatgacatcactgtttggtcagggtggacaaagatgaagatgggcgagtaacagaagaagaggtggctgaggtgagaaaaaacacacaccactcaataattatctttttcaaatattttattatatttatacatttttgtatcttatatttattcatattcctggttgaatatttttttctcttattttatacattattcttggttgattattttgacaattttgtccacgcgcaaatccccactgactttatctgctgacgtttactattaacatcatcaatatattaacttcatgtgaacacgacaaaatggtaatagatagatagagtagtagtctttgttactttagcttaggttattaatgtttcaaatactttagcttttgttttctaatttgttggtaatttattgcagattattagtcttagtgcttctgcaaacaagctctcaaatattcaaaagcaagccaaagaatatgcggcactgataatggaagagttggacccagacaatgctgggtttattatggtacgtgtggtccactttcacccactcaatcacactaatggtattatgtacgtcgtaaatttaaccactcttaaaatactagaaaaaacgtggaaaaacataacgttctagaagtctttagtggtcaaaattattgggtcaccatgatgttttttagtttccaacttattgggccatcttgaactttttaccaaaccaaccaacaaaatctcgacaatgggtggttagaagttacgatatgaagaaatgaccaataaaattgtaaaatatatgaact

SEQ ID NO: 7182 - DNA, 2466 bp, Arabidopsis thaliana landsberg
atattatttcaaagattctgattgaagatctgtccttatacctagaaatcgaggaattatgtggcgcatgcgtccattgcaatagggtcttcgtttgagattatctcttgttatgatcataaaacgccgtactacttttcttgagggtccgttgatgcatttccaagtgtaataatgcatttgctctaggacttctcaatttctctagaatataacaccttaattgtcccaattctatagagccaacatataaaccccaccatgcaacagatgtattattacgtgtatataactaacaattagctttggtattcaacattctcatattcacgaaagcattccattccaaattagagaatcataatttcaaaaacgttgaatcattttctttctcgttcagagctctagattagtcaataatggagattgaatcggtgacgtgcgagtgttgcggcttaatggaagattgtacacaacactacattagtaaagtcaaagctaacttcgccgggaaatggctttgtgggctttgctccgaggcggtaagcgacgaattcagccgtagttcgaagacggtggaggaagctgttaatgcacacatgtcgttttgtggcaagtttaacgctaaccccgcagaactcgtcgccgacggcatgagacagatgctacgaaggaggtccggtgagttatcaccgaagatgtccaagaagttcggaagatctaacaccacataattcatgtagtcatctttttctcactttggccttaaagttttggctaatgtaaagtataataaaagttacaaaattaatactttgagcaaaattaatatttatttgttactaaactcaccagtaatctctgcaagaacacagaccgtttttataacagtgaaacctagttcgatctctcactatgatctctcgttcatacactttagagacgagcttgaagaaaaggtgacaatcctcacacacccttagattcttcactattctaataacaccgcacgagtctttctcttcttctttttcctcattcatcagaccgaagcagagcgcgagcttttcgctatgccatagaaccaaatccttcttttcttcctcctctacatccaccaaaacgctaccacagtctggaacgtaaccggctagcttcagtttacttacaacctcgtctagcttcgcataaatctcatttgattgcttatgtctcttgtcaccgatgagaaactcgtgtgatttcccgttttggtcaatccggctaagacctttctccttgaacacattcttttcctccattacacgtcttatgttccttacgtcctcccatctctgttctctagcgtatatattggacattaacacaagagccccgtcatgatcaggctccagctcgaggatacgtttggctgcaaatttgcctaactcaagctcaccatggattctacaagctgacatcagtgatccccatatgactacattagacgctactggcattgattctataacctcaagagcttctcgtaagagattagctcggccatagagatccaccatgcatccataatgctcaagttttggagtaatattgtattcatcagtcattgatgcaaagatctttttaccttcttcaactagtcctgagtggctacaaccatagagaactcctacaaaagtgacttcattgggctcgacattttcctgtttcattcgggcaaataagctaagtgcatcactggcttctccatgcatagataacgcattgatcatagagctccacgacactacattcctccttggcatcttctcaaacacgtctcttgttgcatccaaacctccacatttcgcatacatgttaatgagggcattatttattgacaactctgattccaacccgttaacatgtatgcaactgtgaacccatttcgctttatccagaataccaaggttagcacaagcagatataacactgaacatgctaaccacatcaggtttgatcccagagcaacacatttcctcaaaaactcttaaagcttcttgaggataatcactttcagcataagccgaaatcattgtggtccaacacaccaaatctttcttttccgtttggtcaaatataacctgagcatcatcgagtctcccacattttgaatacccagaaaccatggcagtcgaaacaaacaagtttctcactgacatcttcctaaaaaactcccttgccatatccatacaaccagctccagcatacatagtaacaagagcagtcaacaaatgagtatccatcctaacatcattttctatcaaaaactcgtaaatagctctgttatatctcatattcccagtacgaccacatgcagagacaatgttacagagaatcatttcatctggcatcacattagaatccttcatctcctcaaaaagcttaaaggcttcatctacaagaccgaatcggctatacctacaa

SEQ ID NO: 7183 - DNA, 1065 bp, Arabidopsis thaliana landsberg
cttaaacaaacctgtggtttcagttttcctctttgaacaagaaagacttaatatctgaatgcatacaagatgttgagttactactcttcccgatttgaaatttggaaacaaattccaaccattgacgtgttttgatagggactcctcacatcccatacaaactgttatccatcagcctgtcgtagaaaactttttggttaggcttattttgtgttcccaccttattatcttttggatgggcttatattgttttcccaccttatgagcttttagttgggctttatttttctataggcccagaaacttgacccaagactttttattgcttcttcctttcttatgacacaccgttttcaaccgagagtcgtttgggatcagaaaagaaatggcttttgacacttcagaagcttttaggtaagaaaggtgtcctctttattcatctcgccaacaaaaggttgatactttggtaaaggaactaatgaagaagcagtatctgaaatctggatctgggacaaggaaggaaaaggacaaggcgaagaggtggttcttggataacggaagcatcttcttaagagaacttgtagctgattgtaacggtaaatccattcctattcgcagtttttctcctgagcagatattgaaagccaccaacaatttcgattctagctgttttgtctcgcaagatgtatactataaatggtatagaggtgaaattgaagatagatcttacatgatcaagagattctcagaggatgagattacaggaaaacgacatagagttaaagaggtttacaacgacattgtcttgtctgctcggatgagtaatcacagtaactttcttcaactttagggatgttgtctcgagtttccttttccggttcttgtgtttgaatttgcagaacatggagctatgaatcagcgagggaggtgttatagttaagggtgaagaatctttattgccgtggagtgtacggttgaagattgtgaaagagattgctaatgcggtgacttatcttcaccggcattccttagatcatcatacttgagatgttaaaccgagcatgt

SEQ ID NO: 7184 - DNA, 2622 bp, Arabidopsis thaliana landsberg
ctcaacgaacatgtcatactaggattaaaactatcttcccatcagctgcaaccttaactccgcaaggaatcgcattaggaaatgaaatgaggacatcttcaaaacagtaaccatcaagctgaggccacttctttatgtaaaattcagcgttctcaaatcctaaaatatcctcccatatctaaaaatggtaaaagaaacagttaaaagcaaaagaataccatgtagacttcaaagtgttcttcaggttaggtgaacaaactaacctgcgcaagaccaggttgaagagcgcattgtatcataaggcgtccaatcacatcatgagctacaactgtttcaatgcgttctccaccaacaagctttaccaatggctcattgtctagatcacacatttcaaccacaacatgtcccttccaaccctcctttactcctgtaagactaagcacaacccttaaggcacgtgcatcgctctgtttatatcatccaaaagtgattaatacttcacaagaaacagtaacaccatagaataagaagtgattgatagcgataaacaaacctgatccgcgttttcatcagatcctagtacaatgatagcacgtgcattcgagactgaaacctgtcagtagatcaaaggttttcagaagcttcaccaccagccaagagttatgcaattaaagctttagaaacttgaccttcttcagatcagctagtataagtggactaccacttctacatataactgatgttcccattaaatcaaattcaaatttagcaatatcagtctccatctcttccttgtctcgttctgctaacacaaccacaacaccgccaccaatacttttatttgctattgccagctgcttcaagagtgacccctacacacatgatatatcctctgtctctaagctatttataaccaatccaacactgtaaagcaaaaattagtaacttaccaatttatcactccatccaagaattagtatatgattactttcaagaacttcacttttccctttccgtagcgaatctaccatcttcgagatagcatctgaaattagtccaagcattgtagcaaatatcaacataccacctgcacttatagcaacagaaactattcttgctccaacaccaactctatcagcgtgacttcccgaatccgctacaaaagtccacgataaccaaagggcttcatcaaccccacagtcactaacagcatacaatgctaatccaccataaactataagaacaacagttgccaacagaagagcaagaagcttagcatatggatacactgaaaaacacacatccaatgaataagctagtctcttcttcaaaggaacgtcttctttcttctgatttgttcgtcttagtagattcttgacatgtgagagatcgtcaagatacatgtacaacaaaaatggtaacacaaaggtgataatgacactgaagaaaacaacagctctagaattagtttcttccatctcattgttgtcactgctactgttacatcttgttagaaggattatattctctgcctgtaacaacaaaacacaagttatcagaaaaacaaccagcttgatctatatgaaccactgttttttgatcttgtaatcagaaaaatctaaaacatacctctagtcttgaaactttagaccgaagaaacatcacataagtaaaagaacatgaacaaatgaatttgagctgcaagaaaacaccaaaattcaatattcacctaataaaaatgagtaatgagtaattgaattcagaataaaacatacacaatgagtgagagagaactgagtccataaccgagttatcctctgactcggggattgactcggcaccggcactggtttttcctcgggattcggaaccgtcgggaggttacttgaatcatcaccgtcgtagctgacagtatctccgtcatcatatctgaaagtgggaatcacaggagaggtgaatcttcgatatgagtttgttggtaacgttttggatctttggaacagagaggttcttctaggggtatgaatcggcatcgggttgaagtaagtaaattgagaaacagagatcagttacaatgattgaaatttggaacatggaagaagagagatctgagagttagagagagcttcttcgtcagtccactgtttgtttagctctctgtctctttttgttacagtttttgaataaacaaatgccaaaaaagtaaatggagggagaaagctttttgatacccaatttagaaagtatctttcttctatcaaatttattatatttcatttgaaatgatacgtaaattagtaatttttctatttttatatacaatcctataatataaaacttaacaaaacatggtttgtgtaaaatttacattgcaaatcattttaccgccacaataaatgtagacaatgaatgtcccaagcgagcctttaataagtcccatgttaagaggaagagtttatatacatagagagagtgtgaagtgaatcaaaagctggtcttgttcatggatatgaaattcttttatttatgcgatgactgtcaacaacttcagaaattagtttgctaaaaccgacaataactatatcatggtatcccgagtcaaaaattcaaacgatgcggttt

SEQ ID NO: 7185 - DNA, 564 bp, Arabidopsis thaliana landsberg
tagcttattataatgaaacccttatgaacaggaccaaaccctccttcaccgagaaaattggtcgatgaaaagctttgtgtaatgactttaagctctgctagggtaaacacatgaagatctgatccggccaaagaaatcgatagatcttctgacaaagtgttggaacttggattgctcatatcaagtatcgatagtctttgaaaagagctctgtttcttgatgacgtcattttttcttttaggtttctttgaagatgccattagggtttctggatctcctaaacatccaacgattagtgatctccatgaaactttcttcttcaccgccattgttgttgattttgtgtttcttttcttcttcttggttggtttgcaatgagagatggaatggtttttaaagaaaatgagaagaagactttataatataaagctttatgttataaatataataactcggtttttaatggtcacgaggagagatagaagaagaagaagactttatagattactaatttcaattcaaattcacctactactactactattggtacttctttaacacaaa

SEQ ID NO: 7186 - DNA, 1240 bp, Arabidopsis thaliana landsberg
ttggtttttttttccaacgatttcacattcaccaatgaaagaaaccaaaatagttttacataataataatttggatcgatttcaagaggctaaagcaacctctcgaatgcgatcaagatctcccaagtacttagtggagttatattctacactatctaataattcttcggaatacgttcgttgcatcatctttatcttcgcttctcttggagtcattacgacatcttcgtggcctagtaataattccacaacctggatacatttaaagaaacagtatcaaaaccggaaccaaaacgaatttgacatttggttctttcccactttgaaaccttaaccgggatggaattacaatattatacctggctcatccggggtcgtagaagagaagattgatcgatgcataaagaagccgtggaagttaaccggataagctcttctcggttatactcatctccaagagatggatccaccaattcttttatagcttttctctctagcaacggcttagcctgtaagcaaaaaggaaacgtaactcgtaccagactgataaaaggatagtgaaccggtccggtttagcctcaaatgtcaaactggtctatatactcacccataagacaaggctctgctgagactcgtcaagggcaggatgtccggttatgagctccaagaggagaactccaaaagcgaaaacatcagtcttctcgtccacgattccgtgcatgaaatattcaggtgcaaagtacctaaaacattgtccaaccaaattctcaactgaaccacataaaaaaaaacttttcctaaaaaatttcaaattgttacccgaatgttccctcaaatttggatacgttatggtgtgtcaattgcttgggaagccatttggctaacccgaagtcgcaaatctgcggttgaaaatcttcggtgagaagaatattatcagctttgatgtctcgatgaatgattcgtctttgacaaccctcatgaagatacactagtccatctgctgttcctaacgctacattgtaacgtctgctccaagtcagcttatattttgatggtcctgtacaaattaatttgagcatttagatatgataaccttaaaagcccgatatgtatatccgttaagtttatgggtggatatagaaaccatggaggagagagcctaagcttccaagaggagatagccggaacacgagatgcattccaccctcgatgcaacaaccgatgaatttggcagtgttag

SEQ ID NO: 7187 - DNA, 2598 bp, Arabidopsis thaliana landsberg
ggagggggctctgtctctgggagtatcttttttaggctcgttatgggagccgagtgtgatctgtggggttccgggtgcggttgtgccttccttgtgatgttgtctgccccaacggtgttctccatgagcttcgtgagtgacgcagcaggcttcataacggtgaggttcatgattggtttttgcctggcgacgtttgtgtcttgtcaatactggatgagcactatgttcaacagtcagatcattggtctggtgaatgggacagcagccggatggggaaacatgggtggcggcataacgcagttgctcatgcccattgtgtatgaaatcattaggcgctgcggttccacacgcttcacggcctggaggatcgccttctttgtacccggttggttgcacatcatcatgggaatcttggtgctcaatctaggtcaagatctgccagatggaaatcgagctaccttggagaaagcgggagaagttgccaaagacaaattcggaaaggtatatttatctatataaatatatattccttaataatttaggctgcttatgttacagatggatcaaaagattaactcgtgatatcgtataaatgttgtagattctgtggtatgccgttacaaactacaggacttggatcttcgttcttctctacggatactccatgggagttgagttgagcactgataatgttatcgccgagtacttctttgacaggtttgttttttatctcgattggaaaatagaagaattaaattataacataagagtaaaactaatgtatacatcatacatggtttgtccaggtttcacttgaagctccacacagcagggctcatagcagcatgtttcggaatggccaatttctttgctcgtccagcaggaggctacgcatctgactttgcagccaagtacttcgggatgagagggaggttgtggacgttgtggatcatacagacggctggtggcctcttctgtgtgtggctcggccgcgccaacacccttgtaactgccgttgtggctatggtgctcttctctatgggggcacaagctgcttgcggagccacctttgcaattgtgccctttgtctcccggcgagctctaggcatcatctcgggtttaaccggggctggagggaactttggatcagggctcacacaactcctcttcttctcgacctcacacttcacaactgaacaagggctaacgtggatgggagtgatgatagtcgcttgcacgttacctgtgaccttagttcactttcctcaatggggaagcatgttcttgcctccttccacagatccagtgaaaggtacagaggctcattattatggttctgagtggaatgagcaggagaagcagaagaacatgcatcaaggaagcctccggtttgccgagaacgccaagtcagagggtggacgccgcgtccgctctgctgctacgccgcctgagaacacacccaacaatgtttgatcatacattccacccacggtggaatggtgaaggatgatcgcatataagaatatgtcacacagtgaaaaaaaaaaatgcaaatgttatcaatgcttgcataacattactatctatctttcatttactaaacaaaccttttgctttttgccttgaaatctttttattatatatcaaaatatatctctatgtcttgaggtttgattattttgcatatatcattaatgatttgataatattggaactggaaactcctttgttcaattcattaaagaattacaccgcacaataaagactatcattctatcccttaagttggtaaggtgggcgaaggtagggttaagaaatgatcatgacatttactttatacttagccttgagaggtgaccaactactaaattgtctgatttcttattatctctgatccctatatcaaactcacgtagaagtagaaatccagtgtatgtagttttcatttggcgtttatttcgtcagttggaaagtaggaaaagtgagtattgtgggatatagatgttgagaatggtagctttggcagtgctgagtttccatgttgttgatgtttcaataggatattaattggagataatttcaatagtttgctctaaaccccttagttggcaattcttttgacttccaaagttcatcatcctggtactccttgtacacaatatagtcatcacaatagttaaccgtccgtaaaacctatcaaattgaccttgtaatcaataggatcctcaatgattataaattctgaacttttattttggtaccattttgatgagtctaaacatgatctcgaaattattgctctcaaacaggaaatatttttacaggtttagaactggtttgttttgtatgtgcagaaagttttagaactgataaaatatttattttaacacaaattcatccggatatttgtatctaaatgcctttctaaaacgcatctataggtgatgataatatatagaagttttaaggatttgatgcgtataagcgtgtacaattgagtataacaactatttatatagatataattagtattagtaatctaattagctttaatatcgccaagcaacagttttgtttaccttttctggtgcgttcact

SEQ ID NO: 7188 - DNA, 468 bp, Arabidopsis thaliana landsberg
tacacggccagtgcatcaaatcacattttcttcactataacaatatccatccctcttagctaattattgtatttttttaatagcattttggcccatagattaactatgagtattaacactatttatgtagggtctaaactttagatcatgcagagaaacaatatatggatcatgtatctaaagatttcaacatgtatttcacaaaccatgatagatactacggacttttataattttctctgtcttctcacgcttttcttttaataactattgaaagtcatgatcaagtcatgatagtctgatagatcatagtttggctattaaggttaaagctgatagaaacccccccttggaaattttccaggggatttcaattttttaccaaccaaaatcgcggaatagattggtaattttttaggttcaataaatttcaagtcgataaagcaagatcccccacaatcccagatt

SEQ ID NO: 7189 - DNA, 1385 bp, Arabidopsis thaliana landsberg
tgcgattcactcgcttccagcttattctgagagactcttttaaagaatctgaggcggctatgaactctaaagttgtggatggtgtggttcagccatgtagggatatggcgggggaacaggggattgatgagttaggtgcagttgcaagagagatggttaggctcattgagactgcaactgttcctatattcgctgtggatgccggaggctgcatcaatggatggaacgctaagattgcagagttgacaggtctctcagttgaagaagctatggggaagtctctggtttctgatttaatatacaaagagaatgaagcaactgtcaataagcttctttctcgtgctttgagaggtatattcagttcttcagctatgttgtatctgcggtgtatataccaattcgcgggtatttgattattttgttgcatttggcaatgcaggggacgaggaaaagaatgtggaggttaagctgaaaactttcagccccgaactacaagggaaagcagtttttgtggttgtgaatgcttgttccagcaaggactacttgaacaacattgtcggcgtttgttttgttggacaagacgttactagtcagaaaatcgtaatggataagttcatcaacatacaaggagattacaaggctattgtacatagcccaaaccctctaatcccgccaatttttgctgctgacgagaacacgtgctgcctggaatggaacatggcgatggaaaagcttacgggttggtctcgcagtgaagtgattgggaaaatgattgtcggggaagtgtttgggagctgttgcatgctaaagggtcctgatgctttaaccaagttcatgattgtattgcataatgcgattggtggccaagatacggataagttccctttcccattctttgaccgcaatgggaagtttgttcaggctctattgactgcaaacaagcgggttagcctcgagggaaaggttattggggctttctgtttcttgcaaatcccgagccctgagctgcagcaagctttagcagtccaacggaggcaggacacagagtgtttcacgaaggcaaaagagttggcttatatttgtcaggtgataaagaatcctttgagcggtatgcgtttcgcaaactcattgttggaggccacagacttgaacgaggaccagaagcagttacttgaaacaagtgtttcttgcgagaaacagatctcaaggatcgtcggggacatggatcttgaaagcattgaagacgggtgagtatagttagaatttatctagaagctagttttgcttacttcacaaaatgtgaccaaatcccaattttgttttttttattgatcagttcatttgtgctaaagagggaagagtttttccttggagtgtcataaacg

SEQ ID NO: 7190 - DNA, 1493 bp, Arabidopsis thaliana landsberg
  unsure (1)..(1493): unsure at all n locations
actataagtaaacggcttatgccaccgaataagaaatagaaaaaggcagtgtaatcttacgccacattgtccggtatatctttgggtgcaaagaactgtggcaataacatcattacatcttcatcagccaggcccatcaaatcactttttcctgcatatatatccgatctagtttaggtgagcacaccacaagaaatctggaataaattggaaaaaaagagaaaatcaatatctgaagttgatcttgtacctgtaaggggatccacatccatccactttctctttttctgctgcgcaatgtccgcgtgaataggaataacatgctgatagtcagccatgcctagacagcgaataagagggaaaaatcttgaaacacttttagaggcataagaaccaagcaaaaggagaggtaagtttttaccatcaaagtgaaacgattcagacaaacgagctacgatatctgcacatagaactggactagcttcctctaaacatacatcactactagtgtcaagaacagactgactttcaggtttcttgatatcctgcttagaaattcttaacaaaaaaccactacaaggacgttgttctcccaatgcaggatgtgcataaggatcttcaggccgaaaccgtagctcaagcttatttgaaattgattcccttgcctaccatataaaaataaaagactcaaaactgaataaatcgtgcaacaaatttaacaaaagctggtggatgcatataccaagactgtaacaacatataggctttaaaaccactctatgaactagcatatgaagacaatctcagtaaaaggaagagactttaaaaccaaaattgagagattttacttgtgtaattccttggatacctccaagtgtttcaatagctcgagaaatagaagatgggtaaccagggaagtgtactacaaacgcctccttgcttggcaaggtacctgagattgatccttcttctataattcccattgattctttccagagattactctcttctgtaaaacaaagagataaatccaatgccaatgcaattagagaattataatgtgtatatatattcctatagattttcagttatatatgtgcttcattgtgtcgccttttgccgacggagaattaggaaaacgaatggtgaatttaacaaagatcggaaatttataattcaggaacttcagactcaccggaaaatacgaattttttttgcctcaaattcttctgtttcccgacatcgnnnnnnnnnnnnnnnnncaaaacccttaattttgaactttttacttatttgggcctatcgcttaagcaaaaacgacatcgttttataaataaagagattataaagccgtcactgcgcttcgaactctggtctccgtatttggactcaaaaggatttgggcttagcccatcatctaaccgacaccgttttaaaaaacgagcacgttgactttttgttaaactccggaagaaataataattgaggatctg

SEQ ID NO: 7191 - DNA, 1193 bp, Arabidopsis thaliana landsberg
caaattcgcacatttgacggcgaatcaagcgattctagaagctacggagaagtcgaacaagattcacatcgtcggttttggaatcgttcaaggtatacaatggcctgctcttcttcaagctctagctactcgtacttctggtaaacccactcaaatccgggtctcgggtatacccgctccatctctcggtgaatctccggaaccgtcgttaatcgccaccggaaaccgcctccgtgatttcgccaaggttctggatctgaatttcgatttcatcccaattctcactcccatacatttacttaacgggtcaagtttccgggtcgacccggatgaagtactggccgtgaatttcatgctccagctctacaaattactcgacgagacgccgacgatagttgacaccgcactacggctcgccaaatcgttgaacccgagggtcgtcactctcggagaatacgaagtgagcttaaaccgggtcggtttcgctaaccgggtgaagaacgcgcttcaattctattccgcggttttcgaatcccttgaaccgaacttggggcgtgattcggaggagagagtgagagttgagcgagagttgttcggccggagaatctcgggtttgattggaccggagaaaaccggaattcatagagaaagaatggaagagaaagagcaatggcgggtattaatggagaatgccggttttgaatcggttaagctgagtaattacgcagtgagccaagcgaagattctattgtggaattacaattacagcaatttgtattcaattgttgaatctaagcctggcttcatctctttggcctggaacgatttacctctcctcactctttcttcctggcgataaccaaaccaaaccgatccggtattcttagttttgttttgttttcaatgttatttttggttagacaaatattcaattgttaatatactccgtggtcatagtgttttgtttttcttttagttcgaacgttgaattaattcaggggtaggttttgaattctctgaaccttatgtgttttttggtaacatcatttggatttgtgaactaggtttaaaaactggtcttagtcttgtcgttttctcattagataatttaaactggatagcttctttatttttggttggataaagtgaccggtactggtcatctgtttgagatgtaatactatatcataaaa

SEQ ID NO: 7192 - DNA, 1279 bp, Arabidopsis thaliana landsberg
agaagggtcatcatggaaggaggtccagatttctagcaaatgaaaaaaaaaatgggtgagaaaaatgattggtttcttaattataacttatttccaaaaatagaaataactatattggaggagcatgacaaatgatgattctttggatttcatgagaaatttttgtttatttaaatagtgttgcttaatgatttcaagcattactcaaaaatcacaaatcaatagtgagaaaaacaatataaacattataaacatatggcattattttttaatcaatttgtttccaaaaccaaataataagattatcaaacaatattattagttgtttagtggcaaaataacattaccaaactaaacaacatgatttgactaaattatccttatctgttacctcctaaacttttaaaatcttaattttaacactctaaatcaaaagcctaattttactaatggtgacggcgtctacgttcctcctcctccgcgatctcaacctcagattccgccgtcgtggtcatcggctctaaaagcatcgctgtgaacggcatatgactgtaaccattcaccggatactgaattccgattggctgacaaagatccaacctacaactcggcgattgtggcgtttgcgtttgcgtttgcggcgacgtcatcgacgacgacgaggaggaatcgtccgccgcaacatcaacccaactcgaaatgagcttagtcccgtagccagtggcggcaataatcgacggttcagcttgactaagaagccattcgatggtttctccttcagttttgtgaccgagctcacgcgttaactggaaaatcctagcggcggcgagagccggcatcgtaactcgacggcttcgtccgttaaccttcgtgtgacggtctttagtcctggcggagatacatccgccgccgctcgaggaggatttcgaaacaccgaactgcgtttgggaacgcgattcggaagctatagcgttgaagttggactcatttctgcacacattctgaaaaatcatctccgaattcgtcgattttgtaaactaatttcagtgacgatgaacaaggattcacagagagaatcttagggttactaaaggagggagaagaagatgattcgaattaacttttggataatttgggcttttaagcccaatataaggcccaacatgatccactctgtaggaaaaaaaaaaagggagagagaacaaaatctgacttccatggcaacaaacaagttttaatttttagaaaaaaaaaatgagagtgtgtgtgtcgccttatc

SEQ ID NO: 7193 - DNA, 1348 bp, Arabidopsis thaliana landsberg
tgtcaataaacataatagcttgtttgctctccaacagtttcaatcctcgaagtgaagtttcaaactttcttcatagtgataataagtaatccataagactagtgaacgtatctaacatagatttaaggaagaggaaatgtaagaaaagctgcccatgagtgactcacaagtgaaccttctgaaagactctgcctcatggaaacactgcccacttggcctccacgagcctggataaccttttgcaacttattaatccactcgttcttgtcgactacactctcagccttaagcacaagggcattgtgagctgcaacataatagtttgaggaaaactcataaaagtgcgaatagaagattaagaagtttgaattcttataatgattgatttatgtacctttgagtacagtcttatagggaaccttgcaggttattttaaacacaaggcctggtccttttgaatcaggtccatttgccttcttgtccttcgagctctttgacttttctacttcgtcctcggggatttcttcaatagtgcattcctgagtggattaataaagttggaggaagtataattagaaaaacatggaaaaaatgttatctatagagtatccaaatttctcatcgataataacagaactattaaatatttgaagcataagcttcaaaatacacaagtaattgtcactctccaagaaggaaacagtgtgggagaaaataacaaggtgaatacgaactatattcttctctaattcttttttccatgtcatatctaattatagttcacctttggcagaaaataaagcataggaagagaatggtacctccaaagttatcgtgccccgaaagtttctttcttcttgctttttggtatagccaagctagaaaaaggtaaacagtaaagtcagtaagttctcaacaactgaagaatatacgtttcaaaatgctgacctttccagttttctcattcagaacaaaccatcgcctactccacccatttgtttttgcacttttcttcattaagtaccctaaatgaaaagagtaagtatttgttatctaccttggaagttagttttgtcaagttagttttaagtgataaagaagaaaaagacatgaagaaatcatgcacttggactaagagcaaagctttgcagcaataaaatcatgcaacgtaaggaaagcaaatcgggagtgaaaaagcataatgaaactttttagacagtccctgggtaggtgtatattagaataacaaccccctgttatctccccctcaggtccagcagaaatcagtccagagacctccggaaactctttatcatgcggactaggtttgtctttattgattttagcg

SEQ ID NO: 7194 - DNA, 1049 bp, Arabidopsis thaliana landsberg
  unsure (1)..(1049): unsure at all n locations
gaaagttagttttgtcaagttagttttaagtgataaagaagaaaaagacatgaagaaatcatgcacttggactaagagcaaagctttgcagcaataaaatcatgcaacgtaaggaaagcaaatcgggagtgaaaaagcagaatgaaactttttagacagtaactgggtannnnnnnnnnnnnnnnnnnnnnnnnnnnnnnctccccctcaggtccagcagttttcagaccagagacctccggcgtctctttatcttgcggactaggtttgtctttcattgattttaagctaccaccagctgttggcccatctggctgaggactagtagcctgataaacatatatgtagagaatttccacattatatattttcatgtaaaacgataaaaaaaaaaaaaaaacatttttcactacgtatatccaaattgatacagaatgaacacacaccctgcttaaaagggactgctctgcatcttgtcccttcttagaagatcgccctttcagctgttcctcgcgacgttgtctttccattctgatggagtcaatacagtgcatcgtcagaaagagaaataattttcagtcatgaaccattgaaaataaaaacaaaaattgcaaagaaagacaagccaaaatacctcctttgcacaagacggataaaatgttgaggtggtacaaaagcgcgttccatatcaactagtgcaaccaccattttcttggcttcattcttgaaaccatcaagtgctgcacttgctatagctacaacctggttgatgattagtcagaaaggaataactgttaccgaaatgataaaatattactgaataaagcaccaaaaaatcattattacctctcgcttgaaaggaggatatctcccaagtcaggtgtagcatttgcagaagctgaaactatgtcaacaagaactcggtgaacctaatcaaaagttaagaccatgttagctcaacacgtaaataagacagaagctggatgcatgagttntaaagtaggaaccaaaaaatagctacatctacgggtagggatattttacttact

SEQ ID NO: 7195 - DNA, 1147 bp, Arabidopsis thaliana landsberg
attttaagctaccaccagttgatgatggcccatctggctgaggactagttgcctgatttacaagcaaaaacaagaattgtttcattatgtacttccatataaaaaaatagtagaagcactgtccactaaatgaatccagattgattctgagataaaagcaaaccctgtttaagagagactgctctgcatcttgtccctttttagaggaacgacctttcagctcctcctcacgacgctgcctttccattctgataaagatagtaaaccgtacagccaaaaaacgaaaatatagttagattatatgcgtcaccataagaacttataactgtaaatatcatgacttatgcgacaaaatgctgccgctatgggacaattaaaaaggtcaaatttgtgatgtaatgaaagtattcagaaacataaatgttcatttcacaggcagacataaaaaaaatagcaggacacacaagaaagtaaatccatttgtacatgtttaaaaccgttttatattaaaagatggaaattttaagataataatctataagtttgagtatgataatgccactcgaaatgacagcaaaaaagcaaagaaagggaagctgatgttaccttctttgtacgaggcggatgaagtgctgaggtggtacaaatgcacgctccatatcaactaatgcaactaccatcttcttagcttcattcttgaatccatcaagtgcggcacttgcaatagctacaacctggttgacgattatttaagaaaaggaacagttattagtaagacgaaaaatacaactgaaagagcagtaaaagcattattacctctctcttaaaaggaggatatctcccaagaccaggtgtggcattcgcagaagctgaaactatgtcaacaagcactcggtgaacctaataagaagttcagaacatattagctcagtaacagatgagactgtaaggcaaccaggttggaaaggttgagtaggaatttaataaatctggatccggagaattaaaatatcataatgaaatgtgttgaacagaccatgtgtgacaagccatagccaatatttcactatttagtaaatttttgaatttcaatgctacgcatctcaaacaagaggaagacacccccagttaagctaaacactaacat

SEQ ID NO: 7196 - DNA, 1814 bp, Arabidopsis thaliana landsberg
attcctaatgagtgggaacttaaaactttcctaaattggaactaattttgttgtctttctttgtattatgatctgcttaaactcttatgaattagactcgcatttattgattcaatgagcctgttttttttgttcttttgaaattgattaggtgaactgatgccttcatcttctggaatgagcttcacgccacatgttatcgcggtttcaataggagaagtaatgttgaatcactaactatttcagagctttcgtgaaatgttttttatttgctgattgctgaaaagctttgaaactttgcaacaggatattgcatcaaaggttatagctttctctcaacaaggtccgagagccatttgcgttttatctgcaagtggtgcagtctctactgcaacacttattcaaccatcagcatctcccggagccattaaatacgaggttcaattttgaaatttcttactatatagagaaacattggtgttttcactgtttttcttataacatatgtttttgtatatttccagggccggtttgaaatcctagcgttatcaacatcttatatagtggcaactgatggaagcttccgtaaccgaactggaaacttatcggtttcgcttgctagccccgatgggcgtgtgattggcggtgccattggtgggcctttaatagctgcaagtcctgttcaggtttggtttcacttttctcttgagctctcatatttcttgggattgaataaagattcttgggtctatcaggttattgtagggagctttatatgggcagctccaaagatcaagagcaagaaacgagaagaagaagcttctgaagttgttcaagaaactgatgatcaccacgttctggacaataataacaacacgatttcgcctgtccctcagcagcagccaaaccaaaacctgatttggtcaacaggttcaaggcaaatggatatgcgtcatgctcatgctgatattgatttaatgcgcggttgatgatagcgagaaagaactctgtgtatataaagcatggaatctaggaagaagaagaaggaatataagctaacctctgaacaaaagtatgtggaaatgttagggaaaaagattatgtggaaatgttagggaaaaagattaactctattagtgtacctctcatatctctaagcttgtttggttttactgtttctgtgactctgaagatttgcagagttcctttctttctctgttttagattgttcagtctttatgtaatttgcttgcaattctgattctacagcttagattccattgtgtagaagtttacatgggaacctgaaaattgggcatttcatgggccttcatatgatccaatttattttcatcaaatttgtattagtacataattaattttgttttttataatagctcaatgtttaagaatcttcttctgttcctgccaatactcattagtccacttctcaacttctttctcaacattttctttcttctcaagaaactttttgagctcatcttcttcaaaaggtggaggcatctcacaagtagccttaacgctcggagacataaccaatgagtcatccatagattgtctcattcggcctccattgattggacaagccattgtctccggacacacttccttggctccttgaggcacttctacattcatcttcatcaacttcccatagctttgcagtagatgcaacatgtaatcatacacatacttcatctttagattctttcgcacataaccacttccatttctccctatagctctggcctataaaacatgagaagatcatagcaaaatgttgttgttacacg

SEQ ID NO: 7197 - DNA, 657 bp, Arabidopsis thaliana landsberg
tgatccgtccaccatcagtaatcgaacaagccatcgtctctgaacaaacctccgtggcattttcaggcactgtcacatccaacttcatcaatttcccatagccttgtaacacatacaacatgtaatcatacacatacttcatctttaggttcttcatcatgtactcacttccttgtctccctatgatttgtgcctatatatatataatgaatttaagacaatcacaaaaagaatcatgggtgatgacaggttatcactgatcagcaattagaaactagtcactagaatttaaaattattgaaaatttcaatatagatattagatatttttggttaccttttcggtgttgttgttgccccattcgactgcaaatttgaggtcaccacatttgttgttttgtctaataggccaaaaatgcttcattgggaccatacttcggaagaaaaagtcgtagtactctggtttaaccaacagagtcatactatcacacgaaagtatatacttttcgctcaccgaccatgcgtttccttctatgtagatcttatatctaaatgtccaagttcaaatccaaaatgtttactaatatattaaaaacaaacataatattaataagatatacgtgatctagtgaatgtatcctgcacatatacctatgag

SEQ ID NO: 7198 - DNA, 2136 bp, Arabidopsis thaliana landsberg
tcatctcccatctcctttctaatggcattcgtcacatcgttggacttctcttgatttccaactaacttgttatctttcaccctcaagttagttgttggtacatcacaagaattaataagtcccattgcaatcctccttttaagccaagtcttgtccttaacagtcgtatcacggccaaaagttgccctgaatgtttcttgcagtgctttaatcggtaaattatccaagcagatctcacctctaactctagaaaaatcaggtttttgagcagcagcagacaatgcagtttcttttggactagcaactgcgtttgagcatcgttccatcatatcagattcattcatcttgcattcatcctgcagtaaagcttcatggtggacttgatcctcctcaaaaaagttgttttcattagaacactggatattggcatctgcaggaatggaaggcatctgagatccatgtacattctcaagcctctcttcctgttcaaccttttgcaacatctcctcgttatactgcaaaaatctcaaagatggagcaaaatcttaggagtaagaccatctggtctctcatggagttcttatgaaaacattaagaatctaactgtggaaatgatacaatgccataaattttaattctattttcaacacttttgaactggtactaacctcagatcgagactttacctggtctgtatatggttgcacattatcagaatgcaataaacctgaattgatagctgaaagaataagaaaatttatcaccaatttatctgaatcctcaacgtaagatagagaaagccacagagacacaagcatatatatcaataatagaaattggtatgaaatttgcaatagattgatacacatctatagtttggaaaagaaaccaaaaatttagctctctctatgatttgcatctagcataatcactctgtgtaaatatatgaaatgtttaaagaagtgcatttggatatacaatgcattcctgaccatagaaacatatgttccctgagaaaaggagcataattagagctaaactaccataggcttttaagcaagaacggttcaacatgtaagggtctatgggaaccaaaccttctgaactttcaatctgggacaaccgagaaggtatcccttcagctggaaggtaacctatagtctgacaagcatctgatgcaatatgcatatccgtctcatcgacctccacattttcttcatcggttgcaaggtagcctatagtctgacaagtatctgatggaatatgcatatcggtgtcattgacttccaaaatttcttcatcggttgcaggcactagactcccatctcctgaaacctaaccatttccataaacaacccaaaataagattttgaaaggctggctaatatatatagtcataatagacagatttctcaaatccagaagcccctattagattattttttccccgttctaacttggaagaagttcacagaagtcagaagccacacgcagaaatcaaacaataggattaactataagagagccagtgaaaagaagacatttatagccatacccggacaagcttgtaggcaacaggatttccaatctgatttgttgaagaaaatggtgtgatccttgtctgagcattgccctcaaacatatctctgcggtcctcaacagttccaaccacagttcccatcgcaaatctaacttaggaacacactatctgcaatcccaaacagagaaagagcaaacaaattgatatatgctcaatatattcttcaagtactaaaaaaaacaatccaccaaagcatgtttcagtactacatataactttaccaaagaaaaaaacaattcttttactatttgacagcatctctgtacaatttcacaccaaaaacctgaacacaaagcaaattctcatacaaataacaccatcagacgaaaacaaagcagtcccaaagtgagaagtatctattatcaaacaaaagtaaagccctttgaatattaagtataacactaagtatacaaaattaagaaagattaaaaaattgaaattccaaagaattcacatgttttacaattgacacactaagaccttgcattctcacaatcaatttgacaattttagatcgaattacgaatacatcacag

SEQ ID NO: 7199 - DNA, 533 bp, Arabidopsis thaliana landsberg
atccagatcagaggattcgagtagggtttctttccggactttagttttttaagataatggagtcaatggaggatatgagtttgaaaaaattgcagaggctgaaatgacctacttaccacatttggaaaagcgtctgttaaagccttcatccgcctttgaccaccatagatttctccagcagctatgtaaatttgaacatttcggtcaatacccaacgcggtcagagtgagagcggtttcctcaggagttaaagggcaaaggccatctttcctcttcagctcagagtttatgactttctctttccaccatggataagcatatctgcaaacaaagagaatttacatcaatagatccatcaaagtcggaacaaaagcaggaagatttttcggggattttttatacctcattcttgttagttcttcttcttcctcggggttgcaaccatgtgaacaaccagaaaatgctaacatatccatctcatatctgagatgcaagacaagaaaaggacctttctctttcagaatcttgactac

SEQ ID NO: 7200 - DNA, 1816 bp, Arabidopsis thaliana landsberg
tccatcatgccatccatgtcacttctgtaatgtccttaaaaacgcacagagatgcctttggacttcactagcaaaatttacttccctccactctcctgctgatatcaagcaaaaaaacattgaagcaataaaggtttgtaacttttttctcaaccttatattcaggtacaaaacgagatagggaaatctcatttagttttaagtttatcctatgctggggctagcattcacattttgcatctgaaaatcttgggacaaagtaattaatgtttctttttgcacttttctcagttcaaggaaatgataattgggttagctgacattcaaacctgattaatcttgaaaataccaatggatgataagaaatgtcttctatgtataaattgtttttttctgttcactgataggcaatagtaaaactggcggaggaagaaggaaactatctacaagatgcttgggagcatatactgacttgtgtttcacggtttgagcatcttcatctcttgggggaaggagcgcctcctgatgccactttctttgcatttcctcaaacggagtcaggaaactctccactggctaagccaaattccgtacctgcaattaaagaaagagcacctggaaaacttcagtatgctgcatctgctatgataaggggttcctacgatggttctggtgttgctggaaaggcttctaatacagtgacatctgaacagatgaacaacttgatatctaatctaaacttgctagaacaagttggtgacatgagtcggatatttactcgtagtcaaagattgaatagtgaagccataattgactttgttaaagccctctgcaaagtttccatggatgagttacgatctccatctgatccacgggtcttcagcctaacaaagattgtggaaatagcgtaaggatcaatcttttctttacgatatctgttttgtttttgctcactctctcttatttataccctgtttgttgtaatggcaggcactataacatgaaccgcataagacttgtctggtcgagcatctggcatgtgctctctgatttctttgtgactattggctgttctgataacctctccattgcaatttttgcaatggattctttgcgccagctgtctatgaagttcttagagcgggaagagttggcgaattataacttccaaaatgaatttatgaagccttttgttgttgtcatgcgcaaaagtggtgctgttgagatcagggaattgattatacgatgtgtctcacagatggttttatcccgtgttgacaatgtcaagtcgggatggaagagtatgttcatggtatttgatccatcaaacttccagttacgttgatgtctctctaagttcttgctggcagatatacttactaaaatctgtttgctcttgcagattttcacgacagcagcacatgatgcacataaaaatattgcgttcctgacttttgaaatggttgagaagattatccgagactactttccacacatgacggagacagagacaaccaccttcacagactgtgtgaattgccttgttgcggtcaccaattgtaaatttgagaaagatattaaactcccagccattgctttccttcagtattgcgcaagaaaacttgctgaaggctatgttggttcgtcactgaggaggaacccaccattatgtcctcagggtggaaaaattggaaaacaagatatttggtaagttcctagaaaggtgatgaacatttgtatattttggttttcaactgatagcccggtaacgccaaaaattcttactttcaatttaattggcttttacttctttaaa

SEQ ID NO: 7201 - DNA, 2966 bp, Arabidopsis thaliana landsberg
ggacattcaagacaccagataaggcagtgacacgaccctcctcgtcctttgtgatttcctttacgatggcatttgcccagtccatcaaagttacttcctcaccaatggatatggcactcgcatcagcttcctcgagccaaatgctcttagtgaaagtggtcgccttttctccagcaccttcgaatttcttgtgctttggtatcatgcgaacaaacggctcatcaggaccatccgttaaggtaaatagtacacgacgttctgcaaccacagcagtgtgtctagggcacacaggatcaattattctcttatttatagaccaaagtttgtcccattccatcaaatttagattcttcgaagccccctggaaacgaataacaatcatcagaattattatacagatcattcaaatgagataaccaacaatgaaacagaaaggtttacctgctcgagaatgaattgaatcagagcctcgattttcaaacctctacgaacaattccttggactgtcgggaaacgtggatcatcccacccgtcaaccaatccagtttggacaaaccagagaagcttgcgcttactgagaagtgtaaaaactaggtttaaccggctgaattcgtaaagctgaacctgtcgcagtcccatatcctccagaactttaaagtactgagcatttcggtcatgatactcactagaccgaagagcatgcgttataccttcaagggaatcaacaaacgggcaagcaaagtcatatgttggatatatcttatacttatccccgatacggtggtgagacataggattgcatcggtaataaaccgggtcacgcatggctttgatgggatcttgcatgttgaatttcccacgaacacagcactgtaatcctctctcacttcctgcaatcattttcttccatagcttcaaattctcctcgacgctatgattcctacatttcgaatcaatcccatccatcctctctttctgcatctgctccctcggtgtgtcatcaacatatgccttaccctcacgcatcagtttttccgccatatccatcaattcaggaaaatagtccgaagtgtatgtcactttctcatacttgatccccaaggtcccaatatccttcacaagattatccacaaactcattgctttctttagcagggttagtatcatcaaaacgcacaatcacttccccttggtaacgctcagcgaaatacttgttcagcaacgcagccttagcatgtcctatgtgaagataaccacttggctctggagcaaaccggagtttaacctttccaatctccgcttccggcaagtccacttcaggcttacctttatcctgaccatctcctttcacagcttgttggctatctttagacttaggtgcagcaacaggcttccctgatcctttcttaacataagttgctagaaccttgttaagcacctcactgtactcgtctaatatcgaattgaaccatctaacaagactctgatactttttagatttcctcaaactttcccatctttgaccagttcctaccaaatctcaactaatcagcttcaaatacagagaaactcacaccaaacacataacaaagataacaaatttcttaccagcaagagctgaccaaatagcgacatcagcaatggaaagagaatggccaacaagaaacgtgctactctcgagatacttatcaacacgaccacaagcattctcaaactctgaaccagaagagaagacagatgcgtaatctacccactcatcaatctgagaaccacccacaagaacaaacaaagttacaaagattcaacatttacatcagaagattcgaactttcatgttaatacaaagaatcgagacctgagaagaatcaaaagcattgttgccatagaaatcaggaagctttttcgctgatcgaccaacatagcgaagaagatcggtggctccattcaatttcctcctacatcaagaaattatcaaaaaggtttaaactttcatagaactcaaagaaggaaccagactaagaaaacggaaagtacccgtcggagaagacaaaagaagggacggttgttgcagcggcggaagaatcaatcgtcaccggagaagctgagagagaaagagcaacgatgactgaaagtggtggactttccggtgggaacgaaagcttcatcccatccatctttggatctaaatcagagaaacgagaaatggattgtgcaatgtgggtttgagagagagacgagaaacagaaccctagttttttggttgagtggtttcgggtcttaggattaggtttttacttttttaactgtgggcggctccaagttgtcaactttttcaatttttagtccataaagtatcaatctttacatagtgttttttttttaactcaacttggattagagtaataagtagttaaattggtatgtacacatcatttggagaatcatactatactaagactatccttggttatatgagttatgtgactggtttctgtatcagtgtctctgcagttctcttttcaagagagaatacttcatgggagctccaatgcagaggcaattcagaaaagctaaaaggcaatacaaatctttgaactaaaatctctcatagactcatataggaaacaatcgaaacagattaacactgtgccaatagaactaaggaatgggaagtaaccagatactcatttagcaataccactgaaatccaatgctaaatggtccctcttctttggacaaggtcattgcttaacctgctttttgttcgattcacgaaaccagaaagactatcaatcaactctcaaccaaatgtgcgcaccacacatcctaaacaatctaccgagacatcattataaacctagccatcactaaaatctctgtaaaccaagtcacacacaggctatattcagtcctaggctagttataaaagacaaatagactaagtcttgagcacctaaacttcttcaa

SEQ ID NO: 7202 - DNA, 2922 bp, Arabidopsis thaliana landsberg
  unsure (1)..(2922): unsure at all n locations
cattatagacatatcacatagcaatgctatctcgatggtatttttgagtgctaccctcgatgttatgacttgacggtgagcttctgtgttggtcaattctgctaatggacggcagcagaacttttaggagagtttccaatgtggtgtgtcaagtgtgtggcttcgtcatggggttctcaatttgtgnnnnnnnnnnnnnnnnnnnttgtgggctatgataacggtttagcctccagcggtggctgttcgcgatcttcaattgattcacgcctcatgtatccatgtctctttgattttgcctcaagctctagttttgattgtgtcttgctattgatgttgctttgagtaggagtaagtcaggatggggttatttgctttttgttgtgtttcggtttgtgtcctagaggagctagtaagaccattggtgatcgttgtgaatttggaatgttttatcttgctctgtgctagccgacttcgggattgaacttggtagatggagcttgcagtgtttgcataatttggttcacgaggttacattttgggaaagctcatggatgtgattttcaggtcgctctcacataccagaggagactcatgttgatatggttcaaattgccttaaacctactctctcaaataagagatcggttgcagtatttaagggtcgaatttcctcaaaggtcttttgttcacacaatgaatcaaatgtcaagattaagctagcagggaaatattgtaataaaagaaaacaaagtaaacaaaccgcatattgggggttgtaaaacaataaagtaaagagttaggaacagagtattctcaaaaaactattggttagtagatctaatgaaagctaggttgttatttaaccattcttaaactcaaactctaattatggaataaccggtcgcgttccgcgaaactccctatatctatagctaagaataaccggagaagccgaggcattatcaacctaaataagcattcttaacgagtttgattgttcaccttagtagttaggccgatttttattacacacctaaaaaccaggctcatcaaataatcgatctaactacagatacctatggctgcatatctattgtctagattcaagatctagttaattactctagatctagcattaagcataattaaagatgaagaattctatagataacgtagcaagggggcaatctactaaaccatatgaatccctaatgagaaacactattcctaacaagcagattactcagacatattgattgaagcaaacaacatatttgggtatgaaaacataaacacaacaaatagattaagggaaagaaggatctcttcactgtattaagatctgaatcaatctctgaaaacaatcaatgaatagcttatgtctctcactaacagggtttgcaaaaagcttcgtaagaacttgatagaaaacttgatagaaaacttgatgataaaaactagatcaaacaaaatttaggtctaaacaatgtatataaaccctataaaacgtctagggactaataatgcaaataggaaagttttctggggcaaattcccttttctgtagacttgaaagcgtctaggactttgctaggccgaaactggtgtcgatcgacaccaagagtgtgtcggtcgacactcctcttgattcctgaatccaaaatcttccttagcttcctttcctttagctcttgctccaaaatgtcttcttatttccattgtcgtcccactgcataaaatacttgaataagacactaaaaagactcgagaaataacataaagactcaagatcctatacctaaaacatagataaaatcagtgaaaatagggatatatcaatgggaccaacgggtttgggtatatgatgtctccacgaagaccaattttaacatgcatgcaattttaatgcggactgtaagtgactttcccgcatatggcatgttatctggttggacaacccacgaaagattgttatgtccgtattgtcaagacaatgcagatgccttccaattacgatatggccgaaaaacatgttggtttgattgtcatggtcgttttctaagacggaatcattcatatcgtcgtaataagacattgttccgtaagaacaagactatccgtgatccaccaccagatgagtattatggtgactatatactgaatcaattttgtgattttgatgttgatcgtacaatatcggttgggggtaatggtcatgtccggattgatggatatggagagcatcataattggcataaaaaagtattttgtaggatccaccgtattggagaaagtcatcgactccgccattgtcttgacgttatgcatattgagaagaatttctttgacaacatcattaacacaattttgaatgtggcaggtaagactaaagataatgtaaagtccagaatggatttacctaatatatgtgatcgcgaggatctccatttgcttgcaaacggagtagatcatgttcctatttggagattagatggaaacatgaagtccaagtttttttagtggataattgatgatgttaagttcctgatggctatgcatcaaatatatcatattatgttgatgatcatagtggtagattagctggattgaaaagtcatgacagtcacgtcttcatgcaacgttaactaccttttgtgtttacaaaactactgccaagtgttgtccatgaagcaattgcaggtacaaccaacttatcttgcttttattttattaattttcttattcatgtatatttttttggttattcattttttgaaggtataagtgcattttttagagatttgtgttcaagatctctaactgttgaagagttacatacgcttgaagataatatccccattatcatttgcaatttagagaaatttcccccccttcgttcttgatgtcatggagcactgct

SEQ ID NO: 7203 - DNA, 2331 bp, Arabidopsis thaliana landsberg
atactctctttaagtactttcataatatggatacaactacttttttttatacatacatgtttctatttatcaaacaagtgaccataaatgatcctattctttttaataaagtgtgaccatggttttcaataatatgtgacatgagaaaaatctgattcaaatgaacgatgttaaacatatttatttcaccttttcaattaactttgccggggatagatttatgggtaacaaatgtaacttcttgcgtgagaatccatcaacaaatggaataatatgttggatatacagtacttacccaaaaagtaaataaaagaagctcaaagcttaaagataccacttgtccaatcttgaagaagaatcaaacgatctctacaaattgaagatgaatcaaacttatccacagattgtttctctacaaaagcttcaacctcatatctctgaaaacaacacaattagaaagaaagattgtgagagaaagagatgtcgaaccaagattctgttcagttggatgtccaagaaagccatgtaatatccctctccctcacacatagctgcttcatctatatgtttttgtccatatcaccatatgtatatacatgaatatggtaaatgcaggtggtcatgggaaatggtaaagtgaaagtgaccatatcaaaaccagatggttttgtcaccggaatctcttaccagggcgtcgacaatctactagaaactcacaacgaagatttcaatcgagggtacttagtgtagaatgtttgttatacatccatcagtctattactaaacttattacaacatatgaaatgttgtgtccaaactcaggtactgggaccttgtttggagcgatgaagggacgcctggaaccacagggaaatccgagcggtaagtatacatcgttccatcgagcttataatcaagtttttatataaatgtttataaacttggctgaggcaggatcaaaggcacaagttttgaagtagtagtggaaaatgaagagctggtagaaatttccttctcaaggaaatgggattcttctctccaagacagtattgctcccattaatgttgacaagaggtatgtcattttaatacaacatgcatttatgtgtgagtgtggcagagagtttgatttggatattgtatcattcaggttcataatgcgtaaagatgtaactggattctactcatatgcgatatttgagcatctagcggaatggccagcttttaacttgcctcagacaaggattgtctacaagcttcgtaaagacaagtaactaaagttcaatatcaatctttcccttaaaaccaatattagtatatactcatgtggaaagaaaacttgcaggtttaaatatatggcgattgctgataacaggcagaggaaaatgccacttccagaggatagattggggaaaagaggaagacctttggcttatcctgaagctgttcttcttgttcatcctgttgaagacgagtttaaaggagaggttgatgacaagtatgagtattcaagtgagaacaaagatctgaaagtgcatggatggatctcacataacttggatttgggttgctggcaaatcattcctagcaatgagttcagatcaggtggcttgtccaaacagaaccttacttctcatgttggtcccatcagtcttgctgtatgtttcttttctctcttcctccttgaaacatgttctcttatctatgatgatgggttcttacttaatgattgtgtaaacacagatgtttttgagtgctcactacgcgggtgaggatatggtgatgaaggtgaaagcaggggagtcatggaagaaagtgtttggtcctgtctttacttacctcaattgcttgcctgacaaaacctctgaccctctttcgctatggcaagacgctaaaaaccaggtttatccattaaccaaccttctaccttttgtgcatattataaaaaacttatctaacattgtaggaagtggtgtttgattagatgttaactgaagtccaaagctggccttacgatttccctgcttcagaagactttccagtgtccgataagcgcggttgcatcagcggtagattactagtatgcgacaagtaagcctcacattccaccatttgctctgcttttcttcgttttactatcattcactcaccgttgttttcttatgtttttttgttaaaattccttcagatttcttagtgatgattttttaccagcaaatggtgctttcgtagggttggctccaccaggagaggttggatcctggcaattagaatctaaggtcagccatgcaaattatactcttagaccatgtaagaatatacatgtaaacac

SEQ ID NO: 7204 - DNA, 1022 bp, Arabidopsis thaliana landsberg
agccggcgaatcaagtgacgatctccaccgtcgatctcagctacaatcgattctccggtgggatatctccgcttctctcaagcgttgagaatctctacttaaacagcaatcgtttcaccggtgaagtcccggcgagtttcgtggagaggttgttatcggcgaacatacagactctgtatctacagcataatttcttgacgggaatacagattagcccggcggcggaaatcccggtgagcagctcgctgtgtctgcagtataactgtatggtgccgccgttacaaaccccgtgtccgctaaaggccggcccacaaaagactaggcccactacacaatgcaccgagtggcgagggtagtttggtaaattacgctttcttatataatactatgtttttatttttttggttaaagtttttgaggaacagagtgtttcatcgtgttaaaaaaaaacttttaaaggaaaaaacgattcgtttattcgttggtgagaatgaagattagagttttggtgtgtacaagtgtctttggaataaggattatattgatgtgaggatgaagattgtccactatccatctgtttctgcgtatttaaaattggaaaatgatggttttgttttattgaagagtgttcaaaatggtttcatgaatgatcttgtttaccaaaatttgttttcagaaaagtaataacttaaaattcgttttaatagaaaaaaaggagtgggagatgacaaatgagtaagcagtttcagttcaaatgaaataaaaaaattcataggaaaataaatgagtaatcaattctagaaatcaaaacatttatgaacacaacaatcagaatgataatggaatgggaatatttttttggtaatgaatggaatgggaatatatgctttttaagttttaacctcataaccatgtattaaaattatataagtagaaataaattaggccaaaatggaataatgaacaattgttttcccaactttaagtatatttaaaagaaaatcagctttttaaaaatttgt

SEQ ID NO: 7205 - DNA, 805 bp, Arabidopsis thaliana landsberg
cgccgagactcgccggaatctcgccggagatgaaattccggctgattgcgagaaaacgaaggtcttttagctgagagattgttgccggtaacgcacccatgattctgccggggacaatggagagctcagtgagtgcagagagtttgcctattgctgggtcgatccgacccgataaaccgggtgaaccggctctaggatcgccgagattgagagagattactttatctccgttgcagtagacgccagcgaagccgcatggatcagaagtgaaatcccaagactcgaagaacttggaacctggcaagtcatcgagggatttacgaatagcttgcagagccaagaaatcaactgggtcgagaatcgcctccgtgaagaagccgaatcgaagcaggaacatcaaacaccaaaccaacttggtaaatctcatcatcatcttcttcttcttcttcttcagacttagccgttacaggttcaagaaacagagactatatatatacacagagggaagaacagagacgagctgtaaagtagagaaaatgggttttgttttctgatttctcgtgagagggaaagtctctggtttatgtggtggaaagaaggtgttctcgtgggagcttccgtgagagctttaatggaggattatcaataaacgattagcaaaaggaagaaaagaaaggtttatcgagagaagagaaagagaggtaacaaaatggcttgagaaggaagccaaaaaccccagaaatgaatcaacgtcgtcggctggttctttttttcttctcctctattttttgttcccttttttata

SEQ ID NO: 7206 - DNA, 2599 bp, Arabidopsis thaliana landsberg
ctacaaatgacgtgaaaataactttctatatactatcagagatgcagaaacaaaccatatgacagttttatgtagagattgtgtgtattatataactttctatattagaaaaataactgtcatatatattatgtgtgttctagagattgtgtagaaacttcatggtgttgttctcagctcatatgacagtttgatcttcatattttcaaatttattctcgtataactgagctacgatatgctatcaactgcttatctgatactaatggtatatattctttttaggtcgagatatttgaatcagaatttgacatctcaaagatctatcaactccagtgcaggctcaaggatatttactttccttacatccaggtattcttagggtattgataatacaatatatcacaatccatgttaattgctagggattttgttaacggctttaattcgttcttaaagcatgttaatctttaccaaatatggatccggtgatgcctgaaaactgtgctataaatatggaaaaaatgatgagtttctgatcggtgatatatgttttctaatagttttgccttgcgaccattttcttggtgagtttttccttggctcggattaagtgtcactgttttaatttgctttattaacctgtagtgtgatgaactctccaaaactgggaggactgaaaggcctgtggcgtttcaggtttgttatcatcatcattggctaatcagttgacagttgtgttctcgtttgatattactaagattatcatttgtagctaaattttgtttcagatttgttattattattccaagataaattacttcaagtgttcttagatatactcttttcctggtattctttcaccttttcaggtcaatggggaagatttggctgagatagcaggtggagaggttgccattaccaacctacactccaagggtcaatttttttcatttcagattcgattcactcttttcggtgggaaaagaaaaggtaaaaacccctcttcagatcaagacgtttcctattagttaagctcctggctgcttttgcctcagtatccggtattaagtctatttaaaatacggctggtacgttccaatgaagagatatttttgtttgggcttataatgaaactgcagtgatggttgttttgtggtccaccaacacatacataatcttcttacactggaatttttagagagcctatatcatgtttgttaagagaaacgctgaaatgccctcctaacagaagcacaaaaattgcaatcccaagagtttatcatcattggattctgattatatatgtgttccagggacagctcaagaggcaaatgctcgcctcaagtttgtttattttccaatcgtccaggtataacaatcctttttacagaagaaaacattacctttggttaccttctcgaactgaacactttagaatctttgcagggaaaagaaagcattgagaaaattttgcagagtttagaagaggaaggatgcaaagtttctgaaagcttccagacttttggccgtgtttcattaagaaggcttggtcgcttacttccagaagtccgttgggttagttttctcttgtaactattatcatgctatttatggtgtagagggcttgcaagttctccgaatatgcttgaaaactagaatttaactcttgcgttgtttgtgtcatcaataaatgtgtaggattcaataccgtttatgcaaagaggaaacagagcttctactttgcagaaaagctgccgaagagtaaaatgctttgttggtatgaagtgctcatacattgtcagttgtatatgtacatctgttttttttttctttatgagtgtacactctttgtggttgcagatttggatgctggttttagcccaacgccctccaaagtgagctaaacactaatcctagattattaaacgtgtttagtacattatcatctgatcactgaacaagctttttacagactgaccttgcaagccaaaatcctttctcagtggctttaagaaactttggtagtaagtcgacggagaaagagaaggatgatggtcagtttgaaatccttttgcaatcttgttttttccattccttgtcgtaattggattataatgaattcttgtttttacagatgtcaatattgtgattcatagagaaggaaaatctgtcagctatgcgcatctggaggaaaaatatcaagaatgggttttggagatgcataatacccatgatgaagaagctgcatcgggtctagatgaagctgtcctcattgttggatccttggataaaaaggcccttggcattttgcgtgatggtatgttttagctttgtttggaaagctataggctcaaaaatgcatgttttctaagcattatcatatatccatatatttttactaatcattgatgttgtagtagaatggataattccatatatttcaagtttatctccttgtatgaattgggtgctcatacctccaatgtttttgagctgtagctgtgagggtgcataaggaagttaggagaaaagaaaaaacatggaaacgtggtcagaatataaagattctgagaggagcttatgctgggattcacaat

SEQ ID NO: 7207 - DNA, 969 bp, Arabidopsis thaliana landsberg
tgtcaaggatttaaaatgattatgactgtgtgtaaagatatttttgtttccaataactgtgtgtatgcatcaattccgtttatggaaagtggagccagagccactactttgcagaaatgttgtcgaacagtgatatgctttgtcggtatgatgccctcgcacatagtcaattgtaaatgtatctgttttaaattgttttatgaaagcatatttcatgtgcaatcttggtggttacagatttggatgctggttttagcccaacgccctcaaaagtgagtaacactatccttcattccttgatattattagtacaattttatttgattatttaacatgctttttgcagaccgatcttgcatatcacaaccccttcactttggctctgaaaaactttggttgtaaatcaaaggagaaggataacggtcagtttgaaacccatttgtagccttattttgctcttcttctagtaactagtatatatttattctaaaaattaatttttacagatatcaatatttcgtttcatagagtaggaacagcattagtttttgagcaagtggagcgggattatgagaactgggttatggagatgcataaaacttatgatgaagaagatgcgttgggcgaagatgacgcagtcattatttttgattccttggataacaaagctctttgcatttcgcctgattgtaaaggtatgcagctgcaaacgactatacatgccttcatcaagatacaaataataattgtttgggataaatatccaatgaataactcacgaatgctgctgtaaaaaattatgatttcgtgagtgatagtattaccatatcttcatttttaccttgtacaaaattgttatatgtaattgcaatgcttttgagctttagctgtgagggtacacaatgttatgaagagaagagggaagtcatggcaacgtggacagaagatcaggattctgaagggtgcatg

SEQ ID NO: 7208 - DNA, 1141 bp, Arabidopsis thaliana landsberg
tgtagcaccagaagaagaggcaacattaggataagcatcattagtattaagctgagccgagaagtaagcaagaactccctgaatctgatctttgataagtgtttttgccatgcctgcaagtaaatcatttgatggagtaggcatcatagcaagctgagcaaccacatgtttggtagcaactggtttatcttgttgagtagacttgttcttgtgtttgaaaccaataggataaccatggactttataacacttgtctacagtgtgtcatgtatatccacaatgagaacaaatgatctttggctgagattttgaatgattataagttgcatttatagaagcctgtgctggttctggagcagatacattaaaagccactgcattctgaacaggtgtaatagtcctctgactgaaatcttgatccaacagattataaatctctgcaagtttagggacatttttcttcattattatctgactgcgaatcacagagtaagaatcattcaaaccagcaaggaatttgatcacacgagtatgttctgattgagttgccatagtcttgcaacaagtacagtttctgcaaacattaacacaattctcaccatccagttcattccacaatgtcttcaatttggtaaaataagcatcaagagtcatattaccctgctgcaatgaccaaatttgctgagacagttgatatgaacgtggtaggtttgtgatatgaaatcgagtagctaactctttccatatctcagatgcatcattgaaacgaagtatgcttttataaatctgtttagaaactgagtttagaagccaggatttcaccatagaattacatctagaccatatcctgaatatagcatccgtttcactcggtctaacaacagatccatcaataaacgcaagtttgtttttcgcatctaaggaggttttcatcgcgatctgccaatcatcataatttgtaccatcaagaacttcagaaattatcgaaagaccatgattatccccattagagagatgatatagtgagtgtatactgtctggattatcgaatcgatgaaacagaagtcggtggaggcgaaggatgaggaggcggatgatgagagtcttccggagtacgctctggtgaagaacttcgcgattt

SEQ ID NO: 7209 - DNA, 2460 bp, Arabidopsis thaliana landsberg
gagagtctatgcccatgctcatgattaccatattaattcaatctccaatagcaggtaatcgttttcctaagttttccctcaggttatatgttttactcttgatatctctttaacacgtttttgctgtctttctccttaatttttccatctcaggaaacaatgctaatatctaaaaaatccttagaattttattttgcatgtctttccatgtctggtcgtgctactattctctttgtcgaaaatcttgttgatcctaaatttcacaacttgtattgcattgttttgttccttgtggtaatgaatcgttcccttaattgttacagtgacggagaaacctttatttcggctgatgatctgcgagtaaatctctggaatttggaaattagcaaccagagtttcaatattgttgatgttaagcccacaaacatggaggacttaactggtatgctacttctcctattttgatagatgttactttgtatggtcttaccattgattcatatgtcaacaacctccttacttttattatctatttttttcacgtttactgcttgtcgagcatgcttctaaatgctacatggtctgtgcagaggttattacatcagctgagtttcatcctatccattgtaatatgctcgcatatagtagttcaaaaggctccattcgtttgattgatatgcgtcaatcagctctgtgtgattctcatacgaaattgtaagttctgttctcatcatcctttatcggaaatggtagttgcatgtttcaatatatacttaagaaggggatatgaatacgtgggttcatttccaattttcctcttttcttgtcagaaatgacttggaaatgaagattaataggctaaagtttctgaccactgaccattgttgcttcatatcacagatttgaagaaccggaagcacctggttcaagatcatttttcacagagataattgcctcaatttcagatattaaattctcaaaggatgggagatacatacttagtcgcgattacatgacgctcaaggttggaaatcattcggttccctttgtgtatatttttctgattgtgggccaatagaggtctattctttagttctttctgatatcttttaccctttttgacgtttcagctgtgggacataaacatggattctggtccggtcgcatcttaccaggttcatgaacatctgagacccagggtgagagcttctttctgtggcatcttttatttgttgattctgtgttgaaagctaaccacgttatgtttaacccggttgcagctatgcgatctatatgaaaatgactccatctttgataaatttgagtgttgtctgagtggcgatggattgagggtagcaacaggttcttacaggtttgcttgcttgtcttctggtcattgctgtacttttctgtcttgtataaggaataaactaatgaccaatttattatacttaatctccggtgaaccagcaatctattccgcgtatttggagcgtctaaggaagtactgaagctgcgactttggaagctagcaaaaacccgatgaggtaaatcagaaaacagagaacattgatagttaaccttattaagtcatagaagtttgtattgatcaattgttgcaaaactttcgcatcaatggtatatattaggaggcaaatccagacacctgcaagaccatccagatctataggcagtatgacacgcgtggttagacgaggttagtggtcatagtacctgtaaaacttattcaagcttttactactctcttctggagtaaaaaacttttgttttggacgcaggatcagagagtcccggaacagaggcaaatgggaacgcctacgatttcacaacaaagttgctgcatatggcttggcacccaacagagaactcaattgcttgtgcagcagcaaacagcttgtacatgtactatgcatgagttgggaagagagagagaagacataaacatggaatcagcttgctccaatttaactttccctttcttcttttcccgggtctctctctcactctctttctctctttcttttaacaaccaaagtcatgatgtaaccagaaaaggtgtagtagtaacagagtaatgctgtgaccaagaccaaagcctgaccagtcaccgcgacgagtcaacggaagaagcagcaacagtaatctttcaggagttagtaaggtaaaaagtgttgggttgggaaagaaaacaagaagaggccttttgtttacctgaagaagggtaatgtcttaaatatccgaaccacccctcctacttaggttgtcttttttttgggttgctgcactaaggataaattttattttatttttttagtatcgattctattacctttttttttccaattaagaaacaaattatggtgtgtgggattaaatagtatgagacgattgggagggatgtgcttcaaaatttgtttattgattcttttgtcatatctt

SEQ ID NO: 7210 - DNA, 1456 bp, Arabidopsis thaliana landsberg
cactctcagcttatctatgactatgactctcatcatcaattatttcacactattaacaatcaccaaaccagtgtgaacattttaattcataattagagtaaggtcattaggctaaaaactgtttgatttggattttacaactataggataagaacttgtatcgctgtcacagatgatattttttggtcgtttaagcaaagaaatattacgaaaagagatattttttattcttacttattttgggattatcatttacccggaacgggcaaagcggtgagtcatcttaccttataaatgatcacaaacccgaggactgtgagttttcgtgtagaacaaatccttctctgagaaaaaacaacagatccgaattttatctttaatcagccggaaaaaatggagaaagcgatcgagagacaacgcgttcttcttgagcatctccgaccttcttcttcttcttcgcacaattacgaggcttctctatctgtaagcattctatcaccacacactctctctctctcgatctatcgcgatcttttggttgtcttctcttgtgtttgcagtctggggattatggatcgttgttgatctggattcattatatggaattttcgattttgattttgatgctgaattataatttgattcgaggcgtgcctgtgagctgaaaattttaagtttcagctcgattgagatcaaattcaagacttggattttgtttttgtatttcgttcactggattgagatagatatcttttttttttttgttgttgtttgatttttgttcgatttggttgaattatccgtgctctgcatgtactgatgatttcttaaaagtcaaagcttgatttcaattactacgtgtgatctctttaacgtgttctttccaaattcccaggcttctgcttgcttggctggggacagtgctgcatatcagaggacctctctctatggagatgatgttgtcattgtcgcgtaagtcccatctcttatgcttttactcttttggtatttggtttttcagcaacgtatgaagatttctcgtctctttctgatagacttacacttattgatccattgcagggcacataggactccactatgcaagtccaaacgtggcaatttcaaggatacatatcccgatgatttgctcgcacctgttttgagggtctgtcgctatcttttctattctgttgttggtttttatttcctttctacgtctatttatagatagttcttccttgacataggcattgatagagaagacgaatctaaacccaagtgaagtaggtgacattgttgtgggtactgttttggcacctggatctcagagagccagtgaatgcaggatggctgcgttctatgctggtttccctggtatgtttcttctatgtacagtacaatacaatggtgaaaagtctttgtttttatttcctgtatgctcatcctgttatgttca

SEQ ID NO: 7211 - DNA, 3329 bp, Arabidopsis thaliana landsberg
ttctgaacaatctgaacacctcttctttgatcctcgttttcagtttgaaggttgtctaaagcctttgtcgcatataatagagccacaccaccacctatttgaaatttcctccgttaaaggcacatcatgtgagctatatcagagtaaatagagagaagatgcgaataatttctattacccggtatgatgccttcttctacagctgctcttgtggcgtttaaagcatcagtgactctgtcttttctctctccaacttcagattcacttgcccctcccacctatataggaacaaggcacatatcagctacttttcgtatgcaagagtttagaaagaccgattgatgggtgattgactaaccttgaagactgcaacaccacctgatagctttgagagtctttcttgcgttttctctttatcaaaagtggatgtactcttttcattggctgatcttaactgtagagcatgagagtaaaaaggattgcttctactgtataaagaatattctagtgagcaagattcatgtcagagatattgtaagaaaataatcatatacctcttcacatctttcttcaattagctttttatcaccaccaccatgtaggataatagtgacatcacgggtaacggtaacctagtttaaagaatttgtgttagatttgaatcacacagaagcaaaaacagaaaccagttatgatttctcctgttaccttcttcgcagttccaagcaattcagggcgaattctttctagagatagcccacgctcctcagagataacctgtgcataaacaagtgagttagaaaatgaaaacgtgacacaaacataactattatgttgtttctgagaaatttctacctctgcaccagtaagaactgcaagatcatccaagcttgctttcctgttgtcaccaaaccccggagccttgatagcacataccttaagcccaccatgatgcttattgagaataagcatagctaatgcatcactctcaacatcttctgctacaataagaagtggtctactactctgcacaaccgcaaacaataagagaaagaagtgagtagttttcttgtagccaactatagaaaccgccaaaccggacttcagaacatagtattctagataatcaagggaatgctttactttcacagccgcttctaaaactttcaacaaagagttaatgtctgaaatcttcttctcatgaatgaggatgatgggattttcaagctcctgaaaaacaagcacaggtagttcaataccctttctttccttttcacacaatactaaacacgatagatttcactcacgcatttctgggtcttctcatccgtgataaaataaggagaaatgtaacctctggctagcttcattccttccactacttccagctcgttatctaaagtgttaccatcctgggtatttgaagaataacacagcgatcagacaaccatcaagtgatctattataaggcatgaaaagaaaagtaagcttacagcaacagtgataaccccttcctttccaactttctccatggctcttgcaattagttcccctatttcacgctccccatttgcagatatagtggcaacctatcaaaggaacatatgcagtagcagtaatagatcaacctttggtatagcattcacaattcctgacttatgaatatgtttctaaattcacctgtgtgatctcttctggggtgctaatcataacagctctgcttttcaaatcagagacaactgcagcaattgccatattaattccaacacgcaaatccatcacatttacacctgcagccaccgacttgcagccttcgatgagtatcgcctgagtcaaaacagtggcacaagtggtacctatataacgaaaggaaggcaagcagaaattaagactttactattatctctgcaccgtatgttttcaataaaaacttatccatgattatgaactcaaaagagaaaatattaccatctccagcaaccttgttagtggcacttgcaacctgtttgacgagttcggcaccaatgttcttagctttagcttgaaatgatatgctttttgccacggtgacaccatcctttgtgatctttggtccgccataactgctctcaattatcacatttcttccctacaccacagaattaaaaaaaaaagatattgaatttgaagactgtttcaaaaacaatccactctacattgatctaaaccttgtgagaacgaaatatatatacctttggtcccatagtgactttcacagcttctgcaacctcggatacaccctgcaacatagctgcccgagctccgatcccgaaactgatatccttggccgcatagtttctgctacttataatccgcccagaaaccttcatggtaagagagaacaccaaaagaaaatcaaaatcggaattaattagtttgatacagggtacggccaattcaagctaatcattccggaactagaagatcttctattgcatctgaaaccaataaaagcagagcaattctgcaaattaagtagcttaaggtggagattttgatgtaaaccctatttttttcattgcataaactatcaggactagtaatttgacacatttctagcaatttctctgttaccaacaagaatgcccataaacgaaatgcaatcaaactcgcaaaaagacagagagagttcacgaaactcaccagtttcctggaagtagacgagctgcaagacaatcaaccccagaaagaggaagaagaaaattaagctctgctcatcaaaaaatattgatcgagaaaaatacaagttttgaataagttcgttgaatgaaagaacgaaacgtacccaattgaagaagataactttgatagcactcgatacatttccgcttgcaaagaactagagaagtagacgcttcaagggtttagggtttttctggggtttcttaatcaaggaattaagttccaacctccaaagagtgaaacttttttcttttagaaaagctaatagtctggaactttctttgtgctctgtttcgtgcatctcccataattaggtttacagtttcatccgttatcttaggcccattatgaattttccaatggcccaaaaactctatgctaacatgattacactataaacttgcaatgagaacctgaaattctcttcaatcaacaaaaaccaaactgaatttcacttaatcaaaaaccggtttttcttcaagtaacattctttttatcagatacaataaccacatcactacagaactcgcaaacaaatcaagagttttttagtttttgtctgcatcagaatcttagtctaggaacatacaagatcactatgacacctg

SEQ ID NO: 7212 - DNA, 1174 bp, Arabidopsis thaliana landsberg
  unsure (1)..(1174): unsure at all n locations
tttgatccataagtatagccgatgatctctctgaaagctccatgagatgcatcgcgtagactgatagattttctttacggtttatgcctcgggatgcttctatgaggttgacgatcgtggggatgttcattatgctctggaaacagaacatgaggcatagcggtttgtttgaacggttcgtctcctccaccgttcggttcttataatcagctttnnnnnnnnnnnnnnnnnnnnnntacaccgctagaactagaggagtcgtcatgaatgtggtgaatatcgccattagaaccattatagcgaaaatttgatcgtttagaacctgtgacaacacatcaaaaaattaagtaaatatgcaaatattttttgtacaaaatgagttttagtttggaatttaatggacttacccctctgtctttaccaatgttgaggacgatgagctcaacaagacctttcgtgttcatcaagaaaccaagcgctaaagactggtcaagcggaactttgcagtaaagggaaactaggactgtaccgatgattttaccgaaacaagcattaaatataaccaaaaccaagagtcctcaagactgagctccttggatcgtcgcaacattggtctttaaaccacttgagacgaagtagagcggcaagaaaagacctgacacgagatcctcaactttctcaaccaaagcattcgcgaaattaccttctttagggaaaataaccccgatcacaaaagcgccaaacagcgcatgaatcccaatcaagtccgtgacgaagctagctgcaagaacaatacctaacgtgcaacacacgtaaagttcatttactggttctccttcagggcaacgtttagcaatcaacttaatccctggttgcacagcaaagatacagaacaagacaaatccgcaacccgagagaaacacccaaagagaagtaagcggagagctcccctcaccagaaagagccaccgcgagagcaaggagaatccaagcagccacgtcattgaccgcagcagccgacaaagcaatctttccgatatcagtggttagaagcttaatctcagcgagtattcgggccaagacgggaaacgctgtgatggagagagcaacacccatgaagacaaggaaaggagctttgctggctccatcagctatggaactgcggagagcacgta

SEQ ID NO: 7213 - DNA, 510 bp, Arabidopsis thaliana landsberg
actggatttctcttgcctctcctatgttttttatgctttcagtttcgctttcccttgtgaaaattgtttatcaaccctagctaaccttagatccctcttgttcattactggcggccgaaagattagcagcggtggctgacaatacggtcctgcgtttcccctcccacttcaccatctgttaataatatctcggacgattccacttctttccagcgatgcatctctcatgacaaagtctattatcatcgctaagcccctcgttactagatctgattcgcttatccgagaagaacactcacatcggacctcattaatggcaagagaactccctcttggactgtcagatgcgccatgtgcgatggagacgtcaacggcgcacgacggatctatcttctgggtggcgagcttctggttctacgatagcacttcatcggtgtaaatggcgagtgttatctcccatgctttccgattgccgagatctgcctggacaactgctgttacaagatcctt

SEQ ID NO: 7214 - DNA, 1585 bp, Arabidopsis thaliana landsberg
tgactgatgatcattctctgaagtctctataaatatgaccatgtgatcgtacgtggctcctcatgactgccccaacaagccaattactaaacttgtctttatattgcggttccaaaagatctgatgttgatgttctccaaaacagaaacacattttataagataatgtaaattaaataaagcaattgggaaatatttatatagagtgatgatgaatactgatgaatacgtgaggactagtttatacaccacaacacaaaacgcgttttgctcattctctctctctcgcacacacgtcaacaatcatatccatcgatgcatttgacttcctcgttcctccatttacatatgtagatccatttattaaaggagtactagttccaatttcaatacatttatatttaatattttattcaatacaaaagtgttgaaagggattcggataaaccaagcatttttatgtgtatagaaaaataatacttgactttgcagtttccatttccaatcttcaaagtcatatcttaccaaactcacatctctagctaatacatcgatcccctatattttgttacaagtatatatatcttacacaaagacagtgcatgtgatatagaaatcaagatgggaagccaaggcatgagttcaccgagtcccttggtggtgaagaaatcgcaagtggttatagtgaaaccctcaaaggcaacacctgatgtctctctttctctctcgacactcgacaacgatccttacctcgaaaccctcgccaaaaccatctatgtctacgctccaccatccccaaacgaccacgtccacgatccagcttccctttttcagcaagctctctctgacgcccttgtctattactaccctctcgctggaaaacttcaccggggatcccacgaccatagactagagttaaggtgcagtcccgcggaaggagtcccctttgttagggcaaccgcagactgcactctctcttccctcaactatttgaaggacatggacactgacttacaccaactcgtaccttgtgatgtagctgtgccctctggcggttacaaccctctggctttgcagatcactttgtttgcatgcggagggctcactcttgctacggccctctctcattccttgtgtgatggttttggagcgtctcagtttttcaaaaccttaactgagctcgccgcgggaaaaacacaacctagcatcatccccgtctgggacagacatcgtctcacttctaacaactttaacttaaacggtatatgttaactagtattatctaaatatattttcttttagatttagacgcattactaatcatcttgatagtttcagatcagttgacaaaaaatagattggtccatatcttttacatattgttgttttaaatttatttttatttatgatgtgatgttactaattaacattgtatatatgtaagtaggtgaattttatatactgtagttttaaatttattttatttatgatgtgatgttactaattaattaacattgtatataattgtgtaagtaggccaagtggaggggggacaagctcccaggtagttgatttggagaggcttg

SEQ ID NO: 7215 - DNA, 1464 bp, Arabidopsis thaliana landsberg
gagggtttaaagaatgaccgattgaccactcaatcatatggaaattagttgacagtaaaaaagcatgaattcattgaaattgactcagtaaaggaactcccgaggtattggcctcctctgaggaatgaatcccctgaagaaagactcctaaaaccaacattatattggacgtttacagcgagaacctatttgatatatgaaaagcattcatataaacatatagatatacaactgaactttcattggatgtgtcaagtacctgtctgcctcatctgtccacgaaaatctttgtgaaggagttgatgtggtctttgaacttgcgtactggttgataatagaagagcactggccttcatcttcagtaagatcccttatctctgaattttcttgtagattatgctcctgatgctcttctaatgaatttagaaacttctcactatttgaggcatcaatggcatcggaattcagaaccttttctccgtctactattatggatctgacaccttctcctgtagtctttacgagagttcctctttttcttttcccagaagatgaagaagagctattatctatagctaaatgtttatcttttgatttggatttcacgcgtcttccatgcttcgcatgatagacatgcataacctggagtacgcaaccaaaaactattagctacgtcaccccagtaaaacaagaggaaaaaagagaacattcaggtcagtctctgtttgtggaccagatatgagaaagctttaaaaccgaaatcaagctgaaacatcaaagaaataaagagttggcattatctctaagatcaaggacaaaaagaaaattatttggcaaagtaacacctggtctcaaatattttttcccctaattaattaggcaggtgacttagacaatatatacagcacataaaaaacatatctttacctgctctaaggtcaggttcagatccttagcaatcttctcacactctttgaatgagagcttttccttctcatcgattgcaatgcgctttaagagcttagcacgctgttccgttgtcatgacacgatctgaggcccaagagcggaaacgaaaaacctagaagaactgactgttagaaacagttttctgaatacctaacataataggcagatgaaattattgtcacagggacaaaacagtttttgacagagatataagcgtaacacatataaatagtttgactaggttataatattttagttcaactgttatctttataataagccataaaacaaaaggatcaagcttatacctcttgaacaacagatcccggaaatgctagcttagcagctctgtgatcggcagcagcatagcaatattctaaagttagccaatattcatcaacagcatctctatttgatagaataaagtcatgccgaatacgtggacgaaaatcaagagacataacattggatgtagcagcaactacacaggttcctc

SEQ ID NO: 7216 - DNA, 1804 bp, Arabidopsis thaliana landsberg
aagactctacaacgctttttgctttacacgtcatctctcggttattcatctgacacatagcgtggctccaaagtaatcatattttcaacgtattgcagagagagaggtcgaagaagataatgatcattgtatagtgtaaaggttcaaagttgattagcatatagctctgttcttgagtgatggataagaatggagaattaggtcttgtttcttaatacttctcgtcatatacgagttattgtatacaaatgcatacattgactatgttataactgtcttatagtgaaacaatgttttcagcattagtaacccttatatagtttctcctcaaatctgagctatagcattcagattatctagcacttcttgcatggttggtcgcatcttcgggtctacctctaggcattgtttaataagctcgcacataagtcttcccgcttcaagtggatagctattcttcaaatctggatcgatcatctccacaatgttgtactttttattttttatttctcgctttgctgagattgtgaggtcttttcctaaaccagttaacattttaagtagtataacaccaaagctatacacatcgcccgccatgttcgacatcccttcatttgattagtgcaatcaattaaggttagtctctttgaatttaatggtcacttttaactttaagatataaggaagaagcagaagattgttgcctgagagtatgtattcgggaggtgggtattgatatctaggtgctacatttgaaaacccgatggtgtataccaattcatcgagagaaacttttggctttccaaaataggaaactcttgcgttgaagtcctgcatatcccataaatgtcactttaaaggtaaggagcaagtattcaagaaaaaaaacaaaaaaggcaaggtgaatacaaaccgagtcgagcaggattttcgaagcagtgagatatctgcggtatagaccggcttgcttcctagagtgcaagaaggcaagacactgagccgctcctatggatatcttaagtcgtgtctcccacggcaatgactttggacgactatctatgatattatataaaccattaaagccaaaaggaagatgaattactattggatctaaggttaagatcgtaaactcgtgagagctccagaaatcaatttgagcaactctctttattccctctctatgatattaaattatctaggaatcatttagcttggtgttcttcaattagtatattttcctcacttccactaaataaagctctaatgagctatctcaatttttagatctagttttaaagctcttattaagagctcttacctttgggtcttgctcgagcaagattcttcttgctttgagtctactcacaagatataatgacgaaaaggagatgaataaacttaacttccttacctctactgatgtaacttcctaagcttccatttggaaagtattcagaaacaataaacaacatatcacgatcataacagtagccaattagcttcaccaagcttggatgagagttatgtcgtagaaactctacgtcaacctacaaaaatatcatctctaatgttaagacacactgacccatctctaggggtaggcaacatagacatttaccatccaaaaacatcaaaaaatttagaagaataaataagtaacaagaaacttaacaatattattggttttgccgaaggttctcctatagattgagatgatataattacttacaagccaatcttgaaaagcttgttcattggctaagtaaattttcttgaccgcgacggccatgccaacacctttctt

SEQ ID NO: 7217 - DNA, 1309 bp, Arabidopsis thaliana landsberg
aaggaatgtttctttggagaaaggtaatgctcccgaagcctctcccgcttcacctgcatatgaagtatcgtgtaagaactttgcaataagccccctaacactacaagacagagaaaagttcatgctacaagactacaaattcataaaattatataaactattattctttgatcattattagcacaagatatgaatatgaaccctacgaaaaaaaaagatatgaatatgaatatgaatatttgtgtatattaaatcaaaattggctacgacaaaaaaaaaaattcaaaattggctatgggaaaaagctaattatgtaaggttgttcacaaaagggctctttaaacacagacgattcttgatccttatacaagtcttatgttcaatcttgcaagatcaatttaaactacaaacttgaatattgtgctccacgtcataggtttaaaactataactataaactacaaaagttggtggttcccttgttgacattttccaacgcgttgacattttaacacattgacttgagacgtccatatactcaatggcttactccagaaccttgaagcccggtggagtagatctagataagtaaggtgaatcatcttcttcctcaaactctgtttaactgtcaagaaagcggatcttataggcatgggaaactgttttctaaccgaacaacttgcaacaattccaggtatatatgaatctgtgtgaggagacacatcaatcccaagacgttatctccatctaaggaaggtgttggcatggccatcgccgttaagagattttacttaacctatgaagaagccttgcaaaagtgatttgtaagaaattaacctctacgagagagactgatcactcatatatgtatgcttaacacggcagccgaggtttgtaggttgacctagagtttctacgacataacctgcatccaagcttggtcaagctcattggttacggttcggatgataattgttgttcattgtttctgaatactttccaaacggaagcttagagcgttacatttataggagtaagcaagctagaaaattgtattgagcgcatttcttagaatttactacgaacctcctgaatacatattctcaggtaagtcctctctcaagctacagaatgaccattaaaattcatacactaacctaaaactgattgcacggtaatacgcatatacagggagatcacacatggcgggcgatgtatacagcttcggtgttatactatttgagatcttaactggtttgggaaacccgtgcatcatcttagcagaggaagcaacagagaatagaaaagaa

SEQ ID NO: 7218 - DNA, 696 bp, Arabidopsis thaliana landsberg
ggctctcaggacctgcgaagagattactacggctgcccacagccaacccgaaataacatccaccacctcctatcatgaagagagccaatctctcgaaaccagaagcaagaacttcataacccggcaagccaaaccacaagaagaaacttgaaaacgcttccgaatgcgacgacgacgactgaggcgaccaattgcgtctagatagaagccttcaaaaagctaacagaaaagatctgaagcaagtacaaggagtgaagcctaacctctcgagaaccttcatcgagaacaagcacgacgaaagaaggaggaagctatcaaacacagaaaccaacaccaaggaggagaaccaactgccaacaaagaagactaccacaacagaaacagaacgaaacctccggaaagaaaagagatgcaattcttctgtagaaactatatacgtcattctttttcattcttttattcttacgtggataactaaaaatctaaaatccgtatgggtaataataataatagtctacttgtaatgtggacgcaataaaaccacaagtactaaatggtctgaaaatcgaaaagataaaaaagctataccaatctaccactaccgtacgaactaacatatccatcaatctaatagtatatcaaaattcttggtttggagtacgaatgaatatctgaatgccaacaaatcaaattaaa

SEQ ID NO: 7219 - DNA, 2580 bp, Arabidopsis thaliana landsberg
tactgtgtgtgtgtccacagcagataaataacctcttctttcatgttctcgaccacgtcagattttttagcagcaaagcacacaaatccccaagaagcttcgttttggtatgttaaagtaaaatcgaataaattttgcacacaaatctcaatttttaattgtctttccctcttctcgtgaaattttccgacaaaatatcagtttcttcttgccgtgagttttggttggtctgaccaagagtccttttatttggtcaatacgtttcgaaatttgataatcaaactctttcttcctcttcttcttcttccttatccgtagactctagggtttcaatacgattcgagtgtgtctgtttgctctctagtcaaaaatttcactctggttagaaactttcccttttggattgtgaaactgctattttaaatcactgcttattgattcgtgttccggagtgatcttggtgaatattcttaatttgtttcgttgttttgtggttttagatatcaaacgatctggtttgtcggatttgatattggagcaatggctttggtgagtccaattccagcaatgggtgaaagagctggatccatgagatttcacggaattggtagcccaggatcaaggtctagtaggagcgggattatggacgaacctgtctcgcggctgattgacgagaagatcttcgttgcagtggataaacacgtggccaagagcaaatctacactcatttgggctttgcaaaacactggaggcaagaagatttgccttattcatgttcatcagccctcccaaatgatcccacttagtatgttcccttacaccttgtctctgtgctttttttccacttagtcttgtttgtggtcactgatcttgttttttcacattgattcatcctagtgggcgccaaatttccagttggtgctgtgaaggaggaagaagtcagggttttcagggaaaaggaaagggagaaagtacatatgatcctagacgactaccttcgtatatgccagcagagaggggtatgcctccatctattttccttttctttagtgttgatgttatgcccttaatagggaacttgttttacttcattggctagcactacgattatagtgtccttatgatagatagtgtatttatgattgtaggtcagggcagaaaagatgtttattgaaatggaatccatcgagaatggaattgtgcagctcatctcggagctgggaatcaggaaacttgtcatgggagcagcagcagatagacactattcaaggtatgcttatggcgagtcacgaagcattttttgggatctctacttattcatactgaatcaactcctgtagatctgtgtgcttcttactcttcaatatccttatgttttgcttcctctatcaatactttggctttcaggagaatgacggatctgaagtccaggaaagccatcttcgtacgccgagaagcacctactctttgtcaaatatggtttacttgcaaaggatacttgatacatacaaggtttggccaattcttcttctcatcacaaccgaatccttggatttcaaaatgacttgtacgaatcagccatgcataattattactctagtagtctttaagcttcccgagatctgcattggcattgaaaatgacgcatctgtggctgcttattagtaataaatattgtactatcattgcagggaagctactatggacgacactgaatcagaatatgcatctccgcgtccttccataagtgcaagtgatctacttcaaactttctctacaccggagtctgaacatcagcatatatctcgagtacagagcaccgattcagttcaacaattagtaagcaatggaagctcaactgaacaaagcgggagggtgtcggatgggtctttaaatactgatgaggaggagagagaatctgatggcagtgaagtaacgggaagtgcaacagttatgagttctggccattcatctccctccagttttccggtatgccatgttgttcctaatggaaaagcaatgcattttgattttcatataacattgtatctcagctgtccaggaaatttgtccatcattgcaggatggggtggatgattcttttaacgttaaaatccgaaaagccacgtcagaggctcacagttcaaaacaagaagcttttgcagagactcttaggcgtcagaaagccgaaaaaaacgcacttgatgcaatcagaagggtgagtttccttacaaaaataatttagttggcactgttaaaacttttttggaaatgattgctagatgttctagctggagatatatactatactggaaccgctagtgtatcacttggagagatccctaggcttaatagtggtgcttctagttacaccaataacagctaaaatattatagtatactgatattataggtaattattataggctaaacaatcagaaagtgcctattctgaggaattgaagcgaaggaaagatacggagatagcactagcgaaagagaaagagagatttataacaataaaaaacgagcaagaggtgatcatggaagaacttcaagtgcaatggctcataagcgatgc

SEQ ID NO: 7220 - DNA, 1683 bp, Arabidopsis thaliana landsberg
tgaaagctgactggcattcatgtcttgacagtaaagttgggttcaaggtatgtaactggatgtttcactttgtggatgtctaatctcttaaccatttactcgttctatagactgggttgttggtgcacattttggaaatcaatgtttatttctgaatattgctattcattctccgcagggttttgctatacctaaagaggcacaagaaaaagtggtaaatttttcgttcgatggacaaccagcagagcttaaacatggaagtgtggtgattgctgcaatcacaagctgtactaatacatcaaatcccagcgtcatgcttggtgctggtcttgttgcaaagaaggcttgtgaccttgggctacaggttggtttcacgagagcaaactagaaatctatctgatgcctcgacattttctgatccctttttcaaaaacttgcctctgtaggttaagccttggataaagacaagtcttgctccaggctcaggagttgttacaaaatacttattaaagaggtatgtcgtatttttatctagttcttcgttgttaaaggctaattctttcttatgtgatggtaaatttaagtgtaacatcttactccatgcagtggattgcaagaatatctgaatgaacagggtttcaatattgtcggctacgggtgcactacatgcatcgggaattctggggaaattaatgaatcagtgggagctgctattaccgaaaatggtattattgagattcccaactaaacttactttggactttccatcctttatattactattatatataagtaagtagctgatttgttttcaatatttgtgttgcttggttttagacattgtggcggctgctgtgctatccggtaacaggaactttgaggggcgtgttcatccactaacaagagccaattaccttgcatctcctccgttggtggttgcctatgctcttgctggcacggtaataaatcttgagaacttgtcaaagttcaacttacattttgtatgagataatgacacatgactgattatcacattggtaattttggcgttcttctttcttattttccaggttaacattgactttgaaacggagcctattggcaaaggaaagaatggcaaggacgtcttcttaagagatatctggccaaccacggaagaaattgctgaggtatatacgacttaaccagagaacaataacatcttttttatacacaaatattaaactaatcttttgacatatggatcaggttgttcaatccagtgttttgcctgacatgttccgagcaacgtacgagtcaatcaccaagggtaaccccatgtggaataagctgtctgttcctgagaataccctctactcatgggatcccaactcaacttacattcacgagcctccatacttcaaggacatgaccatggatcctcctggtccacacaatgtgaaggatgcttactgtttactcaattttggggacagtatcaccactgatcacatctcaccagctggaaacatccaaaaggacagtcctgctgcaaagtttctcatggagcgtggcgttgaccgtaaggacttcaactcatatggaagtcgccgtgggaatgatgaaataatggccagaggtacttttgctaatatccgtatcgttaacaagctcatgaatggtgaaagttggccctaagactgt

SEQ ID NO: 7221 - DNA, 1058 bp, Arabidopsis thaliana landsberg
atgaatggtgaagttggccctaagactgttcacattccatctggagagaagctctcagtctttgacgctgccatggtttgtatttatctaattaaaatttgtattactgactgtatgttgatcatgtcgaatgtctccttatcataatgtcaaatgtatcagaggtacaagtcatctggtgaagacacaattattctggctggagctgagtatggaagtggtagctcacgtgattgggctgccaagggacccatgctacaggtttagaaccgcttctctagtttctttccgcataaaccaatcttactgttttattctgaaacaacaagtttgggattgtcagggtgttaaagcggtgattgcaaagagttttgagaggattcaccgaagcaacttggtgggaatgggaatcatcccattgtgctttaagtccggtgaagacgcagatactcttggattgactggtcacgaacgctacacgatccatctcccaaccgatatctcagagataagacctggccaagatgttaccgtcactaccgacaacggaaaatctttcacttgcacagtccgcttcgacacagaggtaactaaatactccaatctttagtgaaaaaaagcttttcaatgtgaaggaactaataatggtaaaataaatgtgcaggtggaattggcatactttaaccatggaggcatacttccatatgttatcagaaacttgagcaagcaatagtgaaggaagcaatacacaagttatggagcaaaataaaagagtgtttgtttctgttttaaaatgtcttttttaaaaggcagataagtctgtctaggattaggttaaaaggtgagtgatctcatgcaatatatgagtttcagtgggttattcttacacgcttaggctcccatgtttcgcaacttgcaagagttgaatattattgtttttgaaaaggaataagagagccttcttgcatattcccattactgactcccaaagacctcgcaatctgttgcatttcacaagcgtattcagcagcatctataccaattctcagatgagttcg

SEQ ID NO: 7222 - DNA, 1737 bp, Arabidopsis thaliana landsberg
tgtaaccaactatggagttgatttttcatagatgtgtggttgacaaaaaaataaaagtaaatagactaccaattaatgagtaatttttaattaatgtgtagttgaaaaagaacgtgttgtgtgcttcgaaaaaaaagagttaatgtcttattattagcttaaaataattaatgatgacatgaaagaaaagttggatagttctacttttaagactaaaaataataaataccataagttaaatttggtaaaaaaatccgtcaaaaatgtatatttatgaacagcctcacataaatccctcaattcagactttctcttttttctaaaaggtagcaattaataagatttaattttacaactttgcaacgaagctcgaaactctctctcttcctctatatatagagtcatactttacctagaaaatatatgcaccaaacaactatggaaaaacatgatctaactttgatttccaaaaaacggaggatagattttgcgacaatcggagatatcccaaaccttaaaggcgagggtgtttctatggtcgctgaatctgcctctgcgtcaaatatttttgcggacagtctagtctatagattgttctttaagggtttggtgagtgatgaaacaactaccgacatggaagagattgtgaaggctggatttgggatagcaatttgcgtcgaggcaaatactttgttgtataatatgaagaaatcactgaacggcgatgatgtgattaatcccgaagaagtagagattaaagcactgatctgtgtgttaaatgtctcaattcaaatggagcttagaaatgtcatgatttgctgtggtgactatcaaatattccaaatcgtaagtgttattttttttctttgttattttttttttttgtcagcaactgatttactttctttgtatttgagtagtacaagttgacatagtaatataacgaggttgtgcaaaataaaaataacgataacttttacttagataacttaaatgatatttttatcctcgtatttacaatctcattggatggttaaattcatttcttatcttattaaaaaatttacaaaaaaatccttaattcttataaagtagcgttactttttcttagatcatacaatagtatactttttattttattgaaatatatatatatatatatatatatatatatatattttatattatttgcagtgtcacatcgttaccattatttttactttttgtaattgcattttggaaaattggaagttttggtcccaaacaattgattgtaaatgacactagaatatatatgccctctcgctttagatgggttattaactaatttgttggcttgcatctgattttttcattccagcttactggtagagggaagcctcagcagaacattgtccatctggtggaacaagtccagcaccttagagggaagctatcttctactgaagttgttttggttccgcgagctgatgttattatacttgcaatagaggcaataggaggagaaacttgttgcatttgtcgtgaaaacaccgatgctgatcgcatgttctttacggacaattgctttcaccgtcaatgcttttcttgcgtgaataggcatgtgcaacgtatgctgctttgcggaatttcacccacatgccttcattttccttgcaactctgagctcacgtttgaaagctgtagcaagggtttgacaccaaatctgattgagttctggaaacgaaagattgaaga

SEQ ID NO: 7223 - DNA, 952 bp, Arabidopsis thaliana landsberg
gtgtttgcatccttgaataaactcagtcagaatccggcataaccaagagagcttgtcaagagactgaagggtacaccctgatgtataatgaggactagctatgttgtttgggttagtacagcagttgacaaaccagcgaggattgttctcgtcatcggaagtgagttgggccttttggctgaggagtcaaggcttcttgtcggatatgaagggttcataatttcatgagtagtagaaagaataaaaatattcgaatttttgtcttgaagagaaaaaaaacaaggtaaaaacatataagagaaagaagaataaatatataccttatacaaacttgtggctgagaatgaaaccgcctctagagtcgtgtgagaaagtggaagagggaattgatgtcatgcgtgtaaatatgggtagtccaaaaataaagggaattgatggctaaaaaggcgggaaattgaagatcgtgttgtgcaatattcgtcattaaggaaataaagtcctcaagctggcgtgtcagctcagaagacttggggagctaattgttagtgtcggatcgtgaacccaagtttgaaccaaaccgaagattgccacgtaagcataaggtgaacgagagggaaagtcaactgagatttaatgccgaaccgaagtgatattctcaatcccacgaagtgaagacttcaaggaaagaggcagcagtttgagaatgggtaatgggccgaatgtcgagaagtctataaagaggctacaagaattcaaatagagacgttaagacattaatttagaaatcgaatcggacatattaaagagaattcatgatggttaatggtcaataattgtaaatcatattgtataaatatagagcccccaagtacattgggcccatatgcatttttcttgataacaaaatctaaaactatcactattcttattcgttcttttcaaacattcttcg

SEQ ID NO: 7224 - DNA, 339 bp, Arabidopsis thaliana landsberg
cttttagaatagcatcaaagtaagaattgctaacaaaatatactaagcgtcaattgacttagcaacagaatctcaaagttcacctgaaattgacttagcaacagaaaatgattaatagtcgtaagataccaagaaaggaaagaaaataagagagatacttcacctgaatttgacttagcaacagaatctcaaagttcttagttacaaactgagaaaaaaaagatgttaatcgtgaagttactgtttttttcttttggtgtctagttttttgttgtgctatatttagtttctagtgttatgttgtgtatgagtgcgtttagagttttggtgcatgtaatg

SEQ ID NO: 7225 - DNA, 1775 bp, Arabidopsis thaliana landsberg
aaaaataaggaacaaaaaggggtttgtgaacatatgcaagggttttcagaacaacaaagtacaaagctgactgagccgaaagagttatcatctccagaagcttgtaaagcagtaacaacatgcacatgtttctgtatcagctcattgactttctgatataatagctttatctcaggaggcgtactagctccatcctgtgggaaggcaatgaagaccatcttcaacaaagagcatagcgatttaccagcgtccaacatcttgtgtttgaaagatagctcaaggaactggtgaagaacagaacagtcagcaaagaatagaaatattttcatatattagattaaatctggagcaattatacctgtgagatctggctgatgttgttcttaatgaaaagatgtggctgcttctccagaaccttgttcatgacatccaagccctgagcaagtgcggtggacggatctgattgagacggtggcatgctgctaagcagcttttctaaatagttaaacttgacgttcgcatttggccaaacttccaaagcttgtgaaagaaaatctaaagcttgtttgtacatagtgttggcttccctgtccttaggctcaattaccacagctacctgttcaagaaagagaaaggaaacttaaaacgacagtcataaagagaataatatcacgatcaaccaacataattcgaaactagaggtggtcaataaggtgtagaacttaaccagatccaaaagaaaacctacaatccgcataatctcattatagattttcatacagaatactatactgctttaagactgctaccgccaaacatcatttctttagaatgcaaattactcagagaggacgggcctctgtaattttgtaactcccccgcccaatagatcaaaaccagcaagtattaacatgccccaaggtagaaggtgggaggtgtaaagccttactcttataagaaagttgatgattagttcttccattgcagcatttggcttgaattcctcatcaggctgggtagcagatccaggagtttctacattggggattgacgatgcaccaccaggtgacataacacacaatgatgggagaccaggttcaattttaactcgtttacttgggtcttcagatatggaagatccagcggttgagagcttaggatccacaccggatgaaggatgtaacccatcactgacctcactggttgcgtcgccatcagtaaccattttactttcattctgtctttgtctctcccagctgacaactaatccagcaagttcaattgcaagccgcctattttctgctgtagtgttatatggcaaacctagacgacttagagaattcaccatctgaggaacaaactgtgctctacagctgtaaaaaagatctgagtgccggacaatgagttggaagatgtggatcaaatttggaattgagtgaccctcctccaccaaaatttttttggtgtatctaatccaaatcggcattcttgaatctccaagtggaagccttttaggtaaagctggcattagaatatccagggcttgcttaactagcatcttattctctggctggcatgtcctaagaagcgcaacaaaaacctacattcagtcgacaaaaaacatttgttaacactggattagatggaggagtattttaggcacatgcttgctttcaggttagaaatgacaatctgcaagctcgataatggaaaaaagaggtaaagatgacatattctcttataagaagttccaattttcactctacaatagaaac

SEQ ID NO: 7226 - DNA, 717 bp, Arabidopsis thaliana landsberg
tatattcatcacaacgttcggttcaataatcaaagaaacaataaaaacataaaataaatctcgatctaaaattctcaatatcctgaagggaaccctccttttcgaggatcactaactgccacaagctcacttcttccaccggagttctcaccggattcttgaactatgaactgagcaatcgtccctccggcaataggagataggacatgacctttcttctccaacacaactcttgttgctttaggaatctcgaaatgatcattgaatactgttgtccagttctcgtacgaagctctgtttggtatcagctgaaaatgacattaccaatcgcaaattttagttacgaaacaaaaaggtaagcttttttattgtgtacaagtaataataacgtaacaaacctgatggtagattcttggagctaagacggaagaaagaggatccatcttgaggaaaaaatgattcaagtaaacttccgttgtcccggcaataatgttggctcctccgctcgcacccacagcggctttcactttaccgtcctaagtaaacaaaagaggagataactatcttttatatccctaattaagagtttcgtgtatcacaagtaatagggtttttccccttaccttgagtacaatggtgggtgacatagaggacaaaggtcgttttccaggacggatgaagttagctggtgctggtggtggaacatctaagttaccg

SEQ ID NO: 7227 - DNA, 491 bp, Arabidopsis thaliana landsberg
caccagattcttgaactatgaactgaacaatcgttcctccgggaaaaggcgttaggacatgacctttcttctccaacacaactcttgtctctttaggaatctcgaaatgatcactgaacactgtcgtccagttttcatacaaaactatgtttggtatcagctgaaaatgaaaataattacaagaagcatatttaaggtatgagtagagaacaagaaagtttctattgggcagaaggaaaaaaaaaaaacgaaaaacctgatggtagattcttggagccaaaacggaagaaagaggatccatcttgaggaaaaaataattcagaaaaacttctgttgtcccagcgatgatgtacagtcctccgctcgcacccacggaggctttcactttaccatcctgcataaaaaaaaaaatcttttggagtaaattacgagtttcgtggatcaccagtaataaaaaaagtttccccttacgttgagtacaatggtggggt

SEQ ID NO: 7228 - DNA, 1576 bp, Arabidopsis thaliana landsberg
aagtcctaacttctcctgtcatggacaccttacctcatcatctcctcgacgagtgtctattcagaatagaccacagatctctggccatgatacaatgcacaaatagatctcttcaatctcatatatccaaaaaccctaactttgcatccgaatacttttctcggatcagatccagtttgctgtacatagcaacccatggctgccctttgatctgctaccacctctacggtgattctaggtcaccgcgacagtagaaaccttgacgcagtgtcacattttaggctattgctctggccttcttctactcttccttaataaaaatctctgcgtcgtaaatcctctcacaaagaagtttcaatttttgaatcactctaggtcaaagtttttccctacgggttttacacttcgaagaggtcgtcaacaagtcatcgggttcgccgttgatcagactgatcgaaccaccccgagtttcaaaatcgtcaacataaaagaggtgagaaatgccactgaaacaacatatgagtttgagattaacgcaggagattcatggaaactattgaaaacgacgttaacttgctgtacaagtaatcttgatgaccgtatgaaaaaacctgtttatatgaagggagctcttcactggctaagaaatgacggatctatcgtagctttcaacctaaaaacagagaaagcacgactaattccgattagattccccaaagaactttgtttaaaaacgttgttcacagccgtagaaaataatttaaccttgatatcggcgacggaagaagtcatttacgtttatgccttccataacatttttagtgatcccaagtgggtcctcgtgaagcaaattcggaacggggtctgggacgagaagaggctatatagttggtacgtggaggcttacgatggaaagtctttagtgttaagggagacaatattgaagaaggactattataacaagcatctgaagcaagtactttatgggtacgacgtgagagctaataagtgggaagtcataggttcgattccagagtggtccccttcaggtctagacttttatcagtttacaccttcgccttctttggtgataggacttgatgacaaggagagggaagagatattggcttgtgatgataaacgtataccctctctaaacgccattatgagactgatacatggaatctcatgagaaagaaatgaaaaagattggttcaagaagatgaagctttcgtccaaaatcgtgcaaaacaatgaagagtgggagtagacaaattcgtatcacatgtggaagtacattattcagtgtttaacattttaagtttttagcatagtcctctggctggatcagtattaatatatgacataaatatactattgggaacatgtatcatttagttaatgaacaagtctcgtcactgattccatcgtgaaacatctatgtttttgcactttgttaagtttttagcataatcttctaactcgatcagtattcatatataacttcctgcataaacgcctcatactagttgaagttagagtgacttatatattacaaactcttttctaaatttcg

SEQ ID NO: 7229 - DNA, 1183 bp, Arabidopsis thaliana landsberg
ctagtcttacagtttatcatgttctcttagtttagtttagtaggacttaaggtatttgcttcacttaaaaaaaaattggttcttgatttatgttaatagctatgacgaagttgacgcctgcaaaaagctactagcaaaagtggacctcaaaggttttcaggtgcagttttataatcttacctaacgctttctagtgtgttgcttgttttgcaattactaaaacacaaataaagggcactggaagttccatctttgaatatgttaattggttaacactgtgcaagatatattctagctttcttttctgctaatatatcattctatataagacaatctttactaacaattttcctgcaccatagattgggaagacaaaggtgtttcttagggcaggtcaaatggcagaaatggatgctcaccgagccgaagttcttggtcattcagcacggattatacagagaaatgtccttacttatcaatctcgcaagaagtttttgttgttgcaggccgcttcaacagaaattcaagccttgtgtagaggtaatacatgttatatgcgtttgttggattcaatgtttgtttatcaggctgtctgtcttattccctccccaaactaaatttaggacaagttgcacgtgtttggtttgagaccatgcgaagagaagcggcttctctgaggattcagaagcaggcacggacttatatttgccagaatgcctataaaaccctgtgctcgtctgcttgttcaattcagacagggatgcgagcaaaagctgctcgaattgaacttcagttaagaaagaagagaagagcgacaatcattattcaagtaagtttaagctcgcatattgatgaaattgtttctcattttgcctattttttacctatcacatagatctacttgtttgagtattgatgacatgaaacttactggctacgcagagtcaaatcagaagatgtttgtgtcatcagcgttatgtgagaacgaagaaagcagcaattactactcaatgtggctggagagtgaaagttgcacgccgagaattgcgaaatcttaaaatggtaatcctcgtttactaacatatcaagttcttagttacttatactaaatctgttctttacaaaactgacctttcatgagaaatacagaacgtgaagttgaaaactcatgtctcatattttt

SEQ ID NO: 7230 - DNA, 1680 bp, Arabidopsis thaliana landsberg
gttaaagtttcttcgtttgtaactaatactatatgaaaaaaggataaaggaaaaagaaaactctatcattccaggtagataagtgcatgatagaatgtgtgaacaatgctcaaatgctatttttgtaaattcagtattcgtttggctagcccatttattattctataaccatatttatgtctttcatagctatatcatatagaacccacacaatttaatggcctacgtgtcagatctcatctcatgtatactaagttactaacctagttaacaattgcatatattcaacaaaatccaacatgacaaaacataccattttaatattttagacttttttcactaagaaaccgatagatgttagagaaacaaacaaaaatacaaaatagtaaatgatatgggtatcttcgtagtataaacgataggccaacttttacgatactatctcatgtttgataataaaatcatacacaactaaaagatttttaaaaaacgaagagttttcatattcatattggattggattcatatatgtttttcgttagtattgatatgtatacttttataagaaaatacgacacaacaaaaatcatcactattatattcttcttgcaaatatgcagtcaaaacctataatacaatcaaacaaataaggtaaaaaaaatttacacacaaaagctcgaatatttcatcaacgtttgtgcgcaagaatggtatgacaaaacaaaaaccacaacgattcatgttaattgacgaatttagccgtataaatttaagaacctttaattaatttatttaattagttgtgatctccactccttgattgcagaaagaagagaatgattaggaagaagagaatcactaggaaagggcaaatccgtcattggagatttatgattcttctgaagccattccttaatcgctctcttctcatacgtatatccatccgaagcaacacatggattctccatcacatcctaatttcatcaatgaccccataaaccaaatcaaaacacataacgtatcaaaaatctgacataaaatgtaagattttcgtatcattcattacctttgttattggacagtagaaatgggtcggagcgttatggtgatgatcaattaggttatcagcaaacatgttccttgcgatagacgcaacttcctttaaccgttcaagaaccggcaaaatctctttccctaaatcaggacgatcacgctttctcatctctgcacatctaagccctatcataaccatctctttagcttccttaaccggccaatctccagcagttttatccaagatctctgtaaatttcccggtttgatctctcaacgctttctctatcgaatgagccaaacccatcgcggatctagctgtgactagctgaagaagtatgattccaaacgcgtagatatcagattcgggagttaccactccggttctttggtattcaggatctatgtagaagaatgttccaactggaccggtttcgttgaaaaccgttgaggcatgagaaggatcaagattaaccattttggaaaggcctacgtctccgattttgctcacattgttccggtctaggaggatattggctggtttaagatcgcggtgaacgattggtcttggttcgtttgtgtggagaaagtagagtgctgaagcgatctcccaagcgattcggaacc

SEQ ID NO: 7231 - DNA, 1298 bp, Arabidopsis thaliana landsberg
ttaatcagttaatagaacgtctctttcagttaaggactaaaagatgtttaattctaatccgacaattaatctgatgagctacaatgacccgtatatctatcccgtatcaacacctactctaattgaacattattttactggtaaatgacgttttattctgataaaatggacgaaaaacagatcctaggtttgaaaaaatagtcacaagtaattggttaaaaacgtaagatttgcgaagacaaacaaatttcttgcttaattaaatacctccttttatcggaaaataaaaaaagttcaaacaaaacaaagaagcaaagagacataaaactagagtaacgatgacataaatgagacgcacactgattcaagtgtctcgtatatgtttttgccctagacacgtggcgttctcctactcccaaatgttaatctcttcggccaccggagagacacagaaagaatatagaaaagagagagagactgaagagagatagaggaaaaagagagagaaatggatcaagatcatgagttatggcggacgctaagatgcgccggtaaagcgcaagataagacctctgttgatactctcatgcttaagtaccgtccgatcgctccaaagccgacgactactggtcaaccattggtcggagatacaagtagcacgagaaggacgaagagaaagtacgttagggtttcaaagaataataaagccacgtgtcgatcaaagacgaacggcttcagatctagctcaacagatccggagaatggtcgggaagatatcgtcacgctacagctcttaccggagagatctacgccgttgagtttagatcataataatctcgatccaacggtggaaacgataaacggagatgaaacttgtaataccgacacgtggctcaagtttaacggcggtgatgacgcgttgcaacaagttccggtagagacgtgggtgacggtggagtccgttaacggtggctcggtttcccatgcggtagggttaacggacgaagagctcacatatgctttagataaagacacgtgtcctggtttcatatcggatggttcgaaccgtgtggtgatggttaacgaggcttaccggaggatagtaaccggagacggcggattcggaagagaggtaatagtgtggttggtggttgaccaaacggctacgttttgtgactaccgaacttttacgtgtaaggtgagaatggaatacacgtggcgagaagttaagtacactcaaacgttcccgtgtgatgtgtgcaagatgaaatttggagaatttgcatggaggttggata

SEQ ID NO: 7232 - DNA, 943 bp, Arabidopsis thaliana landsberg
tattcaatttcacacttaacttcaactgactctatgttgaattggattctactgtgtagtgttaagataaaaaagagtttgaattttgtttgttgtgtttgataaagacactcttttgatgcttcacttgaatgcaaaacacttcctttgtgttacttatatatgataagcctaaggcctttcattgatctctcttctattggtgttttctgggtttgatgcagacagtggttcctctcaatacatgggttttaatatccaacttcaaagtagcctacaatatccttcgtcgccctgatggaacctttaaccgacacttagctgagtatctagaccgtaaagtcactgcaaacgccaatccggttgatggggttttctcgttcgatgtcttgattgatcgcaggatcaatcttctaagcagagtctatagaccagcttatgcagatcaagagcaacctcctagtattttagatctcgagaagcctgttgatggcgacattgtccctgttatattgttcttccatggaggtagctttgctcattcttctgcaaacagtgccatctacgatactctttgtggcaggcttgttggtatgtgcaagagtgttgatggctctgtgaattatcggcgtgcaccacagaatccataccctagggcttatgatgatggttggattgctcttaattgggacaactcgagatctcggcttaaatccaagaaagactcaaaggtgcatattatcttggctggtgatcactctggaggtcacatcgtgcataatgtgactttaagagcaggcgaatcgggaatcgatgttttggggaacattctgctgaatcctatgtctggagggactgagagaacggagtgtgagacaagtttggatgggaaatactgtgtgacggtgagagaccgcgattggtactggaaagcgtgtctacc

SEQ ID NO: 7233 - DNA, 1311 bp, Arabidopsis thaliana landsberg
cttccattgtatttgtcccatataataaccatggtctctcaaagaaggaagacaggttatatgtatgatccgcgataactaaccggatatcgctttgtagccttccttttccagtagtttggccaaggagttgtctccggttttaatgattctcccattctcctgaaacccaaggaaacatacatgagcttaccaaaatatatatgatcattgtgtagccagtaaagaaggctggtttggcaacaatgctcaccatgatatgtatgagagttggtttgatgtagtcaagtaggcgttggtagtgcgttatcatcagaacagagttttttggtgtcaaaagcccgttcaccgcctttgccacatcttgaagagcatcaacatccaaccctgaatcaatctcgtccagtatagccaactcagctccaaggacctgcaaggacaggaaaacgttgcattagcgtacttccatgacctctttccatatattgcttacaaagaataggagactaatagtgttctcatgttatcgataaaccagaaatgaccactccttgggaggcagatatttcaagatcaggaaaatataaagagatatgaagacatataacatgccatgtctttttagctaaaactgcagtcaaatacttgtaatagaatactaactgccatgcaataaccgcgtctacttatggtaaaacctgtaactgcttaagctaatctacccagatatcctgaaattcctaactattagccttgtggttttgcacactgtagcatggaacaagcttagtaatccactaccttctctaatcacatttgtttcttatcatatgcagtccttatggatactgagaaacaagggaagcagaaccattaccgctaactgtagaatctcattgcgtttcctttcaccaccactaaatccttcattgacatttctgttgagaaaatcggtcttcatattcacaacttcgagttttgataccaagtggctgtagaactgcatgagccatgtgatatcagtaagacataatacatagacagttctacaattgggaccatttagcaaacaacaacaagtaagaaacagtgcaaaccaaatccaagtcatttaattcgataaggcacctggattggatcaagctctggctgaccaagctttcttttccgagcattgaatgccatattcaagaaatccatattgctaacaccagggatctcaactggggactggaaactcataaagagaccggcaagagatctatcctctggttccatattaagtagattctgccctttaaacacaatact

SEQ ID NO: 7234 - DNA, 4700 bp, Arabidopsis thaliana landsberg
  unsure (1)..(4700): unsure at all n locations
agggacacagctataggagtcaaaccatatcgccaaagtcatcctcttcaggtttatatctgtttctgctcagatccatctctaaatccatcccagcctgataaatgataatacatttcaagtcaaagcttcttgagagcacagaataatctaatcttaaaaaacaagaactaaaaagaactatcatctatgaaatcgatgtaaacaagtttcatctgaggcggaggagcagaaagcaaacaaaaactttaaagaacgagaaactgcaacatcacctagtttccggtataaaaaatgaccaattacacttacatagataatagtttcacacctctttttgctgtctcaagcgtttcaaataagtagactgttttttgcgaagctccatagaaagaagttggaggtccatggcaagagaccgctgttattaaacacacaggataaatcttagattagcaatggcaaatgtagcaaaaagaaaggaaatgtgttcaagagatgtaactaatgagcagcttccatcaagtcaaaactacctgcacatttttcctaacatttgaatcttcagaaggccctgaagcagaaagcctctgaagttgcttctcagacttcttcaatagaaaagtatctcctgtgtcaaagactcaatattatgttgatcttctttaccatccccaaacgatggcattaacgccttagcatgagcctttcccaactccgccattttagtccttgcacgctgtatattcacagatatctcctcagagacatcaacccaagctggtggtaatcccactgtaatcgcacctttactaaaacatgaccaaaaaaatatctcagtaactactaactctcagcttaacatagctcacagacatttacttcaactacaagatcaatgatgtattatcattctcattgctaagctaatcatttccagttaaccctaattgatcaaattgttcaccattttcactgataaagagagagaagagtacctagaagttccaggatcttcggtactaataggagcgtaagagcgattcggattcaataacgaagtactcgccatctcgatcaccggaccaacgccgccggatcgtgttcccgtcaatgaagatgacgacaatggagctctgacgcttctcagagagtttctgtacttcctaaacagcaacgtacgattcctcgtcgccatgatcgtcaaaatttgaaatccctagaatctcaattttcacatccaaattcgaaatcagctccgatctgaacacaatcgcggcttcatcatcgaccgagaataaaacaaaacacaaatttatggcgccaaaattgggactccgacaaggaagtgctcggagagcggcgagatcaaaactttttccgatgaggaaagtaaactctcagatttgcaaattgaggttttcacttttcactatttccccaaaattaaaaaactttggaaacagtaaaaaaaaaacagttacgcggctaagttcttctgtttcaccaacatagcaaaggttaaaccaataaaagttcgacacgtgagtgtactataacagcatgacgttttgatattccaaaagggaaaaacacggcgggtaaaaggtttaaacggcatgcattcgtgcgggctgttgaaagcgagacaaatcaatacatgtaataaaactcatctctcgtatgtctttcactctctctctctatatccaaagaattaaaaaccataaaaaaagaaagataaaaagacgaattccagaaaaaaaaagacgcagaatcgtcgttgtcgtcgtcgtctttgcatttcgtcggaatcttttgattcttgaatcggaatatctctgtttttgttttatccggactcaagatcaattctgattcttggaatttatttgattttttgttgttgttgttgaaaaagtggattctttgatttcgatttgtaataatcttcgtagaaaaaatggattctgattcttggagtgatcgtctcgcatcggcttcaagaagatatcagctcgatttcttgtctcgatctggtgagtttgataaaaaattataacttggatttgttctttcttaatttgagatttgattggttttgtcttaaatttaatcttgattctattgcaaaaatatcaatgattttagacctcaaatttgttttcttttgaattgatcaaggatcgagattgactgtaagagattgacatttttgttactgttctggttttccgaacaaaatgggacaagacatggattgtgtcttgttctgaatatttgaaatggtgattgttcaaatgtttgttttgctgatattgaatttaaggaaaatggaggaaaaaaattctgtcttttggggcattttactaatgtaaggctttagggattgattaagcgtgtgtgttttgtttataagaagattttgtttctaggttatgatatgaacttgttcaaaagttggaatcttgatgattctcgtttgactaacaagtaaatacaaaacttcttgttggtaaaacgtttttgaaagctttagtttcatctcaaacttagacatctttgccagggaaggttttatgatctactagtatccattcgtttatttagagatcttgatgtttcttctaaaaaccatttgtattggaactgcgagaatggaacgcgtttttagtattcccattaaactttctagacttttgttttgtagttgtagcatttcagaatgttcattgggtgttgtagttttccggtgtttgactagtttctttaatttttgaaaacgcagacaatttcttgggatttgaggagatagaaggagaagatgactttagggaggagtatgcttgcccgttctgttcagactattttgatatcgtttctctatgctgtcacattgatgaagatcatcctatgaatgcaaaaaatggggtagatatttcctcaatgttacctttctctcgttttgaatcaaaatctatttattgtttcatcatatcattcttggtaagagcactgttctatgtttagtagttactggtcttggatataaagaaagtgaaagtaacctaatgaaatgcgtcgaaataggatttggaattgccacttagtgttcctcagagaataaataaactataggacacttgtttattgctacaatagcaagatttgttttcaattctgcgttttgacattgttaatcttgtaggtatgtcccgtttgtgcggtgaaagtgagctctgatatgattgctcatataaccctacaacatgcaaatatgttcaagatatcctttttgctctctctaccagttatacttttaacgatcatgtacttatctgattcttcaaatgagttgtgttaatgatacgaatacttcctgatttatgatttaggaaatagtttaggatttccattttcttatttacttttcctagagtcttttagtttatcttctattatattgagtttgtagtaattgagagctttggaggattctattgagtttatactcttgttactttattgttcaatcttttctactatcataataaaggttttggtttagaattggattcgatctctaacagttacattccttaacgaaatattacgtgacgcggaaaaggaaatcaagaagaggcggggctcaatccatgctatcgatcttgaagagagagtttcctgatggaaattttcagagcctatttgaaggaacatcacgtgctgtatcctcttcttctgccagtatagctgctgatcctttactgtcttcattcatttcaccaatggctgatgactttttcatttctgagtcaagtctatgtgcagacgcaagttctgccaagaaaacattgaatcagagtttgcctgaaaggtatacttccacattctcatttggattacacttctggatgatatcatcattgcattccccttttcttgatcattcttgttaagtgatcttacaatttcgggtactcagtcatcgcatatcactcatccttagtttttgtgagccttaatggaatttagttaatcccttgttttaccaataatctaaaagtgatctgagtgtttttttttttgttgttgtagaaagtacaaattgcagagtttgttctgatgattcttgtcttgatctttgttttacaggaatgttgagaagcagtctctttcagcagaggatcacagagaaaagttgaaacagagcgagttcgttcaagggatattgagctctatgattcttgaagacggcttataaaggagaaacatattccggtaacttgtctacggttagatgattcagcgattggaaaatgtaacggctttgttgtgttaaacgcaacaattgatttgggaaagggtttgggaataagcagaataatgtaaaagagagacatgataatgagtattatttttaacttatgaactacatatttgctttaatgaacactcgaattgtctgtacaccgtaggtcttacaaaaaaaaaccaaaaaaaaggtatgtatttgatcatatatttgcactgagttttctggtcttactatggtgttttgtatcaaaagtttgatgaaactatttggggttcaaagatcgcagagttttaatttcaggttttgacaaattagaaatgtgtaaaccaaccgactagacaaggacataccctanaggataaaaattgacctaagaattgta

SEQ ID NO: 7235 - DNA, 1139 bp, Arabidopsis thaliana landsberg
  unsure (1)..(1139): unsure at all n locations
ctcgagtaaacgtcgcttttagtgattctaaatgagtaagtcacttcttctttactcgtagtgaaattgaaaatcatgtattcaaatggttgcatctccggtacaccactaaaccggattccattccatggaccactccggtacattcgtgattctctgttccatagaaaaatctcagggaagccttcggtttcgagtttgaacgagaaatctccacttgannnnnnnnnnnnnnnnnnnnnnnnnnnnnnnnnnnnnnnnaacccggttttggcatcccagccaagtttcatctccggaagtaaagtatctgtcggaaaatcaaaactctgccacaaaactccatctggagcgctgttcttggagtctctgagcacaaaattaccattatcaagaagctctgccaccaatggagatctcacatctcctccggtcagattcgtcgaccaaaccggtgtatcggactgatccaaaacgacaagattactgtcggagattttgagagttccgatggaactagagagaggagtgtctctgtttgcaacccatacgtaggttctcttagagattgccttgtaccaaattccaagataccaacgagaatctaaaccgggtttgaagaaaccaagctcgaagacattaccaggagacacaatggtgttattgcttgagatagttagagattctgaagccgacaaagtgttggcagagatagagtaagcagggaacagaattaagaggaagaagaagaagaaggtgtaagaatggtagaaatttggtaaacctctcatttctctaaaccaagttttttgtttttcactctttcttgagaaaagtatgagagtttatttccattggagatatcggacatgttttgtgtaatgtgtgaaccttacgtaaccgattttatttctgtcaataatatattaccttgctttttttcttttcttggtcttcttgttcgcatttggaaaaaatatctagttatgtactatgtgtacagtccaattcatagttgacctagcaaataaaaagtcttcttcttctttttttttgtcaggctttctttccttttccaatagtcatttttacttcataaattcagaatttttcttcaaaatatgatattattgatggcc

SEQ ID NO: 7236 - DNA, 930 bp, Arabidopsis thaliana landsberg
ccgggtcatcccagggccgctccggtacacttccaaaaagctggtaaaacctaaaatttcaaggtaatcctagagtttcgagtgggaacgggaaactcccgcttgacggatcaaatgagcttttccaggatgtgacgaatctgttaagccctcttttgtgatcccgacccaatttcatctgcggtaataaagtatctgtcgggaaatcgaaactctgccacaaaaactcatctgattcattgattttggagccccttagaacaaaattgccattgtcaagaagctctgccaccacagaagatctcaccgcaccagtcagattcgttgaccaaacatgcgtatcagaattatcgaggatgacaaggttagcattggagattttgaggattccaataggattagagagaggagtgtctctattggcaacccatacataggttctctgagagattttcttgtaccaaatcccaaggtaccaactatccccaaggattctgaagaaaccaagctcgaagacaccaccaggagacacaatggttttgttgcttgagattgtcagggattctgtagctgacaaagtattgacagagatagagagatcagggaacagaattaagaagaagaaaaggaaaacgaagaaggtgtaagaatggtgtttgtttggtaattcacctctcatctctcgatctctctccaccactctcatatgttgttcattttccttttgctttctttatttatacgatttttcacatatttatttcaggtttatctaacccatgaatcttatttatattttacccacacgacaaagagtagtgttattccacgttccatgactttttatcgcttcaattaaaattaccttaaccaacttttttcatggtcaacaatttaccagaaaatctacctgtgaaattaatttccctg

SEQ ID NO: 7237 - DNA, 794 bp, Arabidopsis thaliana landsberg
  unsure (1)..(794): unsure at all n locations
tatcctgattaagaaattaaagaaagggggtgacttgtagaagggaaaaaaaaacaaatgcgtgcgaagaagagattcaaaactcttgttaagattattaggctgtgtagtacttactagccatcctgcgatacctgggagtactgcaacatcaagcccatgagtgaagattggtttaacagtcatctggaaatatggaggctctgcaaaacacacacgtaaacgccccannnnnnnnnnnnnnnnnnnnnnnnncactccgatcaacaccttttaagagtagaacgcaaaaatgtgtttacaaaaatgaaaaaggtcccaatcagataaagaaaaggctgccctacctttccttccacgtgcattcctgtcaaatgcaactttgtccacatcccaaaaccaagccttttccttaatttcacagcaagtattgcactcatatcatctgctgcgagaaaattcataccaagttccagtacctgcataaactccagcataagttctactatagatcaaggagggaagaggccaaagtatgatgttctatgaggcgttacaaatataccaagtgatcatcacccgtagattgacgaaggaccctaatatcagtcaacagaggtgggtttcttcccatgtaaaggtgctgtatcacagcttttttctgcacataaatcgtaatagatgtcaataccagcaagtgacttcttacaaaccatacagagttaagaccagaagtaaatatttcttagacacggataccgctgtccaaggtctaatttttccaaggaccaagg

SEQ ID NO: 7238 - DNA, 2075 bp, Arabidopsis thaliana landsberg
ctataacgtctacgcctttttcgctctcggtttcatttgtttgcagttccttgattttctcaagctgtctcaataggttcaacctttcggacccgtatgtggaaggaatctgaatgaagaatatcatcaaaactgattcaatgagaagtttttgaattctgacgaatctatatacagagaaggaatgcgtaccaggcctggtacatatctctgaattccagccagcatggcagcgtgaccaaccgctgtaacctgttcagaatagcatactaaatatattagtcccatagattagaaaatggagctgtgaatgagaaatgttaaacagcagaggttatcgccataagattgtgcaaagcaactaattgaagatgtagcttggagtgattcagaaaaaagtgtataataaaaaaagaagtgaaaataaacttatctgtaaggttatttttgacttacaggaagaagcattagaataccgatgggaataactgacgccaggtcagtcatggttctgcgcagggctttcttttcttttcctgttaattcatcaccaatcagagacctccgaagtagctgcactgcagctgctgaatcaatggcaagaagttgagtaccttgccacacgtcctgtaaatggaaaaatgttaacaaagctgacaagaggaaaagacaatgacccaatggcacagaaacacgccatatagttgtagtctttagttgaagatattgataccgtggtggcttctcttagcttttgaagagttttctccatcatgttttccttcttgggagtctgaaccaactgaacactttccgttctactgcttgattgaggtgtatcctcagagattatttcctgtaacatatgaacaaacacttggaagcttgtactggtgaaacaaaagacgcaagacccaacattttggattactataagggagttgattggtcatcttctaccatgttgagaagtttaatcatgaaagtaacagagctaagagcacaacacataattatcctagtgcgggattattcatcatacagggtttgacttactaaaatgatggttaactcaactgaaatgataaatagtattttcatttttccttttcggtatgagctttttatttaacttacgatgaaaagagtgcattattgaaactagcaatttgacagctaagaaatcttgcagcagttactaacctcctcatctactgactgatcagtgcttcttttgacccgcttttcgagttctattagctcgttccttagaatttcgaatcggctgatctcaattggttccgagtctatgctaagtaagtttccactggatttcccaatatattcatctccctgcatatgcgaaactaattcctgaaacctttatccgtgctagactggaaatgactggattttaaatgcataaatgaaaacaaaagagtagtatatgctaagtaacagactgaacaaacacagagtgctacgtagaagagtcaccagcaaaatttcaggatactacaactgcaaagcccgttgccagaatagttgagataggatcacaaaatggaacttaccgataactcaggatcaagcttcttccttgaaggccgtacaaagaatccccagaatccacgacttatactaatgcagagggaacaaatacatcattgtgaccagcgtggaacaaaagagtagtcacccttatatagatgaaactaacacggcaagcatgaagatgaataatactaagcaataggtagcataccttttgccttgatcctcagaactatttgcgttctttgtgtctttccctttaaaataccgtttttgtacctcgtaggattcttgagaatcatttttgtcacctccctgagtttaacatatgaggttatagtctcccacacaaatttaaaaacaaaacatgcactctcaattattactttattgtcctatactgagagtctgagactgatgctacactgcttagagagggatacaattggtttgctttgtccatctagcattcagataaattataactagcaggatcaaaacaaaaagtgacaatgaaaaaa

SEQ ID NO: 7239 - DNA, 2918 bp, Arabidopsis thaliana landsberg
ggctatttcaaaggtgtagtcacatcttaccgatgctcgctctcatatgcttacccaccctaaagaatttgatgtggtgagcatcttttatactcattattatgttcatttgaatattgctatagttgcttctgttaaactaattttggttaatgatattcttaggttgatcttgatccatatggatcaccatctattttccttgactcggctattcaatcagtcacggatggtggattgctaatgtgtacagcaactgacatggcagtgttatgtggtggtaacggtgaagtttgctattccaagtgagtgttttgtttttttgcacacctttctcaaccaccgattttgccttttggctaaaccagtctttaatctttaatatatcagatatggttcttacccattgagagcgaagtattgtcatgagatggctttgcggatcctccttgccagcatcgaggtttgtttatctttgtcattttaacgccaattctctcaggtttagattgatttcttatgttcttttccaccttttggttatgctttaatgcagagccatgcaaaccgctacaagcggtatattgttccggtgctatctgtgcaaatggatttctatgttcgtgtttttgtccgcgtttacacgtgagttttccttgtctaatcaaactcgtaacatctcagttattcagattctgcaaatttttttgttttgttttcgattcactgaaacctcaaagattaatgaaattttcagctcggcgagtgcaatgaagaacactccattgaagctctcttacgtatatcaatgcattggctgtgattcatttcatcttcaacctgttggaagatctctccctaaggtatatacatacacatgtgaaagttttaatacattttctatccactgcatcccttaggatgatagaaactttgaatatagccaatgattcttgttatggttctatgtgcgtcgatagtgtttgacatagttccctctttttgtaaaactcttgaactatcagtgaggtcacttccaaactaatttaaaatttctatcctgaaaccgcccttttttatagtttatcataatacattttgtttttggcagaacaacagtgtgaggtatctaccagcaattggtccggttgtgaagcaggattgcaaccactgtgggaagaaatataacatgggtggaccaatatggtctgctccaatgcatgatccagaatgggtgacttcgatattaaacagtgtgaaatccatgaaagacagatatcctgcttatgaccggatctctgctgtacttactacagtctccgaggcaagttgtgggatttttttttgttctgttttttcaataaaccattgaaaagtgagaaattgacttttatgtttcgatttaatttttttaggaattgctggatgttcctctgtttttgagtctgcataatctttgtgcgacactaaagtgtatttcaccatcagctgcaatgtttcgatcagcggttattaatgctaattaccgtatctctgggactcatgtgaatccgctcggcatgaaaactgatgctcctatggaggttatctgggacattatgcgctgctgggtaaactaagttgatgaatttgtaatgtgaccgtgtttcatcttaccaggtcttctttttgatggttttttcttgggtgatattgtaggtgaagaatcatcccataaaggcgcaatcgcctgaacaacccggtagtgtgatcttgtccaaagaaccatcacatgaggtcttttgctcgctttctctgaattgtttgaaactgaataatgttttttccaagcctgaatcttttcttttcgattctgtcttgtgtttggacaggttgatttttcgcgtcacattggttcgctgagcaaggcacaggcaaagaaagtagctcgttttctgccaaatccagagaagcattggggtccaaagcttagggctggtcgccagattacgagcaaacatgtatctcttattggtcatgaagcagtcaatggtcatcttagccaacaccatgaagaacttaaagaagaagatgaagaagcagagccagaagataatgtccaagacaaggttgatccaaaacgccagaagacagcaacagataatattacctcaacataataagacaaatcacaaaaagttttacaaaatagatcagattttgtctacagtcagatttgcctcctgatgaaaaactctgttttgtctgttgtttcctatataatcatttttgataatacttgagacttatgacccatttttgtgattccttctgttgtgatcttattagtttactcatctatagcttaaccgaaccaaacagtaatttagtaccatgaagaactaaaagaggcaaaagaagcaatgtataacaagatattggaagtagataaccacttctgatcatcattaaatgaagcaatatcatagtacttgaacaaacaaaactacaactatacaaacgctgtaaacaatctatttgttaaatttacttttaatacaaaattgtttagcagtaacaccattggtcctcttcttctacttcaaccccacgcacgaaagaagaatcatcaaaaggtttcatttcactgtaaatcaaaccaagctcttcgtaaatctcttcccatctaggatgagccttatctccaacgagaaacacatgaagctcatcttttagctcaacccaactgcaaccaggctccttcttaagcttaaagcctctcatatttctcctcaaatctgaaaccttttcccacattcctgcatctgcgtatacatttgataaaagtgtataagctgaagagtcttgtggatccaatctcaacagggcagcagttgcttcttctgcaacctctacattgtttactatgtatcgtgcag

SEQ ID NO: 7240 - DNA, 1762 bp, Arabidopsis thaliana landsberg
tcggttgaagcctgccagagaaacattaagttcaatggtttgatgtctacttcaatggtggagtcatcatcttactgatgctcgtgtccatatgctcagccacccaaaagattttgatgtggtaagtatccaatttttgcaaaatcttttcatcttattgatcacataactaacttggttcagtgatgtcttaggttgatcttgacccatatggtgcgccgtctattttccttgactcagctgttcaatcagttgccgatggtggtttgctgatgtgtacagcaactgacatggcagtgttatgtggagctaacggcgaggtctgctattccaagtgagattttactccttcattaccttattctgaaaacaaatatctttgattttgtctgaatgtcttaaatctgtctgttgttagatatggctcttatccactgaaagggaaatattgtcatgagatggctttgaggatcctcctcgccagcatcgaggtaattttttgctaccgttgaattgattcactctcgccaaatcttccaggctttgattgttttaaagatgctcgactggtatttcttttctaaaaagcttttgtttttgatatattgactttggtcatatttttatttgcagagccatgcaaatcgctacaagcggtatattgttcctgttctatcggtccaaatggatttctacgttcgtgtttttgtccgcgtctacacgtgagttttcctttcttttcaaactgttcctctcaattagagggaagtaaagattgaagctttatgaaatgcagttcggcgagtgcaatgaagaatactccactaaagctctcatatgtctaccaatgcattggttgtgattcctttcatcttcagtctgttggaagatctctccctaaggttttgtggctgtctcgttgcaatgttagtttagtagtttttgaaagctgccttttctgataatcctcttctataattttcttacagaataacagtgtgagatatctacctggagttggtcctgttgttcctcaggattgcactcattgtggaaagaaatataatatgggtggaccaatatggtctgctccaatccacgatcaagaatgggtgaattcgatactaaacggtgttaaatccatgaaagacagatatcctgcttacgaccgaatttgcgctgttcttaccacaatctcagaggcaaaactctcctccacactctgatagctttagtttttggttttgatcaatttctctaaatccctaaatgtttggcttgtctccaggaattgccagatgttcctctctttttgagcctgcatagtctctctgcaacgctaaaatgtacttcaccatcagctgctttgtttcgatcagcggtaatcaatgcaaagtaccgtgtctctgggtcccatgtgaacccgcttgggattaaaactgatgctccaatggagattatctgggacatcatgcggtgctgggtaaaccaaccatttaagtctaaaggcacaagcatttgaatgtcattttctttccctcattgataatgaaagaactcgatcgtctgactgtcggtgaaaaatcatcccataaagctccaatcacctgaacatcctggaagtgtgattctatctaaagaaccatcttaacaggtgtctctttcactaaaccattggggaatgcttaattcattgcttattatattaaagttccaaaactgaatttttaaacaccgcttttttttcgacagggctgacctt

SEQ ID NO: 7241 - DNA, 2876 bp, Arabidopsis thaliana landsberg
atttggtgccacatcggcacaaaaggtgaggagacttaatcaaaagtttaatgactacaagaagcgcccaaataagtcaatgaggcagcatcttagggtcatgtcaaacatgattagagagcttagaactgctggcgagatcatgtctgatgaacagcaaagtacaagctgtcctccgctcattaccggaaagttgggatcatatgaaaattcagatgactcacaatgacaatgtcaagactttcgaagacatttcacgtcatcttgagttagaggatgagcgcctagaggctgctaaacctttcaatgaagccaactatgcgagttcaagctccggcatgaaacgcaagagaagtaacttcggtaataaggcttccgaacaacctaatcctaagaagcaaaagagacacgccaagcgtggaaagaaaggagggaaaaaggataagaccaaaatgaaatgctacaattgtgacacattgggtcattttgctcgtgaatgcactgaggcaaagaaggtattatccttggaaaattctcgtaaatatgcttatgtttctagttgtgtaatgcttgctgaatctaatcctttgtggattgtagactcaggagccacagaccacgtagctagaagtcgtgaagtgtttacggagtaccgacgcatccccaaaggtacaagatggttatacgtaggaaataatacaaaagtcgcagtgataggcattggcacttgtcaattacatatgcgcggcgggaaaaatcttatcctacatgatgtcttgtatgctcctgaaattcgtcgggacctcgtctctgtgttagctttacttcgattaggatttagtttgaatttctatgacatgggtttacacatttccttagattctgtgttctttggttatggttatacatacgatggttttattgtacttgattgtaatacaactacatctagtaataataatgattgtttttcatttgtcacaagttctactactattgatatggatgtgtggcacgcaagactttgtcacattggagttgatcgaatgaaaagattggctaaagaaggccttttaggctcactagctcgcatcgatctaaacacatgtgaatcatgccttgctggaaaagcaataaggaaaccatttggaaaggcaaccagagccgaatatccattgcaattaattcattcagacatatgtggtccgatgaatgtgagggcaagacatggagcttcgtattttatcacatttactgatgattacactcggttcggtcatgtatacttgatttctcataagtcagaagcactagagtgttttagacgttatgtgactttggtcgaaaatcaattggataaaacgatcaaatgcttaagaactgatcgaggtggtgaatatttatcggaacagtttaaagaactgtgtgatgaaaagggtattgttagacaattaactaccccatatacaccacagcaaaatggtgtatcggaaagacgaaatcgaacgctccttgagatggttagatcaatgatggcacaagctaatcttccggtttcatactggggagatgcattgcttattgctgcctatgttcttaatctcgttccctccaaatctgtcacttcaaccccttatgaattatggacaggaaggaaacctgttcttgcacatttaaagccttggggatcagcagcgtttgttcgcgatatttctcaccctcatgggaaattaggtcctagaggaaagaaatgtatctttataagatactttgagcactccaaaggatatgttgctaattggtgaacaaacggatggaagtgtaacagaaatcgaatcacgagatgttacgtttttggaaaatgagtttccaaagaagggagagattgataaagaattccatcttagagaaataattgacccatcaaatacttctcctactattcaacctatggaagtcgatgcaaattcaaatgatttgcctcaacttagtgggagaaatacattggttgatgattcttctttgatgaaatcacaagagtttgaaatgcgtagaagtaaccgtggaaagatccctcgacgtcgttttgaaattgaaggggaagctttcatggtggcattgcatgatgacttagagcctaaatctgttcatgaggctttctcttgcccaaactcagaaaaatggaacagtgcaataggagaagaactagattctatgaaagtgaaccatgtttgggacttggttgaccttccgcctgaccgacgagcgatcggaaataaatgggtatttaaaatcaaatataaggcggatggttctattgatagatataaggcacgcttggtagccaaaggatacacccaacaagaaggtatagactatgaggaaacgttttcacctgtggtgaggtttgcttctattcgactcattctatctattgctgcgggattggatttagaattacatcagatggacgtttagactgcgtttattaatggcgaattagaagaagaaatttacatggaccaaccaaatggtttcattgtcaaaggccaagaaaataaagtttgcaagctcaaacgttctatttatggcctaaagcaatcttctaggcagtggtacttttgttttcatcgagccataacatcttatgattttacgatgattaatgaagatcactgtgtctatgtcaagaatactggacaatcttttgttattttatctctatatgtagatgatatccttttggctggaaacaatatggagttcctcacaaccattaaagaatggttatcatctaattttgagatgaaagacataggagaagccgattacgtgctcggtgttaagatacaccgggatcgatcaaggagattatt

SEQ ID NO: 7242 - DNA, 1107 bp, Arabidopsis thaliana landsberg
tacatggtctgagagcttgatgatcctgaattgtttgccgctcagactccttatgctagtgttgtagctagtaatatgacccagtctaattgagcgacctcttaacactcatgctcagcatcttcgaagagttctcagagatgtacctcgcagttggggtctagcaactagggtccatggccgcatatttgatgagatgtgtattcagttactgtttcgctctgcacttgaaatggcttctatgatgctgagaggtccctggttgtttaattaatggtttgtggccttacaaagatgggaagactttccccgtggagactttcttacttatattgacctttgggttcaagtaaggggaattcccgtcctttatgtgtctaccatgactgttcgctttgtcgctagtaccttgggacaagttatggggcttgattttgatgaagaaacctccactcaaatagcttttatccgtattaaggtgaggattagtattacagatcgtttgaggttctttcgtcgcgtacgttttgagtcacgagaaggagcaatgattggttttgaatatgaaagccttcggaggatttgctcaaactgttgtcgtatcacccatgatgttgatcattgtccttatctagcccagccgatgatccctcataatgatgttgatgatgaagcatatgttttagtggttcctgtttgggaagaaggagcaggctccaaccaccgcctgaacacaagtcctccacctcagatatttcttctcatagacctaattctcaaccgccgagccctgcttcaataggtatggatttgaatgaacctgatgtggaccaacagaggagtcacttatcactttctcatgccaaggtttcctctgatgactcttccactccaagtgttcttaataacacggtgcgacaagaagctggtgagatttctaaacgaaaaaaggaaaagaaattgatcccaccccggacagaagcatgagacagtgtagaaaagatcatggagtcagattttctccggtaccttctcaccctccatagaccttttcagttatgggacactcagagtatgacatacccttatactctgtgcttaacactt

SEQ ID NO: 7243 - DNA, 551 bp, Arabidopsis thaliana landsberg
aagtgacagaaacctgaagcaatcaaagagagattgcccatccaaaagcctgaaaagaaactatgtttcctaagtactaagaacttactaaaaaccataaccttaccccaaaaagtgtaagtcacagagtataagggtatgttatactctgaggagcaacagtcatagcagatctatggtgtgttatcagactccgaataaaaccttactccataatctttgcgatattgtttcttctttttatcaggagtaaggtcaatctgctttccttttctgcgtttagaactctcaccacatgcatatcttgattgatcattaatagcagtaggagtggtggaatcatcagagagagctttaggacttactaatggaacacttgaaggaagatgttcaatagcaggttcattcaagtctaaacccggtgaagcagaggttggtgcctgtgatataggtctgtgagaagagatatcagaacttgaagagtgatttcgcatgtggagggggtgtaggattgctctatccccctccctcttaccaagcgggaaccatct

SEQ ID NO: 7244 - DNA, 3114 bp, Arabidopsis thaliana landsberg
tacatacaaatgataagcaagacaggtgtagttaccaattatggaagcacaatgcatgtctgcgtatggttcttcaccagtgagtagttcccacattacaatcccaaacgagtaaacatcgatctaatcgaaagacacaggcttggttagtggactatatgagattcaatccaattgaacaaaagctgcatacttctataaaaaaaattagttaccttttcagagaccatgttgcttttcccactcaagagctcaggtgccatccatggcaaagtcccacgaacacctcctgatactagagtcttctgtttcaccttcgataaccccaaatcaccaatctggaaggaaaaagaaagacaaaatttatgagaaacatataagcttactctttgttatatgagagatcagatgagtaacaacagaaccttgcatataggacgctgaggatctctcatgttcacaagaagattctcacacttcaaatcgaaatgaacaatgttctttccgtgcaaatactccatcccaaatgcagtatccatggctatgatgagtcttttgcgacgatcaatagttctggaggagtcaaccaatgtgatgtcagataattggatactctaggaaaatagtatataatgcatgaatatgtgaaacttttttacctatccttcttctgcaagaactgtttcaaagatccgttaaccatgaactccgcgacagttgctagagaaccatcaggaccatcacgaactatcccatagaacgacacaacatttggatgatgcaatgagctcaataacagggcttctttccaaaaatcttctatctgcaacagcagaaaagcagtaaaagaattatactagacttaaacgttgatcaatatgttaaattcaattgataataaaggaatgaaattttaccaaacgttccctttccgaaggtttgcctgcaaagcagctggcttttattctctttattgcaacatctgagcctttccattttccatggtaaacagatccatatgttccatggcctaactctcggatttcctccaaatcatcgtttcttatagactagataaagaaggtgaaaaccaagataacaaagtcaaaaggactagaaatttgttcggtttcagaattctataagacgggtttaagaataaaaacctgtagtcccctggatttagcttcagcctcagcctttgtttgttcaatcttgaaattgtttgggttatcactatcagaatctatctcaggttcgtcttgagcattctgaaaaacaaaaagttgtttcaaatggaagtcagaataaaagaaaacaacctaagcccctcgtaacaggttaatatctcagaatactcaccatatgctctgattcattttccaccaactccggcctcacttgatctttggcctcttctggatgagctttaacctcagcagctccttcaagtgccgccctcttcacagattccattaactcaggcaagaaactcaaacgctcaactgatagctctgccccttcaagagtagcagcagaaggattaacttctaccaggttccccatatctttctttcctccagctaagggttgaggcttatcttggtaaggaacaccgtttgaaataccagtattaacatagttaaattgttcacctccctgagcaagcccgctttcccccgatgtctgcataactggtgtctgcatgattggtgcagcagtgaggtttgtctgtaataatggcccaggcagagctcacgcacctgtagatgttcattatgtacagttgggttttcagatggcacccaatttgggtctaaagggaaggctctatcttgcaaatggggattagggtaggaaggctggccaagggaggacattccatcaaagcctgaaatcctttgcggagaaccaaccaaaacaccttgattctccattccagtagaatacctaggagcagtttctatcggattcctgataacggtctgattgactgtgccattaatttgcatgggcaagcctggagggccagctataggatttgaaacgttctgccaaatatttggttgagggtggtgcatatggctatgacctgctgagtggatactatcaggtcctggaggatagagattattcccataatgaaacccacgttcctcagcagaacggttggccgaattcaggggaatgccaccaagtggtttatcatgaaacccttcattggaaatttcatgtccagctcgttgaccaagaggatagttcgacacaggataatcgggagtgtaatgatcgttcggtcttccaacattagaaatatgtgaccttccttcctcaatccttggagggttaggattcacctgttgttgaaccatccatcctctatcaggtccgaaagtctcatttggataagctccatgatgagtaggctttgggtctgtgttaagcaggaaactttccctgtttggtggacaatgtgcacaatgaaccggtggaaatccattgttgcctatattagattgctctaaaagctgatggttcctatgatacggtacacgacagttctcgcatccattaccaccttcatagccacctggaccaccgtgaagaacattcccaggaaaccctcctttactctcaggtggcattgctccagctgggacccacaccacactgtcaggaatgtgtgcctggtgctcgtaaaaaggatggtgacttgcttgcggcctaacatactcctcaggcattctatccaatcccttatcaggaatttccccatatggcattcgataacgagcagaagaaggcgaagatggaaattcctgaaaagttctgggatcatgatgtccatggtgccgaggagaatagaaaggactccatgtaccttctacttcaccatacctctgtgcaagcatctgccccgaacccacacgaggaatcctgagctggtgaagattactatactgcgcagtaggtatctcgttgcccctctggctaccaccaccagtctcaatgctcagctgattcagcatcggttccaccatcgaaaaatcatcaacgagattgaaacgaggtgaatcaggatactgcatgcaactttctaaagtctgtcccttc

SEQ ID NO: 7245 - DNA, 672 bp, Arabidopsis thaliana landsberg
ttttttaaatctaatatctatgaccaaccttggtttcaagctatcattaataatttccagagcgagacaaggtttgatcatccaatgggtggcttagcgattccttgtcctgaagatacctacatcactgcaaatccaacattttgttcttccgagttgaaaaatagacttactcattttaaacgtaggagtttttccccctcttcttcttaaagtttgaagatagaatgacaggtttttgcaatagacatgatcatgttcatgtcaatacatttaggatcgatcttagaaaaagaaagacaatagactaaaactagtcatctaaattttattgccaagagatgtacttcgaaaatgctagtatagattttagtctcttgacaataaaattttgtataaaatttgtctcctaaatagtatgtttttgtttttgttgtattccccaacagctaattctgtcttctggtatatgggtatacttcggttagtttcggtttgattacggttcacctttcaaatttaaacattgaaattgtaaaccatcttctttgtccaaaacgatgtcgtataataataacacgtagccgttaaatgaaaaccggagccgcaaaaaatcaaaatcgattaaaactaatttaggggaaatgtcaacaacaattcgatttctgagaa

SEQ ID NO: 7246 - DNA, 982 bp, Arabidopsis thaliana landsberg
acagagatactataactcccatgttcggttgagaaaaaatggaaaaaggcgaatctactacgcttgtttcttgatctttaactgtttcttcaggaaatagatttgactcgttactgctatccgaatcattctcaatgtagtttgagtctctgagaggactgtttggatctgagaaaatatcagatgaattctcctccattactatactctcttcagcagcagtttcaaaatccgtgtttatatcctcggtttctcgaattgagctatcttcattgttcacaacatctattggattagcttccacaggttcagaaacaagctgccgattaaaatcttcaagcaagttacgcgcaactgatgatatcttgacttcacttttcccatttggtgacttggcgctatgagttggctcagactctgctctgaaaagtcttttcaccctgaaccaaggctttttcttctgtattggagaaggactttttttctcttcctcggcggctttgtgtagaactctccattgatcctcccaataactttgtggtgtaattatcaatggagatttaggagatgtggatccggaaggaaaactgttagttctcgccggtactgctggactgatgctctgatcaaagccatcatttatcgatagagctgatgatcgtacatcatcatccaaagccaaagtttgtaatgacttagctttctctattatcttcctcacatcaatcttctctgggaaattcaatagtctctggagacaagaagctgcgttttcagtagcaagcaatgatgatcttaaagataatatcatcgaaactgccattcccgagattagagctccccgaggagaatcaaagatcttgtagctctggtttgtattgttatccgcatctgttctcgccgtgttatctgctgagaatatctcatcccacactatcaataaatcctgaagcaaaaactctcttccaaacaaaactcgtaa

SEQ ID NO: 7247 - DNA, 961 bp, Arabidopsis thaliana landsberg
  unsure (1)..(961): unsure at all n locations
gctggtctcaacggagaaattttccggtgacagcttaaagttttgatttttaattcttttttcacgaagaagaatttcatttttgtgaaaccgttagaagaagaagaagaaaaagattataagcttatggttccatcggagatagaatctnnnnnnnnnnnnnnnnnnnnnnntttcgccaatctgagaggtctgcgatggcgcgtgaatctcggtgttcttccgtttcagtcttcttnnnnnnnnnnnnnnnnnnnagctacagctgaatctcgcagaaggtaatccttttaccctttgctgcaatgttgtgttgccaaagtttcctaatttgggaatttttttatgttaaataagagatttgagctatctgggtttagctaggatctaattgactcctccagtagcataaatgtaatggtgttacaatgtttcttgtctatgtagatatgctgctttaagaagacggctcttgattgatccacatttgtctaaagatgttcgaaattcccctgacctctctattgacaatcccttatcacaaaaccctggtacaagcttttctgattcgagtttcatatacagttttgctgagattattgggtgttgattatatgaaaccatttgcaatgcagatagtacatggggtcggttcttccgtaacgcagagctagagaaaacattggatcaagacttgtctaggttatatccagagcattggagttactttcaagctcctggatgtcaaggcatgttaaggcgtattctactcttgtggtgccttaaacatcccgagtacggttatcgacaaggtatttaaaatagtgaactttaataactagagaatgtagtttttgtaatgtataatctttgacattttttcatgtttctttgcagggatgcatgagcttttggcgccactgctttatgtacttcatgttgatgttgatcgtctctctga

SEQ ID NO: 7248 - DNA, 2457 bp, Arabidopsis thaliana landsberg
gaaaatagattgagtttagagacatctctcgaatacgatcatcagacaagacttaacctccatttgcacgtcttcctgctcacgacagacaaatcatgaacgaatccgacagctgaacgaattgcgtgtctgagaagatccaaatcctaattttctaccttttttttttgggtaaagtttccattcaaagtttcaatctttcttttctttctccaatcaaattcgtcattctttgtctctgttcttctaaaacgacaggaactaaggttagaatttggagcttctcgtacgtttttgcttgcctacgtttccggacaaaaccctatttggtaaatcctcattcttgtctgattggttgagggtagacaatctactgagatttgtgaatgttttaggatagacaatctaattgtgtttctcttcttatgtaagtagcatataaacagaacaggttctgttcatcaagacactgaaacctgatggggatggaggaagggattaaagataatgctgcatcagctcccaattcaagacctacaaaccaacttaaagctcttttaccgatgcgggtgcttcaagttttcttgttgttctttgttttggttcttggaatctcagtcattagtatgcacatgatcaagtacttaaagattcaaactttagctccatcgacattgatctctacttatgatgagagaattacgttagagagccttatcaagcctccattgaatggttggcattccatgaatgacagtgagcttctttggcgtgcttcgatggagcctcggatacttgactatccatttaaaagagttcctaaaatggcattcatgtttctcaccaaaggacctttgccatttgctccactttgggaaaggtttttcaaagggcatgagggcttttactcaatctatgttcatactttgccaaattatagatcagatttcccaagctcatctgtgttttacagaagacagatcccaagtcaggtacttttgtttatcaatgtattaatgttgcttcttgtgtcttgatttggtttatctcacttcggagtttctttatttgtgtgtagcatgtagcttggggagagatgagtatgtgtgatgctgaaaggaggcttttggctaacgcgttgctcgatatctctaacgaatggtttgttttactatctgaagcgtgtattcctcttcgcggtttcaactttgtctaccgttatgtctctagatcaagatatagtttcatgggttctgttgacgaggacgggccttacgggagaggcagatatagctatgcaatgggaccagaagtaagtctaaacgagtggagaaaagggtctcagtggtttgaaataaacagagcacttgctgttgatattgttgaagacatggtttactataacaaattcaaagagttttgtagacctccttgttatgtagatgaacattacttcccaacaatgctctctattggatattcggattttctcgctaatcggacattgacttggacagattggtcaaggggtggtgctcatccagctacttttggcaaggctgatataacagagaagttcatcaagaagctgtcaagaggtaaagcttgcttctacaatgatcagccatctcaagtttgttatctttttgcaagaaagtttgctccaagcgcattgaagcctttacttaaacttgcaccaaaggttcttgggttctaattaatggatctcttgtcttctttttgttcttggtatttgttctgaaatgttcttgaacttgagtgtagcttcgtatagcatggacacaactctgatccttattgtctccttccacattgataatatagatacttcaatggctaaagaactcttcttgttccaatgtttaaactcctcaaaactggaatagaagcacaaaagtctatcttttattagctgtttgtcaatacaagaacaatgtaagatgtgtgtataagtgtgtgtatgtttaatgtatagtgatagtatttgatttacatcttcataagaagagtaaatagaatatactgaaaatctaaactagatgaagaagcaatgagagcaaaagaatgtggaagggtttcaaatataaaagaactaactaatcatatgatctgagtccctcctttcttcctgaatgaaacggaagatccttgcagcagattcagaggcagatgttgaattatgaggaacggctttaatggcgcgaagcatcggttgctgtttctgcttgtactcatcagtttgatgggtaggctctgtaggaaacagaggaagcacttcaagtttatgcttctctggtggacttgaagctgtgcttccatgtatgtcactgtcattagattcctgagacttctttaaagaaaatggaatggcttgtgtcatgtggcttgatgtgttagaccatctttgaaactgaccaaacgggtttgtttggtcaa

SEQ ID NO: 7249 - DNA, 871 bp, Arabidopsis thaliana landsberg
  unsure (1)..(871): unsure at all n locations
gaaagctgacaatagtaatccctataatgacttcaatgacagctttcaaggttctctttgtaagcaacttagtaaaaagacatccctttagtaattgttccaccttcaaaactccatcatcctcctgcagttaacacttcccaatttcttaatctgatcaaacatgtaaaaaatgttatgagaagattgtgctgcacttacggctatgtcctctccttgtgactcggtgccattgaagctaaatttgtactgtttcagccattttnnnnnnnnnnnnnnnnnnnnnnnnnnnnnnnnnnnnnnnnnnnnattactgtcgaaatcagcaagcaaagtagtggcaagctcatttatatcacacttcactctccctaataccccaaagtccactgtcagatcttttaactctgatacttggatctttccgtctttgttgacatcaaactttttgaacaaactgaataaaaataaccagtaagaatacagaaacagaatcaaataaaaagagcgtttcataaaattagaataacaaaggaaaaaatgtagaaacaaaccttttcaagctctcttgacatagttgtccatttcttataaggctttgaggcgaaaaattctgcaagtgcttatgaacttctgacatgagctcaaacttcgcgtattctaggctcttcacttggtccgctttatcaaaatactgcgggttttgaaaaaaaaaagattaggcacaaaaatatatgaatcttgaagctttacatcatttttttgaaggtgtgaatcattaccaaataaacaaagtagagaacagttgcagaaccagagaatatgagtgtgaccaaaaccatattgtcatcccaagattttatgagaaatg

SEQ ID NO: 7250 - DNA, 1314 bp, Arabidopsis thaliana landsberg
caaacgacccgttatgacttctatctcggtttgattttgatttcagcttttgttgctatgtgatacaacttttccaacactctaccaataaatggtccctgcagtacacgaaggattctaaatactgcacttccttttgatttcggtacaccgaaattatattttcaaccaactcgtgaaaaatactcaaaacaaattgataaagatttactagtctagtcatttttgtagtcattcgaaatgctattgatatgtaaaaattcacaatgcacaatgcttgtgggttatatatttaataaataagtgcaaattcctacgtaaatttatatttaaacagatatcgttggacgcaattgtcatcaagaagtgttagaagatctcggagattacgagatggaactggacatatttccatattgttatatagacaagttaatatttgtgtaatattgccttattgttaattaggtagatttaacatatatatgtcaaaaacatgctaatcaagttataactttgtataaataagtctattagggctaataacttcttcgctatctcaatatagtcctctctttggaaatttcttaagcttttccatagttttctagagcgatggccgcgaaggtacacccctttatctcgttttatctatctttaaataattatgcgttgattaatcattctatatttatatatgtactatttaactattgttaatatagtaagtcgattatatgcaaataggcatacttatctctggtttgaaatgtcagaaagctgtgttgcaattgggtatccccgaggagaaaatcagaatgaaagtgtttgtgaccgttgcaggatttacaggtatctttgtaagttacttttctaaatttgtagtattgatattgtgggggaaaaaaagtttattcatgaactttaatttttagtataggtgttacttcgataacaatagatgacaaaaccgggaaactgacggtagtgggagacattgatgtaccaattatcgtgatgaagctaaggaagctatgtaagacagagattatttcggtagatgctgttaaaccacctgagaaaaagcctgaaccggagaaaccggctccacctaaaccgagtgaaaagattgcatctccggttccgatgaacttagcagaacgagtacaatcctgcctatgcctattcttctgattcttaccatcaaccaaatacttgtgtgattatgtgatttttctagagttatttcactaatcttaatatatgaacacataaattagttaattttgatggaagcgtactgtatttctgtat

SEQ ID NO: 7251 - DNA, 742 bp, Arabidopsis thaliana landsberg
tttttttacatttgaaaactattgcaaataaaccccaactttattttttgattttgtaatgacagaaacgttgtgttgcaattgagtattcacgaggagagaaccaggaagaaagcgcttgtcaccgtttctcgattttcaggtatcttttataaaatttacattagaaatgtataatatgatactattgggaaaataaacttgtattaaaaatttgattttcttaataggagttacttcgataacaatggacaaaagtgggaaaatgacaatagttggagaagttgatgtaccagctgtcgtgatgaagctaaggaagctatgtaacacagagatcgtttcagtcgatgatgttaaaccacctgttaaaaagcctgaacctgagaaaccagctgaatctattgcatatcctgttccgatgaactacgcgtaccaattcaatcctgcctatgcaaattcttactatcatcaaccatacggaaattgtagagtggtagacgaaccaaattgtgtgattatgtgattgttctagtgttatttcaattaatgttcagttatttaacacttatagttttgatagaaatatgtaattttttcttagatactgttgtaatatgtaattttttgtcatcgttgtaatatacatttctcttgccaaataaatcaattttgtatgacaaaattaatcttaatacgctttattaacttttactcttaatcatttagtagtaataattagttt

SEQ ID NO: 7252 - DNA, 1520 bp, Arabidopsis thaliana landsberg
tgcaagcttcaaaaatcgtgaacactaagagagtggaagatctttgtgagtgtaaagattgtagaacatgtaactgcgtagattatgaagcttttgttgtagcttgtgcgttactcgggatttagtttgtaagaataaaatttaaagaagagatgattcaaagaaaccagaataagttgttgcagtaaaatgtaaaaactaaggaccaaagttcaaagaaaatgaaaaacaaataacaactgtcttataaaagactatgaaacgatgatgttgtctcaacgcatggtcacgtccaagaagggcgagaagcatatccttgtagtcaccagaagtgtcattagcaatggctcgatcaagaggaacactgttcctgcgtaagtattcttctttgatccgctccaggtcgacctctgctcttgtagtgaccactctagtaagtgcccactcgtctgttcccatcctgttgatggctcgacgtagaaccttctcaaagtacttctctggatatgtcaagcatttgatcgcggttttgagtaattgaacataatcatcgttcgaatcttctttgagaaacttgttaatggaacttccaaacttgtccttgaagtgattgagtgttgcattgatctgtgctttgctccttgttgtcaagattctgatgagatcttcatcagtgtaagccttctcagtgatcttcttgtgaagtgtcttagcttcggatctagccagcttcacgttgacctcatcagcatttccatcgtacctgaaggtgctcacaagaggaaccaatagctgcatttttacaagtggtcaaaacaaaacaacatatcatcagaaacttactagttggtttaaagaatgatatacataaatctttcactacctttcggatatttccagatgtatggtatgcaacatcttcctcgagagaggtcttgtagcgaacatggtatgcttgcttggtcttgaaaaactcaagagaaggtctagtacaagcgatttcaactaggacccaaatgtttttggtgaacattttggtagattcattggccaaatacgcatctctctccgttggatcaagagtccacaacatcacaactctctgttttcaagcaaagtaagatgttcaaaataagatgaagaaatatagattttgtatcttttagttttgacaaacctcaaagtcaccagaaagctctccgtctaattccttgagaagatccttattgtagttagcagcataaacggcacgaatgaaactgcgttgcgttgcgtttctatgagccaaaattgatatgatcatcccttcattagttccccatcctgcgccacacaaaaacaaatttcaaacccaagtttagtcagatagagagtatgtaacaaaacctaactaaaccaaaccaaaattttacgacaattagaaattaactgtaaatatacaagaaagctgatgttcgctagtagaaaaaaaaccaagcttgaaaaaatcttagaagattattagaattttttttttgggt

SEQ ID NO: 7253 - DNA, 1182 bp, Arabidopsis thaliana landsberg
tatatcttaaccagataaacaaatgcatttgttatttttgtccatatctgatcttgtatctgcaattttttttgtcatcagcttaagaactttgaagaaacaagacgatcgttaaaagaggcgcctctagaagaaaaccggaaacgagagctatcaagtgcactccatgtttatttcaaagactggctttacggtaagaaaactttctctgaatcgatccctactttactttattgatatgcatcattcattaggttttgacttagtctatgtttttgttgcgacagcatctggaaatataaggcaactctactgcctacaaggtgactaataagaataatagaccaagcggaaagtgtcttgttcatgtagagctccttcgatcatatttggcatattgctagtgaagaaaccccaccccaagaccaaaagaaaaaagaaaaaagagaaatcagcctgattcagtgatttgtagtttggaaccaatacttcacaacgtaacttatctgcacagaaatactctcttaaagctttcgtttagattattgttttcttgatttctgcttttctttccttgacatttcaatccatcgtttttgttcccttctctattgaaaatctcatcttcaaatagagcatgatgacttgaattgttataagttataacttgtaagcaaaactgttttgatagatagtcttgtcttggtcaaatagatttaagtggacgcaagagttaggctactaccatggtaggtgcaaatttctgaagaagttttagagctccaaaatttctcatatttgcagaatctcatattcgtagaaacatccaaacaatgcaacataacatgaacatctcaagatacaaaaacagaaggacatgggatggaacagagatatccatgagcgcaggatccagctaataatgagttcttgctactttagtcattgtaatgtgtgctccattgaagaaatctctcttagctctaaagttctgcaccaactgttcaacaccaatgaacacctccaatggcagcaaaagtcagcccgtggcttcccatcatcttcaacgttctgatgagtcctggaagagcaacgtttctttcaatacgagggacgtctttccagttgcaaaaccagtcacagcatctttgaatgtcttcatcatcgctccattttcctctt

SEQ ID NO: 7254 - DNA, 1520 bp, Arabidopsis thaliana landsberg
tcccttacttctgtaatgtaaaaaaataacctttctcagctttctatacaaaacgtcaaagaaactttctcagctttttctataaagcaatgttaaaaaagacctttatcagctttttccaaagactatatattgttttcgaaaaaaacaagttttgactgagaatagtgttgggattgaacataaagactctgattggttatggaaaatattcatcaaataaacttagcaaatatcaatgaacgagaaaaataaatcttgagaagacattggtctttaaccaaaagaaagaaaaaaagaagaagaaaaagatctgaaactaaatatgcttaattcaacacgtaggtaccataataatgtaaaaatagtttacaagaaattaaatcttaggaagtgaaaacattcatgtttgctatcaaaatatcatatggttttgacagtaaattagttagttacgttgtggattcgtttttgtcaaaaagaataagaattcgattctttgtttgcatttacgtttatatttttcaaaaagtgagtttattgtaaaactgaaaaacgttttgtatttttaacaatgtaaaagaaaattttaagtacacgcaaaaaaggcttaaaataatagtgtgttcaatcttcaatgtaagcaacatttctcttgaaaccacaaacaaaaatcacgagagggaactatttgtacatcagtattcagtagcactgtaggaatacgtatcacgtgcatctaggctatctctttattccccacaaagcaaaaaaagaaaaaatccaaactaatcactacaaagtacaaagcgcaacgcaccaaaatatccatcttttcttttgtttgtgaacagttccatctattgtctccttttccagtgaaaaccaatatgtattgggtctgaatggaagaacagaggagttacagagcaggacaaacacaattgtatcttaataaaccaatatatccagttattcacctgtacttgggtttgtcctactacaataatagatttgcatttgaatgcatttaagtatattaaaaagtggtttaactaacactattactacaattatccaaattatacatgattctaatatttattctttctattttctacttctatgttaaaatgtcttaattgtcaaactatgaaatccacatctcactttgcgctgagaccacatctttttttcagcataaacgtgaaaatttctttagattatattaactgcatataagtataacccaaaaaagaaaaagtataaccctaattccagataagttaatatgctactagtcgttagcacataagaatttatagcattaggtttaatgtcttgcataacacgtaataaaatctacctctattgtaactttgatagtctctcttaaatgggtcatttgcttctgaaaatccttatttacaaaataaagtacaattcttcattcaaaagataaaaaaagctcaatcgtttggtatcataatagcatatgtccctttgttaaatcaaagact

SEQ ID NO: 7255 - DNA, 1768 bp, Arabidopsis thaliana landsberg
tgttttactcttctaatcttaagcacttaccttaatgagacacacatattaggattggttgcacaaggccgattcttatacactgtatacccattacaacgaagcccattatcaaccctatatagcaatctgcaagacaaagatccaaacatattgaataacaagtaacttttttttttctcggtccaacttcatctggaataagaagcaacttttatctgatttatatactttcagtgaccatctaccttagttggtttgaaaagaaaatagttgtttattcgttcatgttcttagaagttctaaattttgatcatctcttatttgaaagctcaactaaaatagctatgatatcattccctgatgctacgtactaggtttttaaattcatacacacacaaatctataattaaaacttgttaaattcatacacacaaaggacaaatcttcttcgtattaaaaaagatggaggctctggaacatctagtggtgccgtatcacttacttgactggttcaagccgtttgtctttgtttggaagaagtaaatttaattgtgggagagggatttcacgaatttaaatctgtttttctcccttttcgtggtatactttggaccttttggatatgaacacatatgtgaaaacgttaattcatgtgtttgaaaagtaattaatcgcgccgtccgtcttatagctttgggatgggccaataggatatttaagagataagaaaactaatcagaaacacagacgaaggtatctcactctctctctttctctctccatgagaactctaatctctcaccggcaatgtgtgacgtcaccgtttcttatctccgccgcatctccaccgtttcctggccggtgctttaagttatcctcctttactcctccacgtcataggcgtttttcttctctctcgatcagaaacgtttcgcatgaatccgccgatcagacttcttcttctaggccgcgaactctttatcctggtggttacaagcgtcccgaactcgccgttcccggtttacttctccggctagacgccgacgaggttatgagcgggaatcgtgaagagactcttgatttggtcgaccgtgctttagctaaatcggttcaaatcgtcgtgattgatggcggagccaccgctggtaagctctacgaggcggcttgtttgctgaaatcacttgtcaaaggccgtgcttacctcttgatcgctgaacgtgttgatatcgcctccgccgttggtgctagtggtgttgctctctccgacgaaggtaacaactgatttcattcagttttagcatttaatttctcatagagtgagttttgtctctcaatgctatgtacaggtcttccggcgattgtggcgagaaacacattgatgggatccaaccccgactcggtacttcttccactggtagctcggattgtgaaggatgttgattctgctctaattgcctcaagctccgagggtgctgatttccttatacttggatctggtgaagaagatacgcaagtggcggattctttgttgaagagcgtgaaaataccgatatatgtgacttgcagaggcaatgaagaagctaaagaagaattgcagttactgaaatcaggtgtttctggttttgttatttcgttgaaagatttgcgttcttctagggatgcagctcttcgccagagtcttgatggagcttatgttgtaaataatcatgagacacaaaatatgaatgaactgccggagaaaaagaattctgctggcttcataaaa

SEQ ID NO: 7256 - DNA, 1872 bp, Arabidopsis thaliana landsberg
gatcattgaagtggaccttggcctactataataataatagacaaattgcattaagaaattatcaaccttatagtatcttatattatcttaatggcaacgagtatttcgagccccataatttaatttatacagtcaaacgcaatagaagtgttatccgttaaacttgagtgtatgaccaaaattttttaagtcacatccaatctagtggctctgccaactagagacgtttttatcccgagatttgtttagcaccgtcctcctttgccaatgatcagtgttttgacattttcctcttaaataatattaaagaccaatcagtccaaacttttttacctctttctttttctcatggaattgattttgctgtcttgatttagacaggtgttggaagtcttattaagggaaaagtaatataccataaagataccaaagcagtcgtaatatttgactttgaagtcgtattcaatgggtctacagccagagagaaagagataattgtgaagcattgagagcaaatagagtatacaaaaacaaaagcgaaacgataactctctatttgtttcattaccaatgattcgaggattgcttttgggaatcatctggatgatattttgtgtttgttcatcatttcagcaagagacgccgtttgtttacaacaactttggtcaagtagatcatcttcaccttgacggtagtgcaagaatcattcccagtggtggtatcctgcaactgacaaatgcaaccaatagccaaataggtcatgttttctacgagaagccgattgagttcaaatcatctgaatcagtctcgttctcgacatattttgtgtgtgcactgctccctgctggtgatccgagtggccatggcatgaccttttttgtgtctcattccactgatttcaaaggcgcagaagcaactcgatacttcgggattttcaacagaaatggttctacttccacacgtgtgttggctgtagagcttgacacttctctagcttcagatgtgaaagacatcagcgataatcatgttgggattgatgtgaacagcgcagagtctattacatctgccaatgcttcttatttttcagacaaagaagggaagaagatagacataaaactcttgagtggtgatcctatccaggtttgggtggactatgaaggaacaacgctcaacgtttcattggctcctcttagaaacaagaaaccaagccgacctcttttgtcatcaacatccatcaatctaactgatattttgcaaggtagaagaatgtttgttgggttttctggctcaaccggatcaagcatgagttaccagtacatactcgggtggagtttcagcaaaagcatggcgtctctgccgaacattgacatctcaaaacttcccaaagttcctcactctagcactaaaaagaagtctacatctcctgtgctcagtcttctgcttggtttaatagctttcatagttttggggattcttgttgtagcttatttgtataggagaaacttgtactctgaagtaagagaggaatgggaaaaagagtatggtccaattaggtattcctacaaatctctatacaaagcaaccaaaggattcaataggagtgaatttcttgggagaggaggttttggtgaagtctacaaaggaactctccctcggagcagagaactgagagaagtagcagtgaagcgagtatcacatgatggtgagcacggtatgaagcaatttgttgctgagatcgtgagcatgaggagtttaaaacaccggagcttggttccacttcttgggtattgcaggagaaaacatgagttattactggtgtctgagtacatgccaaatgggagtcttgaccattacttgtttaatcatgataga

SEQ ID NO: 7257 - DNA, 389 bp, Arabidopsis thaliana landsberg
  unsure (1)..(389): unsure at all n locations
aacaaaataaaataaaataattangaaacatatctttttctcttttttatacgaaacacatcttatacgggtggggttaatttcacacactcattaaccacgaacccatttctaaaacatatataaactcaaccttccaacctacccctaaccaaaccaaaattaaaccacctttcttccttaacttctcttttttcagccaattttatttcacactatttgcctgtttaactttcttttattaaaattttatacctctttaaacacactcattctatatatctaatattctaatcacaacaacttttttggccctttttattttccaaacacaacttttttcattgagcacttttctaagaactttttcctaatacttttctaatcca

SEQ ID NO: 7258 - DNA, 1032 bp, Arabidopsis thaliana landsberg
gttcttagtaaatgagagcaccatcaaagacaacagaaatgtcagtacaaatttgaaattgtttttaaaccttttgctcttgctttctttaattattgtgtcaaaccatgatgtcttgcatgtcttgaccaactcgtatcttcattggcaggttgattctattataaagacccccaaaggtaaacaggtaaaagagaacagcaattctttgggccagttgaagaaggtcaaaatactgaacgaaaacctaaaggtacaatcaaatcagtacagcatgtataaaatttagtttatggtcattctgaggtgttgcctgttcttttggtctaaaccaggtattcaaggaaaagaaatcggcgagagagaactttgtttgtggagcctgtggtcaggtataattacttattagactagattttgaatctaaacttacttcgtagagaaaagtgtttaatattatcttcatggccagcatgggcacatgagaaccaataaacactgcccaagatacagggaaaatacagaatcacaacccgaaggcatagatatggataagtctgccggaaaaccgagttcttcagaaccatcaggtctgcccaagctgaaacctattaagaacagcaaagctgcgccaaaaagtgcaatgaaaacttctgtagatgaagctctgaagggagataagttaagttccaaaactgggggtctccctctgaagtttagatatggtatccccgctggagatttgtcagataaacctgtttctgaagctccaggaagttctgagcaagcggtggtgtctgacatacacactgggattaagtccacatctaggatcagcaaactcaagatttcaagtaaggcaaaacctaaagaatcaaagggtgacatctgagagacgttcacattcattgatgcctacatttagcagagagagaggggagagcgaattacacaagccttttgtctctgacaacccttggttagttcagagagaaatcaggcagcctcaagcaggcccactatttttattcc

SEQ ID NO: 7259 - DNA, 1768 bp, Arabidopsis thaliana landsberg
gcttgcccagaagcacaagatgcatctgacacgtttatatccttgatgtgtgacctgatatttccaatcttctcaacaatcatgcttatgaaccgggttcctatctgcataaagtgaagatatatattttaggcaaaagatttgagtgaatgaaacaaagagccacggtatactgattttaagggtacctgttccttgagatattctaccatatcttcctctaagctctctgcactgcccctttttttctctaatgcaaatttccaggggccaaatataaacgtggcaacaattatgatgaaatccttctgccaagatagatgagatgcatgagcgttcaagatgaaatggtccacgccgcttagcttaatactgaacattagggattagctgtctgcaaacctgaatatactcgggtaaatgccgtgcaacgctccactttggttcaatagtcacttcgtcacctgaaatttcatctccggtagctcggataccagcgtagttatgctacaatgttaaggaaatggtttgtcacgataagagaaaaatatcatgaaaaaggtaacacaagaactcatgaaggtagatggaaatttagtagattttacttctcagttgtagttcgtttaaccatgtagttgaaaagataatacaagagggaagtataagacataagaatgccaacctggtccatgaaaagtaacgagtgccagtagtgaaccggctcaagcaagatcaacttaaagatatctctgtcggtggcaaagcataagacatgaaaatgaggtccattagagatttagtcatacaagtatatagtggggaatgaagaaaaccaacctactccccatcactgtgagcaagctttcacaataagtcttagcagcagatagatcaaatttccctgtgtcaataatgacctttgagaagtctgcgtatattattatagcacctaacctccgcaaatcagtcaaaagcagcgcaaacaccttttgcatgacctacaatattgagaaaaaccgcaatatgtcaaatggattaagaaatcttgaatgcaaaagacgtggatttggaaattatgagttatgacagggattctgaagcaaggagatataacttgtaagctacagattcgactaaatgagttggtagagaaagattcagacaagccatttataccatattaaaagcacaaaacagtaaatgtcatttaccttgtgaagcatgagatggagagctggatcgtgaagctttgaggaagggctacgtaaaatatgaaattactgattggtatctaacaattcaagaataaattgaatatgatataatgatacctgcggagccaccaagacagatgttgcaaaatggaatcagcatatatattgccagaattacacgcatcatgcaacaagcgcttgatcaattgtttcaggacacgaaatgcttgcgcacatccattattctcatcaaaaatgccattatcgtttaagctacttcctctagaattcacacccaaaaagccgcctccttccatttcactcaccaggtcacttttcagaagggcattaacagctaatctatggacctgcatgatgcatatatgttgtttaggataaaattccaaaaagcacgcgcgattaaggaaaaagggttatatgacctttaactccacagagacttttctgtacactccagggaatagcaaacttgtctgttgtaactgtaacaaagaaaagaaaaatccacataaacgaaaaagagaaaaaat

SEQ ID NO: 7260 - DNA, 1064 bp, Arabidopsis thaliana landsberg
aagggcactatcaagaaacctgattaaacaaaaactaatgatggtaaattggttctataattttattaaccatcaaggtgaaagggttctactcatcagttataattccttggcccattctggttttactggaatagcatgcattgtcactttttcattttctctctcgttgaggagttggaattttacaatttacaacaagttttgccaggtttaacaatcagagattaaaaatacaaaaggaaagtataagaaaaaagaattccaacctggtccatgaaaagtaatgagtgccagtagtgaaccggctcgagcaatatccactcaaagatatcactgtcagaggcgaagcacaaaaatcatggcaggaaaatgagtgcagtccatgagacttaaggtcatagacatgtatatcgagcaaggaagaaaccaacctattccgcaccgttgatagcaagctttcacaataagccttagctgcagatagatcaaatttcactgtgtcgataatgacctttgagaagtctgcatatattattatagcacctaatctccgcaaatcagtcaatagcagtgcaaacaccttttgcatgacctgcaaatagacgaaaaatgtaggaagtcaaattggtttacaattcttaaggcaaataaaaactgagtgtaactggcaaatctcaagatctgaaggtgccttgggaattatatatattatgacaggcataagccggcaaggagatataatctgtaagctacagatcccataaatgaattgattgggaaagattcagacagaaaagcaaggaggaattaatataaagtttgctgatttatccacacttactcatttagacctgataaaaaaagagcaaaaagcattaaatatgatctaccttgcgaagcatgagatgaagagctggatcatggagcttcgaggaagggctacaatatgaaactatagattggcatgttatgagtcaagaactaaatgaatatgttacaagacataatcactcctgctgagccaccaagacaaacgctgcaaaaaggaatcagcatatata

SEQ ID NO: 7261 - DNA, 1602 bp, Arabidopsis thaliana landsberg
aatatttcgtggcgaaaccagagggggaggatgcattcatttgtttctgcagtgatggcattagcaggttggttggttagtccaaaaaattgtgcaaagataaagtgaagtatatgacctgtataatgtctgttataaactatatcatgtggtttaaaattagaccaaatgaattcacaacaaaatcaaattggcctcaacaaatatttccagcttttaacattaacaagactctacattaccccaaaagaagaggaggattcttttagccatagcagcaaatcaatttttttacttccaccaccaaaactgtcgaaacaaaaacatcttcctcatcctattattataagccatgaaagctctagctttgactggatcaccattcagatactcaaacgcatacatctgttttgcttcttccaattcatcaatctccatcactgctttcaacaattcctctgtgttaatcaaagttttgctttgaaccactgcatcagctaggcggcgaatgctagaagcaaccactaacattgcttcttgacaaggatccgagtttcgagaacgtttagaaggtcgtcttaaaggatctcgaggaggaggaagatcttgagactcttcatgcatatactcacttgctcctgcgtatgactctgttccatctgtatcgctatgttcttcagaacttcctaaagggaaggaaacagagtcttcttcaaattgttttacgtcattaagatgatgactgctttccttcttcactttgttatatttacctggagtttgatagtcaccgcatactgttctaagttcttcgtacatctcaatttgctttcccctaaatgcttttgcgtctgggtttacctattccaaccatttttaagtttgataatgatgcacaaaagaaggatgatctcttagtaaaagagaagggataatgggacttacagcaatatatcttctccagagctcatcactttcgcaatcgatcatttttgtgctcgagttccaccagaatccatcccggctaagtatgtctctcataactctgtaccttttcttgatcgtcttgaggcgattgatggctttctggctagtcaagttaagattgaaacgagtattaaccgcatcacaagcagcagtgtaagctttatcgttgaaacatttgtcaactttgttcccgtttttggcctggacagccaaagcttcaatcaaacacttatccattccaacagaccatataacatttctccccttatgcttcatctcttttctctctactggaatcccatattgatccattcctggttcacgttatgtaaaaacaagagcaacaacatttcagaaaaagtagaattttacgcatatatcattataccataacatcacaatagaaaaagcttggtcgttctcacagacataaacgaagctctataccattttcaaaatcgatcgacctaaactcgtctctcttccagatattcgaagaagagctctgaaactaacttagctaatgatttttaacaaagaagtcaaatcagctctcagtagtagaaatcaaatgcgtataccttcacagaaacgaaatcagattcacggtgattc

SEQ ID NO: 7262 - DNA, 1795 bp, Arabidopsis thaliana landsberg
gatcgactgcttatgccttcttttacattctgttgagagtctggttacaaagcacatgtcccacatgacatcaatcataggaagattatcatgactcgattgttcctaataaactggaaagacaaacaccaaaaggaactagttctgcatctacaagaagttgttccatatctgccaatccagctacaaatatctcataggaagggagtgacagagtaacctgagctgatgaaccggaatgtgatcaaaactgatatttggtgataaaattcatagacaattcatctcgaggatattgaaagcattatagcagagcaccaatatagagataaatgcacttagtttcaaatttaggtcaatttttagtccgtttcgagatcattatggacgaagactcttgtacttgtgatcattacgcttggtccaacactcttagagccaacttgcaatcacaaatttaaccttggtgacttcaaaacttttctagtctcattataagctactaattagctacaaagagtattgaacatagtagatacatagatcgaaacaagatttaaactaaactaaatttatttttcttaacacataatttacaaactattcacactctttctcttcgcttatgttctgtttttttcttatatgtttttatgaccaaaactcccaccagttagggtaattgctgctagattggtctaagagagaatcagaattgaaacctccccaattctcagaagatgtcaagcaactatcatcagctttctccacaatgttcatcagctcatgatcagtctcttcctcgaacccaaaatactctgttttaatgttgttgttgtaatcaccatcattacatagaacactcccttggtctaacctcccttctggctcactctttccattatgcgactctgtgctgctgcttagagccagtccttgatcaccacaacactcatgatgcttttcttctttaggcctttgcatctcttcgtttagtctctgcagctgcaaatagagattgattaatatcaaattaggcaaaatgatcgagaatttacatcccccaaaaaccaataaatgccaagactgtatttgctattttatactttataaaaaaaaaaagatcattatcaattattgtttctatcactgttcaattaaagataaagatatcgatagaatcattatgtacctcagagaccagagattgcttttctttcttcatgatttcaaattgtgaagccaaattgttgtaattggctctaagagtgttatactctttctcaagttgcttagttttccatcgagccctcttgttttgaaaccatatagccacttgtcttggttgcagccctagctctctagctacctgaaccttcttcctcggctcaagcctcgtctcagactcaaatataagctcaagtgacttgatctgttcctcgctaaacctcttttggttattgctcttcttcatcttcttcttattcatggtcatgccactactaatctcgctgaaacagcagttgaaaaaatctccttcttccatggttttcaccagatcttgtaagtttcttgattttgattaagagagaaggttttggaattatttgtttcttttttttctttctttctggaatctctgagttgctgatattggccgcttatatataatgtgggagttactatgtgtgcttgtgtagggctcggatttctattattttttatatttggagatttcatattcaacaagacaaaataactcattgaataaaagacctgcaaatatgtggaccac

SEQ ID NO: 7263 - DNA, 622 bp, Arabidopsis thaliana landsberg
tacttatctcgaaccagctttgcggagtatgaactgtggtattgggctacgtttggtcaatgtcgacacttcatcatgcagctcttctggcgttctcaagtatcttaacctcaccaccatctccctcattcagatcctagggttcaaagatcatgatgggatttaccgaagagatcaaaaccttttgctttgggtttcaaagctatccttattcgactatagaaccatagtctcccaaatcattgttattgcactgtcttgggtaactcatctcactccactgagaagcatagcattgattccttcttcaacgtcaaaaatgtctatcgactatgactactttaacgtcctccgattctgtcgaggatgagctctcgattcaccgtgatctcacttgtctcaatgtgcctccaagcccttgtcgcatagctctcatggtttcaaaatcgatgaacctctcttttctttttatggcattggggaatgcttgttgttctattgttctaaactttggtttgtttgaacctttctatgtgtatttgttcttctttgaatgaatgaaaacatggtgtttgacaaaaaaaaaaaaaaaaatattgaattaagtgttaaaaaaaaatta

SEQ ID NO: 7264 - DNA, 3218 bp, Arabidopsis thaliana landsberg
aatcttctttgcttccctttatttaccataaccacaattctcatctaattgtcaaaccttgatcttcaactcaaattgaagctaaaccatgttcttaaacttgacatgtgttttaaataaataccactttgttaacacagtttttaatcaacactatattctgccagactgccatcatatcatttttgcaaggaaattttctcaatatgattatctacctaaatgatactatattttaacatataaggttacgttttgattctgtagtttatggaagaatccttataatattattcctaaactaccttccctgttttatttctactcaaaaaccctttttttttttttttttttttgtaaatctcactttcttcttctctcttcaggctgtgaatattctgatttctgactaagctctctacaattctctctcatggcctcttctctcgacggtaattttttttttgggacagtttttagaaatttagtgctttcgctttaagaggaagccttggacttgttaaaaatttttttttctttttcaactctggatgatcggcttatatatagcgatgcttttactcataatttactagtgaatttttattatcgtgttttacttttcaagatcaatttgttgtttgcttaatttggtaatggaaaagtcttttgtcaaaaaaaaaagctattggtgggtcattttactattagctattggtgggtcattttacttcacgcaggagctgcaagtaactctaatttgagtgatgataaaaagaaacgaaggaaaaaccctaagcctcggcacttaagttcgtatgggaagcgtaataacactccagttcaaccctcaggtaaaaacatgtttcacacaagttatttttcatttacactatttttcagtttctcacacattatattgcaacaattttttcattagaaactgaaaccaagagccaaggcaaaagagtttgcttcaacaactctgatgtaagacagatgaagcaaaacacttcttctagagaaaatcagtttggcataaaagaaactgtcttggagaatttccccaacgtcactcctcagtttatgtcagaccaaatcaatggccatcaagataaacctgagaaggcgaagaagaatccggaaagctatggtttagggcttgagcaatgtgtgaagatcataagaaagcttgagtgttcaggttatgttgagagcacttttagacaaaagtttttgacttggtttagcctacgagctacgagtcaggagagaaatactgtcacgacattcatgaatgctttcaatgatgattcaatggctctggctgagcagctcgttgacacattctctgattgtatatggagcaagggttctgtgattggcgatcgcgatggaggtggcagtagtggtgtctcatgtaagaagccgcgacattgattagaagagattatgtaggcattctttgcagttttagtcttttttttattttttctttgggatcacgtaaaaagaattcaacttttttttttaatcttcattagcattttcatggacatcacaatttggtgctggatatggattttctctttttctagtgtgttggattttttttcttccccgattgttgaaagttcaagataataaccatatcaaaacaagctatttgtaaagaaggatttcttaccaaaatatccctcgcagattggctataactagctaatgagttgtgaaaggaaaaacaatcctcgcaaatcagtcctttcaaactaaagaaactcacaaagctctttcaaaatttgcaaaagtgttaattagcaaatctcttgcaaattttgactagcaaatccccatgaatattgtgaaggatttacgacttttatataatttcaatttctttttaaaagagtttggttttggatttggatgagtttagaattgatcggttgctttatcaaaattgtgttgatcatctttagaatcttggaaaatgttataaaaaattattaacgaggttttgaaaattatgttgctatctttattacgccacataaatatcaaaatgtgcgatgtcgagtataccaatgcccaatttcacatttagcatatatacaaatagtataatatttgtataatgttacatatactacaattttcaaaaaatgatacataatttaatttataatacacaacgagtcacgacgaagatattgctctgcacgactccaacgaactagctagagtaaaaaacgttgctaagtcttacgtggcatctcccgcccaacaattcagcaaagttagttattgaatgctgtttagttattctcagtaatgcgatagacccaacgaaactatagacgaccactaataataatacacgtaagcaaaaatcgagccactaaacaatcacgtgaagaaacacggatacattgagtgcaccgttacgtacacaatcaagccaattataaatgatttaatttaattgtctgttcactccccaagatagatctatccaagagagacacacattcgctgcttttgactcacttttttaatctttttggattttggtgaaaaagtttaatttgtctctttctctatttatctccggcgtcaatttcacggcggctacacgacggttatcgatgtcattgactgtaccggaattcgatttcagagtaattcttctctctttatctatcattctctctcactgcttcacgaaatctctcttaagcttcatttgttgtgtttgcttcttttatagttgacgccacagtttggtttctcacagtcaccgatcgggtgagttttctcgtcatttaaaggttttttgttctccgattagattcgatttttactctgtgtatccatcagggagcgtaatttcgcgcatgttgataatctggagacctgtattaagtatttgaatcagagcttagtcacctatggattctctgcttcgcttgacctcttcgctaccgatcctgtgcgttttaatcattctctaattgttttttttcgtttatcgatttgtttgatgaagctgattcgatgaacttgtattaggtttcgattgctagaacttgcaattgcgtatacgctttgattcaacacaggcaacgagatgtggaatttagagaatctgctaatgatcagagacaccggtgactattttgttttttttatctgaatgttgatttttctatgtgcattct

SEQ ID NO: 7265 - DNA, 850 bp, Arabidopsis thaliana landsberg
atcctcatcgatggtgttctctacgttaaggttattatcttcgtttcagattccagttttgtatacagtttcctgtttgcttttgttgatatgtcattgtcttgaaatttttttgcagattgtggatcctaagttggcttcttatggcgttgagaatccgatctatgctgttatgcagttggctcagactacaatgcgtagtgagctcggtaaaattactcttgacaagacttttgaggaacgggacactctcaatgagaagattgtggtatgttctctctctctatggcttgagtttcgtttcattttgaaaactgggattctttgatgttcatggtcagtgatgttaatgtgaaatttgtagttcagattgtttaattgtgttgttcatttcacgatagctggctatataagttttgttagataagagtattgtagtgtatgtgttgtggaatgtattatgcttttgtagtgtatgtgttggatattggaagtatctgaacattttgaaatggacatgttcttgcaggaagccatcaatgttgctgcaaaagattggggtcttcagtgccttcgttatgagatcagtgagttatttttctgttgactctttgctggtgttagctagatacccttttggccttgtatctaatacatgtatatccaggggatatcatgcctcctaatggagtgagagttgctatggaaatgcaagctgaagctgaacgtaaaaagagagcccagattcttgagtctgaaggtaaaattgcttgcccagtatccgttctgggattgaactatgtgcaagctacagctcatttcgttcagattcttggctcaatttgattct

SEQ ID NO: 7266 - DNA, 515 bp, Arabidopsis thaliana landsberg
gagatccactcaaatgagcggagacaacggcggtggtgagaggcgcaaaggtttctttcaagtggtttgatacccagaagggtttcggcttcatcactcctgacgacggtggcgacgatctcttcgttcaccagtcctccatcagatctgagggtttccgtcgcctcgctgccgaagaagccgtagagttcgaggttgagatcgacaacaacaaccgtcccaaggccatcgatgtttctggacccgacggcgctcccgtccaaggaaacagcggtggtggttcatctggcggacgccgcggtttcggtggaggaagaggaggtggacgcggatctggcggtggatacagcggtggtggtggtggatacggaggaagaggaggtggtggacacggaagccacgtctggtgcacgtgtcgtgggtcggaccacatggcgagcgactgcatatagggcgccggtagctactggggatgttgaacgaaattgggtcagtctgctgtcatgtcaaaccac

SEQ ID NO: 7267 - DNA, 1437 bp, Arabidopsis thaliana landsberg
catcgaaacaaataaagtaagtttgttttacgtattatcatttttcaagtcttagcttaataagcaggggtgggaatatgttgaatgaaaagtatagcacatatagtttgcttatgctttttactatacatttgtcacttaaagataccaaacagtaatcataaaaagcgaattaaaatactttctcttgtttgttttcatatgaaccacgcacgtgcgttttaaaaaacaaaatctcaacattccaaatgtaccaacaaaacaaaatctcaacattccaaattattccgcgtcacaaaacagtggcattctcgtagttgtttcgaaagacaaggggcataatataaagagaaatacctcaaactttagcgacgattcctaagcaaatgtcactttaccgaagaaacacatctctctctctcaagtttctagaaaaagagatttgttgacggagacaagactcttttctttttcacactctcgctaaaagacccattttttaatctctctgaactcttaaaaaaaaaaaacacacgcaaaaccaagagtcagagaaaaagattctcacgcgccaaaaaactccctcgccatggcgttggactccgttaagcatttgcctattcacggcgtctccgccttctcctccgtcaccgtcgaaatcaaaagctttttctccaccgtgaaaccaagaaaaacttcaactttcgtctacgctttcgtagtaactttcgttgccttgactgttttcttagcctttagtccttctcccatcacagtcgcactcgctccttccatttcttcctatgttctccctaatatcactgtctcgaattcatccaactcttcaccgtcgagtctcgattctaatttcaccacattgcgtacaccggcgccggaaaatctcacggcagttactaaaaacttaacctttgagtcccccgtcgcaaatgggacaacggacacaaatgctaaaaccatcactattcagttccagaccggtcatgcaaaggaaaacatatcgtgtcctgacaacaaaactgctcgagatttggacacacatggagcaaggaaagcacctctgtcggaagttctagctgtcaattcgactgcttctccgaagcgaaaacagagaaggaagtcgtcgctgagaaaggtgatcgagtctctgaagagttgtgagtttttcgagggagattgggtcaaagacgattctgatccgctctacaaacccggttcgtgtaatctgatcgatgaacagtttaattgtatcttaaacggaagacctgacgtggattttcagaaattgaaatggaaaccaaagcaatgttctttaccaaggtaattataacacttggtttcttttttttacatggtggcgagtgactggtacgtgagtctaataatccaatgatataagtgtgtgtatgaatatatgaa

SEQ ID NO: 7268 - DNA, 1997 bp, Arabidopsis thaliana landsberg
catcttggggagtcacttacaggagcctctgttccttttggggccaaggatcaagcaaaatctgttccaccaatatttccaacctacaggacaaaataggcagggaaatgtaagagagctagaagaaaaaaagcaccagttcaatgaagtaagtggctttgaatcgcaaaataatagagcacaaaagataaatgtatccaaagacttccactaaaatagtcattcaactgcattcataatcagaaagacctcactaagctctaaaacctcaacacagcatggacaaaagccaacataccaaggtcagtgctaagcattggaaagtctcattccgaccaataatatcgttccgcactgtatttatagccaacttcaaaaagtcatggttctcattgagcaagcaagatgtaacaatgtagccaacctgaaattatggatgaaaagttcaatacctgcaaatttggtagtgagcataaaataatacaaactgcaaatacaaacccttggatacaatgcatggttcctggttaagatttgctacgatgttactaagtaacttatgcgtctaagtaaatgcctccagtactttaccaggtccattcaaactgaataagttgcaagcttgtgaaatagtatctaaatccagcatccattatcttcagagatttttttttttgtttcagcttgctcactagacttgaatcaaacaaataccccacccccaccacacacacacctattatcttctcctacccttagaaagcaatatttcattggttacaaaacgttggcttacctgcttttctggatactttggcgcagatataagagaaactgcctccatatggccaaaatccacatcgtagcctagcatatgtatataaagcattttccagacatatttcttctttttgtatggtgttaagacctgaaaacataaaacaagttaaagtaagagtgcatgattaatttatttctaacattttaaaataagtttggtgttggtccaactggccacacatggatccactacaggccggctacagctctactacgtagagtatggaaccagattatctctccagaacttcttacagcaacaaagcttaatgtatttcgtaatgagcttttcaaaattttccgtgatctgtatttctttccttagaccatcactacataaccgaatttactgccaggccattcttttcttctagttcctaaatatcatcatatatttagtgtcttatatatcttgattgatcttctcccatctatggactttaaatgcagtaatgacattccaaagttgaaagcagtactagtgatgttacaaagggtagaataatggctaatctctaccgatctgagctagctatacaatactgcctgtccaggtacacacttagtgttatatcaaaaatttatagcctgaatccgataaaataagaaactacaggcttccaaaactatccactcggcaactctggctttcctaataaaatattcggccagtgattgcatctttctttcaactacattcttatataactccctaatcaacctcagaggaataggtagcttcatggagaaatctccaatatatctaatcaatacagaacctcggcagatactactccgtcactgaattaccactcaaaatgagaataaaacacaggcaaacaaaaatggagataattgagagtaaccttctcattcttgaagcatgtacgaatgtttccgagctccttatcaactcgtagtctctccgcttccttgttctgacaattacgaacgtcgctgataaatacggagagacctctcattccggtcatggtggaacagagtcctcagatccaccgtcctccaccgcctcacacggtgcagatccgaactcgcgaaaccggatctaactatgacagaaagcgcagaccacagctgaaggattagcaattcgcgagagctgagatcgtaaccctaatctagaaaccgtaaatgac

SEQ ID NO: 7269 - DNA, 687 bp, Arabidopsis thaliana landsberg
  unsure (1)..(687): unsure at all n locations
tgcattggctttgcaactgcaaaggataaatctcgggtatctggaataaaccaaaacctcagcggatactcgacactgaattacctctctaatgagaatcaaaacatagaaaatagaatggagagaattgagagtaaccttctcattcttgaagcatgtacgaatgtttccgagctccttatcaactcgtagtctctccgcttccttgttctggcaannnnnnnnnnnnnnnnnnnnnnnnnnnnnnnnnnnnnnnnnggtcatggttgatccaaatcctcaaatccaccgtgctccgccgcctcacacggcgcagatccaaactcgcggaaccggatctaactacgagataaaccacagactaaagctgaagcataagcaattcgagagaggtgagatcgaaatcccaatctagaaacggaaaatggcaccttcaatcgaagaaattcaaaaggagagactgatctttggaaaagaaagacacacctgcgggagagagacgagaaacgactattatttttctttatttacaactttgactattcaattttgtgtaattcagtttttgtctgttttgaaactggaatcccaaattgacccgtcgaaaaacagaattaaaaagtctagacatttggactaaatttaaggatttataagtttgcgtaagattttgcaaaaaaagtatcc

SEQ ID NO: 7270 - DNA, 574 bp, Arabidopsis thaliana landsberg
  unsure (1)..(574): unsure at all n locations
accatataaaaagaagaaatatgtctggaaaatgctttatatacatatgctaggctacgttgtttattttggccatatggaggcggtttctcttatatctgcgccaaagtatccagaaaagcaggtaaaccaacgttttgtttgctcaaacaaagaaatttttctttgtaaggctaggagaagataatagatggaggtgtttgctgaaatatattctagtgatcaagctgaaccaaagaaagtttcattgaagatcacacagttagatctagataccatttcatgcgtttgcaacttgacttgacctgggaaagtattgcagacaattacttataagcacgagttacttagtaacatcttagaaactcttaaccagaaccatgcattgtatctcaagggtttgtatttccaatttatattgtttcatgctccttaactaatttgcaggtattgaacttttcatccatgattacnnnnnnnnnnnnnnnnnnnnnnnnnnnnnnnnnntgagaaccatgactttttgaagttggcaataaatacagtgcggtacgatattattggtcggaatgag

SEQ ID NO: 7271 - DNA, 2116 bp, Arabidopsis thaliana landsberg
tcttaaacatctcacacacacacacaaattacagctattcgtcgactaataaaaaaaaaattacaacttatattctaaatagtggattaggttgattgttcttttaagtcataaatgtcccaccatatttgttgtctttttattaggggggaaaacgtagacacataaaatcagtttattcgtcatcctcctcacaaattaagcatatcacacaaaaataagagatattaaatgaaaattttggttgtgcttcactgtcttatttatttccagtttactttaaatttaagacgaagacctaacactatgacctccatacttaatagagtttgccccaccaacaaactttatgaatatgcatcttgcatcacatctttcgttatgctaattaataacagtttggctcatcacatgtgaacatacccaacgtaattcccattactttaaaattatgaatctgatcgtagcgtttataagtgtccaaacaagttttctttcagagaaccacaaagttatactatgtaaaactaaaccaaaagaattactaacaaaatcgaacaaagaaaataacttaaatgctgttcaatttttgctaagtttttgttcaatctttaccaacaaaaagagaaaatccaaaaagcgaatctgacgctcatagtatttcatcttttcattcacattaatcaatatttgctttcacaatcccacattataaataacattattcctaactaatatatttagaatgagtagatttaactgaattccactctacgactggaaataaatttgattttcactagcaaaagggactaatatcatgttaaatttatgaatttctaactcaaaattttcaagttttcttcggtttgtgtatatatcaaaactaattctaagaaaaacctagtcgagccgaggacatggaacaatgagagatgtccaattaaagatcgaattgacatttcaagggtcgtccaatgcccattagagtctacgaattactatttcaaggcccatttgctttcatattgtaaattactcccttcatttgagattacagtaaatgtggttttggagttgttcacattaagaaaccaagacagatactgaaacacagaaaaccaacacatgatctaaaatgtgaatgtggttcagggtttcctctgccgtagactcttctcatggagtttagagagacaatacaaacacacaacttattatagctaaacaagtttttattttaacatagaagagaaaacgtgagtttgttttggtggttgtgtttcactcagatcttagctgcgaaggaaattccttgtttcacgagctcgtcgagactctctgcagaaggtcgagctttggcgactttagccaaggctttgttctcatcaccactacctccctccatgaatgctccaaccactttaccaccttgaacccaatatgctccaaatcttggttttgggtttgatggattgctgtctccaaataacacagagtctcctacgttgtctccgtagaactgccatgagagatcaaaggagcgagagtagaagaatggaagatagtcgtattcctccaccgctgcgcctccctcagccgctttgatcgcctgccacaatgtatcacatatataaacgcttcatcagatatatacaactgtatgttaatctataagatttaggcctcaagagtttgcgttgcattttttatggtatggattaatagggttttggtgtagcgatatcagccatattgtaagcattatttaccttaacagcttgctctgctgatttgcgggaatggtcaacatgctcgacccttctcacgtctccgtacattttcaaagggaaagtagcaacgtcaccaacagcgtaaacatctggaacacttgttttgaagaatgcatcggtctgtgtgaaacagttaagcagtcaatttaaaagatccaaatcagaatggtacgggataagaagaagaagagacgcacaggcagcagataaataccttaattccacctttatcttcctcgacctgtcccttgaataaggatgtcaatggttttgcaccaaccccaactatcacaatgtcggcttccaatgtcctcccatccttg

SEQ ID NO: 7272 - DNA, 1609 bp, Arabidopsis thaliana landsberg
gctctttcataaccatgttcttaatctcttatgattctttaataatggcagctggtgttccaaatatcaagtggtttggtgttgaaggtgactacaatactctggtgatggatttacttgggcctagtcttgaagacttgttcaatttctgtagcaggaaactttccttgaagtctgtcctcatgctcgcagatcaaatggtagatctctccttctgtttatatgtgactccttttccttagattagtctactgatcaaatctgtttatgttcagatcaaccgtgttgagtatttccattcgaaatctttccttcaccgagatcttaagccagacaattttctcatgggtttaggaaggcgcgcaaaccaggtttccttcacctatattttcgattttgttctcatttagctttcgagtgatctcaaaaatgacacttttttatttataaaggtacacatcatcgactttggtcttgcaaagaaataccgggataatactacccaccagcacattccctacaggtgagacaacagatttgtaaccagtccgtgtttcttcttccagcgtacaatactaaattcttccatcatgaccttttttggcagagaaaataagaatctgactggaactgcaagatatgctagtatgaacactcacttgggaattggtaagcttgacagaagattttcgtttttaatactctgaagactatgcatatgttaatctgttttctctgtccgttttgaacatctagagcaaagccgaagggatgacctagaatctcttggttacattctcatgtatttccttaaaggaaggtgagtattattacctgcatgacttgtggtttcacttcgttcttctcatactttattaaaatatgtctcatggtttcttttttagtcttccatggcaaggacttaaagctggaaccaagaaacaaaagtatgagagaatcagtgaaaagaaagtctctacatcaattgaggtaaagtctcaatcacaaagtttgattctttatttcaaacttctacatttttttgcttacaaattgctcattttcctccagtccttgtgccgtggttacccatccgaattcgcatcgtacttccactactgccgatcgcttcggtttgatgataaaccagattacggttacctcaaaagaatattccgggacctctttatccgcgaaggttttgaagcttttcttctatccctcccacatattttctttcccaaatctgcgctttctaacactagtctgttttgcagggtttcaattcgattatgtctttgactgcaccatattgaaatatcaacagtcacagctaaccgctcctccatcccgtggcctagtaagtcctgcggttggaaccagtgcgggtgtgcctcccggactaaccagcatcgatagatacggaggtgaatttgtttaaaatgatgagctcttgaactaatccaatgtttaaacctttgaaagttgaaagatatgtttgtttgtttgaagtgcgagtaagaaggaggaacaccaccaatggattcaacgcgaagcagaatgtcaggagctcttgaaaactcaggcaccatgtcatctagaggcccaa

SEQ ID NO: 7273 - DNA, 2131 bp, Arabidopsis thaliana landsberg
cagaaaatcgataacccacgttgggtttcaggaatctatggctccggtgaggttcagaccgaagaaagctgctgtcttgatatgtctcttcgaaggagacgatggtgatttgcgtgtgattcttactaagaggtcttccacattgtctactcactcaggtttgtaattgcttttcgaaagtttggtttgcttagtctcatataaatctgatgatgaacatctttggaacaattttgaaatttatcattgcaaacacaaatcattccaatatgagcggaacatttaaagttctcgtctttgcagcttttatttaactgttcaaaccttacaaaattgttgcaggagaagtttctttgccaggtggtaaagcagaagagcatgataaggatgatgggattactgcaaccagagaggcagaggaagagattaaattagacccttcgcttgttgatgttgttgctttcctcgaaccatttctatctcaggtatcaaaaagtgctcattgtctcattttaaaaggaatgcatgttcatatcaatagatctgggagctgcgttttgtgaggccacagagttacatttgattgttaggcggatttgtgttttgaagtgtcgagacaatattcgaccactggttctcttaggggtttccattcactgattttaaaccgttgttcgtagttttattacaattttctcgtatcctaggagcagagtaatggtaactacagtgactctctatctggaaaatccttaataattttcagtagtggctgaagccataatatccttttttattgttggtttaggctctatgccaaattgtttctgccgtatacaaagctgtctttagcttttacgaagtgttttgcttatctgtgcttcattttccaatgcagcatctgcttagagtaattcctgtggtaggaatattatgggacagaaaagcattcaatccaacaccaaatcctgcagaagtggaagccgtgtttgatgcaccctttgaaatgtttctgaaggttcctctcgtctcttttcttcaaggacgctttatagttactgtgtttatttactctgaaacatcgctggttgaaatatatcttacgcaggatgagaaccggagatccgaggagtttgattggatgggagaaaagcatttggtccacttctttgattacaaaacaggagatagtgattatgttatatggggcttaactgcaagaatcttgattagagctgcaacagtggtttatcaacgaccacctgctttcattgaacagaaacctaacttgaagtactccaaaatggtaggcagttgctcaattgtgttatccagacgtccacttgtactataagtttaacaaaaagacaataaagtataatactgatttcctgtaccagtaaatgcagaaccaggctactcgtttatatggatggctgaagccgctggcaaatttacatgaatcttgtgaaaatggaagattactaggtcatgtcccaggtcagtctgtattactgattattgtaacgttgctttttgtctgctctttgtttccaagtcattccttcagtattttcaattgtgagcactgaggtatttctatttatcagtatatcctaccacaaatatcttgtagaaatggtggattgctcattttctaatgtagaaacttgtgcagttgtgatacgctttgtctcgttatcaagtttagaaaaagcttccctttgatacgctactaagttaatctggctgaaaccattgttggtgtttttttttacctggctttagattatattcttacataatagtatcataaatcatatctctggtttttacttggctttgggtttagttggttctaattcataaccaactcttcatcttttccggactaaaactaccctgccagttcttaatcttaaagaaatgttatgtaaggtgggggtatccaggaatcaaacctgggacttctcggttgaccaactacctggttgttgagaaattaggttcaaatgtagaataacacttctctggttttattattcttggatgggagtttttatgaagctcatatatatgataatcaagcatatattgacagatctagaatccaatccttccgcgtcactta

SEQ ID NO: 7274 - DNA, 1357 bp, Arabidopsis thaliana landsberg
  unsure (1)..(1357): unsure at all n locations
ggatttacatttcaaaaccaaaagaagaaatttatgttgtatagagaccaaaactgcttcattagttagaaactaagaaaacaaacgatttacaagaacaaggtgtagattggtgtagattgcagtcacaaatgaattgttgtttcagatatcggctcgaattagaatcgtgggattcaagttgggcttacgttgcattgcaagcccatttcattggccatggccttcagagaggatggtctcagttttgaactctctctcgagagagacataagaaataaatccgaatcaatcaagaaaacggggactcggtttagacactgccaaagaatgtgaccaaatcacttgagaaaatgctacaaagtctactaaagaagacttctctaacagaacagaaaacaagattacttacagcagatgtagaagaacgttagaggagtcggtctcatcgtgtcttctcaaactagcgtctctctctttctcaaactgcctgtaatcagcactctccaagaaactgactttgtcgagatacttagtaagaaattagattctaacaacaccgagccaatacacagattcaaaaaaaaaaaaaaagcaagcttaaacagttcaacttgacatagatttaaatcctacacacacaattcatcttcttaattccaaagagctgatataatatcatagaacaacgccgagcgaaaacaaaaattcaaacaactgacctcaatctttcccctgctcgaagcagctgcagcaatactcttagcctcctcattacaactatgattcaaaagaagaaagtcacataatttagatcttgctgaataccaaagttttgctgtgctgacataaatatgtgtggcatggtcagtgccagatgactcaaacagggaggtactatgagtgctacctgaaagtataaaactcgatgctctcgtggttggaccctgcaattctgcaaaaggtgtaaactaggactcaatttcagtcttgctgaaacaagtttcccacctagtagctctagacaaggtttggttttggatatacataacataagcaccataaacaacaagagttattacagttatcaaaggtgtaaccaataacacaaaatcctttaaacaaaggccataaacaacaagagtcattacaacctatatcaccgcaagaaagtgtatccaatactatgaccatattctattaaaaatagaaaaaatgtgtcccaaaactatgatcatactcttaacaaaaataattcagttccttcttggctttgtgttcttagactgggttccctttntattccatttcttattcgtacagctctactcttctcctcaatctcccctaacttacg

SEQ ID NO: 7275 - DNA, 840 bp, Arabidopsis thaliana landsberg
  unsure (1)..(840): unsure at all n locations
ttataagaaaaagggtctcaaacgctcatcatcctcaatcgacgcagatagttccaccaattagggttttcgtccgccagaatttccaggtaggtgaactctctctgttcctcttccccaattcgtctctcttcaatctcagatagagttacgattttttcttgttctaaaaccctaaaaagttttcgattacgagtcgattgaaattttactccttttgaacagagacgtatcttgaatctagacatgggatctcatgagcaatcgcctgagaataacggttcgagcactgtatcgaagaaagttgctgatatttggcaacgaatgaacgaaggagttccaaataaacgtgtcaatttcgtctcaaccgctttgcccgctaaaaactcagctaatagcgtnnnnnnnnnnnnnnnnnnnnnnnnnntttgattcttttcttacgtttgggattttgaatgtgtttttcaaaaaaaatttgcagaattggaaaagttatctcggtgtgaatgtgaagaagaaggatacttgtgtttctgatgtacagaagagtgttttgaatcatagctgtagtgaggaggctaagagtattgctgcagccgctttagctgcggtgcgaaacgcaactgtaacggctgcagctgcatcgagccggggcaagattgaggttagaaaagttttatgtttgaatttgtgtgttttggttcgttattgttagaagataagatcttatcagctgttttggagctaaaaagatagattgtgtaggagttgaatcactgtctcgagtaaaaatgtggtttgattgaacctttacgataagaaaataaagctcgtttc

SEQ ID NO: 7276 - DNA, 904 bp, Arabidopsis thaliana landsberg
tctatacaatttataagatggtaagagaagatacttaacaagtggttctagactccgatctgggagagatgatggtggtatattgcccacgggctgactgaacatatctcttataaaggagcgagcacatcttccgagagagttgagtcccttagattcagcttcctcatctttttccacatgtgatttttgcgcttgagaaatgtgatgcgatatagaggctcgaagttgaggagatggtcgtggttgattcgagcttggaggttgaatcgacgttggaggttgaagattcaattatggaggctgattcgatctaaacgctcaacgtagaatagatccagaatctcaaacttgattcgatctagaggctcattgagacaatctatatcctcgaggttgagtagatagagaactgattaagatcttcagctgtaggagagctcctcgccgactataacagaatcgtcggaggtggatagtatttgtaagtaggacctgttggaggctagtcgattgggacatgattttaatgagactctagatatgaggcctgagagggttccccgacgtgaatgtgtacttgctaggaagactggtaagtctttgattcaacgtcagttaatcacctggagcaatgggtcaatttgaggcgttttccataacccttcttcctcctcctcctctcttccttcttccacgaaaaacaatatgaagattgagatctattatggctcaattcgatgaagattagagtttgtttgcatgaaaattgagagagataaaagagatagaaatggaagtgagaggattagggattgtcaggagaggatgataatgtgtcgcgaaagagtcagtgcttttatagttgggctgttgagctattgcaaatggttcgagtctacaa

SEQ ID NO: 7277 - DNA, 599 bp, Arabidopsis thaliana landsberg
ggggggggggggggtttttcccccccccaaaaaaaaaaacccccggcggggtttccccaaaaaaaattttttaattgggatttgaaaccggtttggggaccaaaatctcgtgggaaattgaatgaaatctgtaaaagataacgtccggtgacagagagagagagagaggagaagaagaatagaagaagcggctcatatccataataaaagccatttgctcctttatttattctctcattctttcttcttcattattcatttctctcgttattcgtttcgtattttgtttgtgtttatgattttacctccttagttgctgtgagatcaagaagtggtgaaagaaaagttactaaatctggatgttatttgattgtcgtcgttgatcttgagctatgaggagcgttaataatagtagtgtcgacaccgtgaacgccgccgcttccgccatcgtctccgctgagtctagaacacaaccgtcgtcggttcaggtacttctatgagctcttttttttttttctgagtgaaaacgatcctattttggatctttttctttttttttaaagatcaaagctgttgctttgatttgccgacgtttctga

SEQ ID NO: 7278 - DNA, 1827 bp, Arabidopsis thaliana landsberg
ggggggttcttgatataagcatgaacctgggaagtaaagcagaatagcaaaaagaaccggattacattctttaatcatgcaagtgaagcctaagaaaaagaatagagatccatgtaccctgtacgtctccctgttgactgatcaatactatccatggcatcccaaagaagtttaagaggaacccagtgaggaggatacttgaaacgagcgacatcaagaatcaaagccatatctctttcagcattataaccaccaataggtgaaaagtggccagttccagtctgcaatcatagacattagaatccgatcagcatgggacttcatagcaagacatgaaagagtttcaccattatcaaactttgtaataacattaagtctaatgaatttcacttaattgccatataactgttaatatacacagagtttaggccaaaaaaatgatacctgcttgagtacttgcctatgatatgttgagatcatatgacaattatcagaagttgaacatttgaccacatatttgcggaaatcatcaatggtgctctgatttgtgcggaaagcttcgacttttgctcctgaagaatgagctaaacagaccacttttccaaatgaaatgcctttatccttcactatttcaagcggctcgcaacattccagcattgattcatcaaaccacctccaaggccctgagagaaaccaaaaaaattcaaaaacccaccaacgaatgtactctccagtagaggtatgtatacctttccactttcttcccgggtcaatagaaagagaattcaaaaccatcgaaagactagctaagccacaaaaagctggctcacactgtgtgtgaaaataagaaatcagcccgaaaaatccttccatagtgcctttctgaagcgcttcattgaagatttgctgcaaagacaatgacaacatttaaattctcagggcaaaagaacttgtcccattctactaaattggctatcaataattcgtgaaccatttatcatgaagcatgctcagatctctcaccaacaactaaacttgtaaaaacagcaaggggtttagggttttacgagttttacacagttcccaagaaaatccaatttctagactctatacagatagagaagtaaccaaatcaatcaacatacaaaaaccaaatcagtgatcatctctaaccagaagcacaaggatacttaaaaagttaaaacccagaaccctgaattttcaattgaatccatggatcgaacacttgagaaataacgcacctttccttcaaaagaagcgaaatctatcgccggaggggaaagagaccgccgatacaaactcgccatagacattgtcagagtttgactatggagcaaacttgcgccgaaagaatcagggacgggttcgaaaacaatgtaaaagaggagctctctctctctctctctctctatgaactacctaaaaatggagcaatgcttcacatatgaagaagagtaacgttcgcagagaagtctttcatttacttcaaaatgcggattcaataaaacgtcgaagagggactgagttgtgtgagagagacagaagagaagattggtaaagtcaaatcttaaaccgcggagactgatggttatttagccggtttggatcggtttggaaaataattattgatttgaaaactaattgaccttgactaagactcacctactgttttttctttattgcaactggggaaattgtttattttattttattctgaagccatgaaggcacgttggttttaaactaatcaaataaaataggtaacaaatcctcacaagaaccagcactgtagctagcttaattgaa

SEQ ID NO: 7279 - DNA, 1488 bp, Arabidopsis thaliana landsberg
tgaaagcttggtgaaattgaagcaattgagcaggcttgatctcagtaagaatcaactctccggtgagattcctagagaacttcgtggttggaagaatctaaacgagcttaatttggctaataatcatctctccggtgaaatccctaaagaagtcggaatcttacctgttctcaattaccttgacctttcaagcaatcaattctccggtgagattccgttggagttacagaatctgaagctaaacgttttaaacctttcgtataatcacctctccggtaaaatccctcctctctacgctaataaaatctacgcacatgacttcatcggaaatcccggtttatgtgttgatctcgacggcctttgtcggaagatcacacggtctaaaaacatcggctatgtatggattcttttaacgattttcttactcgccggtttggttttcgttgtcgggatcgttatgttcattgccaagtgtagaaaactcagagctttgaagagttctactttagcagcgtcgaaatggagatcattccacaagcttcatttcagtgagcacgagatagctgattgtctcgatgaaaagaacgtaatcgggtttggatcttctggtaaagtctataaagttgagcttagaggtggagaagttgtagctgtgaagaaacttaacaaaagtgttaaaggaggagatgatgaatacagtagtgattcgttgaatagagatgtttttgcagcggaggttgaaacgttggggacgattaggcataagagtattgtgcgtttgtggtgttgttgcagctctggtgattgtaagttgttggtgtatgagtacatgcctaatgggagcttagctgatgtgttgcatggtgaccgcaaaggcggtgttgtgttgggttggccagagcggttgaggattgctttggacgctgccgagggtttatcatacttgcaccatgattgtgttcctcccattgtgcaccgcgatgtgaagtcgagtaacatactgctagatagcgattatggggctaaagttgctgactttgggatcgctaaagtcggtcagatgagtggttccaaaactccagaagctatgtccgggatcgccggttcttgtggttacattgcaccaggtataaaccaaaacatatttcagctgcattttgtaacttttgatcttatattaatagttttcaattttgcagaatacgtatacacacttcgggtgaatgaaaagagcgatatctacagctttggtgtggtgcttttggaactggttacagggaagcaaccaactgattcagaacttggagataaagatatggcaaaatgggtgtgcactgcacttgacaaatgcggtttaaaacccgtgatcgatcccaactcgatctcaagttcaaagaagaaattagtaaagtcattcacattggtctactctgtacgagtcctctccctctaacagaccttcatgagaaaagtgtgatcagcttcaag

SEQ ID NO: 7280 - DNA, 1272 bp, Arabidopsis thaliana landsberg
catgcactggtacaattagttattaagtaaattcatagagtacaaaattaatagtcatgtactgcttaaaatgatagataagatatatagagactgaatttataaaggatatacatagattaataataactgtcaatactcaatgcatccgacgtttacagagtattgtggatagattgaatgattatgactaattctcaagttatatgatataataatatattgagtaaaaatatagtggatatttgacaatttttctaatatatgtatttttgttcatttgaaggagaatttgtgaccataaggccattttgcgttggatttggaaaagacattattacaaaatcatacaaggtgattttgatgtactcagaaaaaaaccatcctcatggatattttgatggtttcaatatcaaagctatatctcttgataatggaaagcaacgagacgccggttggtacgttttagatgagcacgaaatttgcaatgaacaaacaccggtttacgcaaacggatcactcttttggtggacaacatttacttcttggaaatatcgaatattttcagaattaccttcacagatattagcttgtgatctacacacacaaaattttcgatgggtatcaataccggaatgttacacccgttacactcgtggagtgcaaatgtggagcctaaatgagcgtttgtgcttatcagatgtgctacacagacaatgttcagaattagacgtttggagtttacaagattctactcaaaaatgggagcaattgttttcttttaatattcttaatatcgatcgactagatgcaaaatgttggatgcttggtctaagggctgctcactttcgaaggattggagaggaccaaaatcaagtttcgtttgatagtctaagaacggcgatttggtattcgccgactatgatttctccatcaaatttgttggtttgatgttgtttcaaccttctatgattaaataaatctcaaaagcttttgagtttttaacttcacaagtacaagtagaaagaaaagctcttgacttaaagaggaagagaaaaaaaaatgttttgtatttaaagaaggtacagtatagtggaatgacttgaagtattgggctgcacatgatccaacgctgagggattttacaatgataattcaaaagcatatatcttggtcataccggttaactactgaagcggtcaaaaaataaaacacacaaaaacgtatctttgtccaaacgacacgcaaattaattactggtttaaacacatt

SEQ ID NO: 7281 - DNA, 1790 bp, Arabidopsis thaliana landsberg
taatacatgacccacctgagttttcttgaaccaatgtgttcatttttttgttgacctcaaatcaatgagttcaattgctttacgatactactcatttggactttctattttgtcctaacaaattgatacgtcaatttaagggaataatacttattttccgggccttgcacatgcaacaacttatacccaacatagtgttgtcactctttcaaacaacaatggaattattatgtgagattttattattattaaattcgggacaagtttattttggatttattaatacctttttttagcactatacttgcatggaattttttgaatatattataatatttggccaaattaagcaaccatctttaagtttcaattattttgttttatatgtcttggatttattagaccaaattatatcatctaagtcgcactttaaatcgaacaaaccaatttgatccctcctgttcgactagtctaagttataagacaatttttgtcccctccatttctccttatcttatatatatgaccaatccacaaaaattcaatttaatcttttagtctagtaataatgtaatagctaaagttgtttattcctctggagtttggatagttaaaggcataatggttaaattaaaacaggcgttataagtgaaatatatacaatttctttttgttatcactgaattgttttctgtgaaattcagattctcatagtgtaaacttttaaacggatagtttagttcttcagtaatttttttctgtgatacttctttgaagccggtccgatttagtccagttctggatatttcaactcggataaatgaatttattgggctaacttttcaagtgatgggccttagtgggccactttaaactaccgtcgaaagagtttagtgggcaacaatgttagtacatgtgactatgtgagtttctctttaacccaagtcagaagtgggacagttacaacttacaaaccaaggcaaagttgtgttattgctgtgagctgaagtaactcaatcagtgttgcataattccaaagcaaaaaaaatcacaaaatgccaacaaagaatcaaaatattatcttattgagagagctctaagcagcagcaggtcccttgagcttcttacttatggcggcaatgtacttcccttggtgaaatgcttgccccaactccagttccgttggctgtctcgacccatctccggcaaatgttcccgccccgtacgggcttccacctttcacattttccatctcaaacattccggcaccaaatgtgtagccaatcgggacaaagatcatcccgtgatgaaccagctgagtaatggcagttaatctacacataaatccgttttgtcaacaatatagcaagtggtcactttgatgaatgctgtttggattgtgaaaagaaactaacgcggtggtttcttgaccaccacccttgggaccctgtgctgtagaagattccggctggtttaccggcgagttgctgagtcctccaaaggccgccggtcgcatctaaaaatgccttgaactgagcagccatcataccaaacctcgttgggaagccgaagataaatccatcagcctcagcgagctcgtttggggtgataataggagcatcactctttggtggtgcactcattttagagagcacatcttcttggagcgtttcgggtacctgtcaagaacaaacgctagctcaatacttcttccaatgattctttacaggtaaattatgatcagaaacactgacggcagaaaatagatgcagaataagaggtacatgccg

SEQ ID NO: 7282 - DNA, 568 bp, Arabidopsis thaliana landsberg
tggcgtctagctcgggcttagcagaagaggatcgctggtatatcgagtccgaagaactagatgaagattctatatcgatgacagaatctttattagcaagaaccaggctcattgatttaggaatactattcggctttccatcagaagactggaaagcgataacttggattctaccaacctggaaacatcaacaaagccagttcagcaaacaggagaagtaatcctgaaaagtttcaacttgctaatccactcatagaaagcaaataccaaccttgttagcatcttcactaaaacaggaaaatatgaggccaataaaaccagaatctaaaagctgatacatagcttgtgtccgaacatctgcaggacataaatatgaggaacaagatcataaaaaaaatcataaaaagttacaatgatgatgatacataccgacatgggaaggaagaacggtaatatgaggatgggagtggtaccatccaatgacccgtgtagttctgcccgttgatatcgtcattctgtgtcagagaggttagttaaggaagacaacaaaacactctagttttaacca

SEQ ID NO: 7283 - DNA, 1457 bp, Arabidopsis thaliana landsberg
acgacaagagcctgtctaaacatcattgttgccgagcttctcacacaagttggaaacatttcaaccataaaaactgccataaggttaaatccgattctagcgcagaagaatgttccgagttcgaaggcaaacgcgatctccgtttttccgagaatgctgagaacgaaacagagcactcctgatgccccaccgagtaaggtattcactagaacagagcttcttctgttaaatctctccaataagattggagtgataatgaaagtaggcaactccaccactgcgtttagggtttcactcaagtagatgttgacgtctatgtctctagctgctaaaggaacaccataatacgatattcccaacccaaacataatgatcataacaactaaaatcctcctaaaagcccattttcggaagaagaagtctttaatcgagtaagttggcactttttcaaagttttcttgctcgaggggtaacttagaaaccactgattccaaataaactttttccttcggtgacatctttgagagaacatcaatggcttctttatcctttccttgcatgtgaagccaccgaggcgattcgagtgcaaagaggtagaggaagatacagtaaaataccgctggaccggatgtgtatagatatagatatctccatgacgaatcttgtgcaaggaaagcgattccagacaacgacataaaccctaaaacgaatagggtaaatggaatcatcgtagctctcggtctccatctggtggagactcgctcactgatgagaaccaacgcgtatgaccaggtctgtgatcgcgaaaatccaatgataaacttaaggaatgtataaatccatacattggttgagaagataacagagattgaagtgattgacattgcaaaggttgagaacaaaactagtttcttgcgacccaaggaatcgtctggaatcaaagcaagaaaaaaccctccaacaatggcaccgatgtagaaagcagaactaggcatacctctgagtaaagagctcgagcactcgaggccaaattcggaaatgacggatttgccctgggagccaccgtcccattcccaagctgatcttggaagcttgcagatgtcggaggctgaaggatcacagatcgtgtggttaagacagtgccacgtgggataagcatctgtgtacacggtgatgaatatctgctgagcatcgaagagcaaagctagtccaacgagggatatctggaaaaattgccagaatccgaaatctgatagactttgttcgacgatcttgtcgaaagtcaatgcttctgatctggttttgtcgttgactccagaatcatcggtgagatgagacaacaatggttctgatatttgatcagccattatcggttagtttcaaagcttttttgttttggtgtatttgaagagtttgactattgccattatgcgatactctcattaattcattcttat

SEQ ID NO: 7284 - DNA, 1534 bp, Arabidopsis thaliana landsberg
ttccgatggtggtgcagttacatctggtgatggatttgaagattgcggtgatgacgaaggggtggcttctgattgttttggtgcttcaacttctggttcgcttgatggtactggtgcttcaacttctggctcggaatctggtgatggaggctggacttgatttgaacactggtgaatgatttgaatctgatggtgcttcgatgtcctcagagtctggggtcggagcttgaaccggtgttgagatttctcctgattctgatgatgaaggtgttggagcgtttgccattggcgatgttgctggtggtagaggcgttacaggtttcggtggcggtgagaaaactggaggaggaggagagtagataggtgacggaggtggtggagagtggactggtggtggtggagaatggactggaggcggcggggagtgaactggaggaggcggtgagtgaacaggaggaggtggtgagtggactggtggcggtggtggagagtggaccggtggaggcggggagtggactggtggaggaggaggtgagtagattggtgcaggcggtggtggagagaaaactggtggtggtggaggtgactggaccggtggaggaggagagtggactggtggaggaggagagtggactggtggtggtggtgaatggaccggtggaggaggagaatggactggtggtggtggtgaatgtactggtggtggaggagagtggactggtggtggtggaggagagtgtactggaggtggtggtgagtaaaccggtggtggaggagaatgcatcggaggaggaggtgaaaatacaggcggcggtggggaatgaaccggtggtggtggtggtggagagtgtactggaggagattgtggcgacgttgtctttgtctcttctgtcgagggtgatggtggttgaggacgacgttttttaatcggagatgcatcgtaaggatcatttggtaccggtgattccaatggaggcgaccccatttttggtgcctctgtctttggtggttgttcttgctttggtggttgaggcttaggtgactcctctggttttggggtctcttgctttggtggttgaggcttaggtgactcctctggttttggtgtctcttgctttggtggttgaggcttaggtgactcctctggttttggtgtctcttgctttggtggttgaggcttaggtgactcctctggttttggaggttccggtttaggagattcttctggttttggtggctcttgcttagacgactcttgttttggtgactcaggcttaggttttggctgttctggttttggtgcctcttgcttaggcgactcttgttttggtgactcaggcttaggttttggctgttccgtttttggagattcctgttttggtgactctggcttaggttcctttgggttagaaggctcatgtgatggtgtctcaggctttggactaggctgttgtggtttgggagattcttctggttttggcttagatggctcttctaagtttggtgggtttatttctttcttaggctccggtgc

SEQ ID NO: 7285 - DNA, 587 bp, Arabidopsis thaliana landsberg
  unsure (1)..(587): unsure at all n locations
aaacaaaccgatatatagggatatcccaaaatcataccctgatttaaaaaaattgctcaactaattaagaggggcgggtttaaagattgtcttttatttccccctttaaaaattcatattcttttgtgtataggtttcaactgcagcagcataatatattgaatattcttaaattattcacaaatttattaaattgtttgatgtcaaattggtataatatgaacttttcaaaatatatattcttttcgcttttgtaacacatgggaaatacagaatccgcgtttcctgataacatgtgttgatttggataagttgcgtgcaaagaacaatgaaagtcaaagatgtagctatagtaactccaagacggtctagtgtggtgtggtggtgtcgacctctctattttcaagatctcactattttcatcaatgtgtacggtacgaggttttacagaaattaacattatcaagaaagacacattaagtatttacgtcttaccaaaagatatgtcaccctttgatccanaaaaagaagaagaagatgtgtccacataaacctcacttatgattaagcatcattgaacttatgat

SEQ ID NO: 7286 - DNA, 529 bp, Arabidopsis thaliana landsberg
tccaaaattccgaaaatttggaataccgatttgaatctttatgggtatccgacccgaaaaaacgacgtctggcgagggcaaaccttctacttctccagaaggaaaaagaaaataacaattaaatgaaatgaaaagtaaaataattccgcaaacaaagatgctacgtgtcgtctctgtaagccaaaccttcttctccaaggaaaaaacaccaattaaattaaatgaaaaataaaatatttccgcagaataagactcttcttccatttggtacagaaaaatcgaaactttttagggtttttttttttgtgataacgagagagaaaaaagtgatggacttgtcggttgagaacggaggtttagctccaggttttaggtttcatccgacggacgaagaacttgtcgtctattatctcaaaagaaagatccgtcggaaaaaactcagagtcgaagcaatcggcgagactgatgtctataagtttgatcctgaggaattacctggtacccttcatttcaaatcttctccttactc

SEQ ID NO: 7287 - DNA, 536 bp, Arabidopsis thaliana landsberg
cctcaagtctcttctattaagcagccttgggtctttcccaaggtttttcataaaatgattaaaacaaaaatggagaggccctttggctgcttcttcatcctccttcttatctcctataccgtcgttgccacctttgacgatgaaccttctttccccgaaaacgccgatctcacaaaagatctagaacaaaaatgttttagcatcaataaagttgatcctaacctcaaatttgaaaatgatcgtctcaaaagagcttacattgctcttcaagcatggaaaaaagccatttactctgatccatttaaaactacggccaattgggttggttctgatgtgtgttcatacaatggagtttattgtgcacctgctctagatgatgatagtctcacggtcgtagctggagttgaccttaaccatgcagatatagccggacatttaccaccagagcttggccttatgacggacctagctttatttcacatcaattcgaatcgggtttgtgggatcatcctcaaaaggttatcgaaactcgcttt

SEQ ID NO: 7288 - DNA, 1426 bp, Arabidopsis thaliana landsberg
tgttgatatcataactcgctctagagccgtcaactctggacgaaagtgtgtctcatagccagaagtaaagcattgcctgtttcaatgtacatgccaagatttgttagtacttaagaactatctgaaatttagtgaaagaagttgattttaccatacctcttgaacagaaacaatagctgagtcataattaaacattgcagattgcatagaacttaactcttcttctgattttctctgcagattcatattttcttgacttactccactagtttgagctggctctttgttgcatctctcctgctctagtcgctctactcgctctctcaaccgctgtaactcggcttgatactctgcatcatttgcagaacaacttcctcgtgcttgatctctcttgatgcttttgtctcttttctgttttgatgatttcttggacatctttttcaccaaaaaatcaggtttatacaaacccttttctccattcttagttttagaaacagaacttgtctcctgcttcaaagtcttgtattgatctcttacagaatctcgaaaatccgtaagctctttcaactgcacatccaccttcttgatcttttcccaattcaaatctaaattcttctcctgatctcttcttgaatccaagctctgctctataacacccttctccacaagaacggcctcaatcggttcaggagacggtgtttgagatctatcgcaaaatctcatacaatcctcatcatcaagtccactccatcccaaactcataagcttacatctataagcatgtaattcacactcaagattcttgatttcaacttctttctggtaattcaaatcctccaaaagctccattgacaactcaacatgagacattctctcctcaaccattctcttgtactggctagcttccatagcaagcaacgctttctcgccttgtagcctaagtatcacggacatggcttcacttgctgatgtagcagtagcttctctctcagcatccaactcttcctcaagtctctgcacatcttctttcatttcataaagagctattctaagatctttggtggactcaaatccacgcgtttctaagctatagcttcttcctaccatatctctgattgcaaaaacactatatgcaaaatttctattcaataaattacttcaaccactatagttcgtagaatctgaagtttttttttgtctaagcttctagagaagaagaatcttataaatgaaatcaagaaaagaatctcattataccttgtaaatttgtagaagaacacgagttttgtcgacgagctagtccccaaatttggctcagaaagatgtcaaaaaacacttttgtggggaaaagttttgtgtattaaaggacacattggaaactaaaatgttaaaattagacaaaattagacctaacaaatggaaaaag

SEQ ID NO: 7289 - DNA, 1287 bp, Arabidopsis thaliana landsberg
gaagcatctgaaacgtcagcgaacgaggccatgtctatgattcttaggctgcaaggagagaaagctgagctagcaatggaagctgatcagtacaagagaatggtcgaagagcaaatgtctcatgctgaaatgtcctttgcgcttttggaggatgtgatttaccagaaagagattgaagtcactgctcttgcttatcaagtggaagtttatagaagccagcttttgagcttggggtttaatgatttgaaaagcttagatgttaagcttcaagaggatgatgatcaagatgagaatatgttgaagatgaatgatttttcattgagtgatagatctcaaacaccttctccagaattggttacagatctttcgattcccgaggaaaaggaagttatcgagcagagcttggagtcacagaagagttccctagatgtgtattgggagcagatcaagaaactaaatgagcaagtgaaagagctaacaggctttagagattcgatgcgagatcagcacaggacttcagtgtctgaatctaggggtgaagaagattttgcaagctcatcaaactttcaagaagttacacaagaaagaaaaaaggaagcaaagggtttgagtaagacgactgatgacacaatggtgataaaggtgtcaaagcagacaaagatggagaagaaaccatctaaacagacaagagatagaagcggtaagagaaaccgtgcagagtatcaagctgaattgcagcggttgagacagagagttgagaggcttgagcgaggaaagagtaacacagagcctgaaactagtggagtgattaagcaagaagagattagtctactgaaggaagtgaaggaagagctaagttctgtgcaatcatctgacgtaaagaagagcttgaatacaatggagaatttacaaccttgggtcgacccaaccattatttctgttcaagaggtatatgcattcagatttttgacttgtaaaatttagttagtatttgattactactaacaaatatttttgcatgtttactgaaacaggcaatgctttacttctggctatgagacaaagaaaaaagaatggtacaagcaaatttttggtgtttgttttgagtgtatattatcattgtgttctgtttctgtttggctaaagtagaaacttgtaaatctttgtataaaactcacaattgtacgtagattgtcttatgagtggcaattagcaaaaatatcgtcttgtggattccttgtttgtgtgtgtattatatctattgaagagaaatacaaaagactcact

SEQ ID NO: 7290 - DNA, 2239 bp, Arabidopsis thaliana landsberg
cttacatatgtaggtggtgctttaaaaccaagcgacgttgagggtttgtgggttcatgtaacatgtgcttggttccgaccggaagttgggtttttgaatcatgaaaatatggagcctgctgttggacttttcaaaattccagcaaattcatttcttaaggtataaatgaatgctagaagtggaaagtataaccaacatgttctattagaagttttattatattatacatcattcatattttctgaaaattccttttaggtttgcacaatttgtaagcagacacatggttcctgcgttcattgctgcaagtgtgcaactcacttccacgcactgtgtgcatcacgggcaggttacaacatggaggttagtcaagtccttaaactgcttagcctctgtgcttatgataatcttcatttttcacgttaaaccccttgcaaaggtgttctgtcctgttagttaatcatcttagggatgtgtaagtgatgtttttgtctatggaatttagttgcactgcctggaaaaaaatggtgtgcagagaaccaggaagtcagtttactgttcatttcacaggtttgtttctccgacatattctttaactgacctgttatgtgatactgggaccaactgatcgcctgtatcattactatgtagaaagccagatccagatagtgttgtagttgtgcacacaccctcaggagtatttggctctagaaatttgcttcagaatcaatatgggcgcgccaaaggttcaagactcgttttgaccaagaagatgaagcttccaggtttccaaacccaaacccaagctgaacagagtcgtgtatttgattctctttctgcagcaagatgccgtatctatagtagatcaaacacaaaggtatgcatctggggatcttgtttattcttggacgttggagagtctttcattattaactattccctagcaaagctactacttcatatcttttactgctgacgtttcagaagattgatctggaggctatatcccacaggcttaagggaccaagccatcattctttgagtgcaatcgagaatctaaactcttttaaggcaagtttctcattccgagctccattcatgtcagtgttttgctttcttggggcaacgttttctgaatatcttaggaagatcttaatttccatttaccttgttacacaccaggaagcagattttacatcattcagagaacggctaaaacatttgcaggtaaacattgattcatgaagagttaatattttctccatcttgttatcctagaatatttataaacaatatattatcttcttcagaggacagaaaattttcgagtctgctttggtaaatctggcatacatggatggggtttgtttgcaaggaaaagtattcaagaaggagaaatggtatttagtttacgttgtattattcgtggttttgatatggctaaattgaaattcttgaggcaaactaactactgattattaaaattcttgtgcagatcatcgagtatcgtggggtgaaagttaggagaagtgttgcagatctgagagaggcaaactatcgttcgcagggcaaagattgttacgtaagttccgattgcttgcttgcttagattaaaacattaaccgctgcatctaataagtaacttattgtctaacaacaacaacgcagctattcaagataagcgaagagatagtaattgatgccacagactctgggaacatcgcacgattgatcaatcattcagtaagttccctaaattggcacacgagatcaaaacctggtaattaatactaaggatgtttatgtcttgtgcagtgtatgcccaattgctatgctcgtatagtgagtatgggtgatggagaagacaacagaatcgtcctcattgcaaaaaccaatgtcgcagctggggaagagcttacgtaaaacatttcttcagcttctcttttcataagatatagattaaatccatatgcattattaaccttgatcatgaaaacctatttctctacaggtatgattatctctttgaggttgatgaatctgaagagatcaaagtgccctgcctttgtaaagctccaaactgccgcaaattcatgaactagagctctcttaagtctaaaccattcttgcaaacgttcaaacttgctttctaattgaacagtaatggcggtgggaagctaaccgatttgtttcctcggcggctagcttacaggaaatcccttgacatgatgcttgcttc

SEQ ID NO: 7291 - DNA, 1424 bp, Arabidopsis thaliana landsberg
acagagagactctcaatcatgttcttagatactgcagattgcattgctgtgaaaggaacaatgcttgaatcaggtaacagaggaggcaaattagtggtggttgctttagccgtcaccggaggtggaggaggaggcggtggtgcgatggaggatttggacggagcaattccagccgccgtctccacatcagaagccgtaatcctaccgaatggtccagttccagcaacggattcaatatcaaccttgtgttgtttagcaagcttcttagcatacggcgtcgcaacagtcttcctcggaccatctgatactgccgtcaccggagccggttgagcaatcgccgaagcaggagaagaagtaaccggaggaggagatggaacgacagcctcagccacagaagaagaagatttcgaagcggctttactcttagcttcttcgatctcagcttcagtctcagctaacaatccaatcgcagcaccaaccggagctgtttcaccttctccgacgacaatcgcagcaagataaccatcgtaaaacgtttctacatccatatcggctttatcagattcaacaaccacaacactctctcccttggcgagtttctcgccttcagttttgatccaggatacgattttgccttccgtcatggttgatgataacgccggcatgaaaatttcacgaatcttagatcggaccgtcattgaacgacggtgagaagtcgccggagtcgtggagcggaaaacgacgctgcggagggatggggatactgaggaagcgaatgaaatgttggatttggaattggttagtgaagctgtcgatagaaacgaagaagaagaaaccgccattgttgaatcacagagagagagagatctgagagagagtttagagagagtgaagtggacggagaagacgaggttgaagttcgttgagcgtcttcgcctacatttgtatcagttaccagtttaataaccggatatataattaaaccggattaatttatctgaaacttcggtttaggttaaaccatctagaaacaaagaaaatttagatgcttctcaatggatattaggtaacataacaaaaccagttttcttatatatcttctctgctctacctaagttagagaatcagattccaaaatcttaatttataagtatacttttgttttcttaaccaaaaacatatcatacaatattgctctttcgtctcatgtcgggaaaggttttgtgttttcttttatttgtttgaacaataattttcttggatttgtgatatcttttttttttttttggggtggtgaaatgcagaagcaatgttgtgttgtgatgaggattaacttggattgcaatgcttgttgtagaaaagctaggaggattatcatcaatatgaaaggttggtttatattggttatataaaataatatgtgg

SEQ ID NO: 7292 - DNA, 2137 bp, Arabidopsis thaliana landsberg
  unsure (1)..(2137): unsure at all n locations
aaaccaggtacctgcgccttgaaaccctttatccgaacaagaattacgttatcaatagctatgaaacaaaaaccgattctggcttagtgaatggttgtgtgactggaaaataaccctgaagatgtagactactgaatcttgcttgatttgatgattctcagatgttttttttaagtttnnnnnnnnnnnnnnnnnnnnnnnnnnnnnnnnngggcatttgttagataaatttgtaaactctgtttaagtttcaaccttttaagtatttgtgttgtttttgcattagtgattgattcttctgaacttccttcttcttctttaatgataaaagctactttagcttcatttgtgttaagttctgaaacagagtgttttgacttgatttggtgatgaccacgttagaactcttagaatttagattattataattattatcatcttccataaacataaacaccccacactttaaaacacaccaattgaccaacaattaatcaacactaatacaagttttaacttattgacataacacacaacacaaactcatctttctttctctgcttcacttgaatctcaaatccatttttagaaagtctctacggctgctgtaggactcagttctgtaactgcagaagcattcttcattgctgcgaaccgtggctccttgggctgaaacttgacccctgcataaagcttcatgtagtcatcaaagacgaaactcgggtactcggaatctttctcgacaagcgaagtagctggtgagatctcggcatcgcttcccgggttgtaaaacgatgcaaccgacatcctgtttccttcttgttgagtcaccacacggtgcagcacactcttatacttcccgttggttatcacctacagacaattcagatcggtttagctgtaccgaatcatactcaattaagattgcatgtcgttcttccggtttaactcagttataacatttactaaccgtttcctatagttccatcaaaccgagactaaaccataacacattggttttcttagcaaaagatattttgaaaatgtggtgtgaacatgacatacctcaagttggtcaccaagattgatgacaatagagtggttgagaggaggaacatcaatccagtcaccatctttaagaagctggagaccactgaccttgtcgtcttgaaacaacaagatgatgcctcctgcatcagtgtgggccctaagacctttgatcatctctggtttaggacatggtggataattgctcacctttgtcccaaaagttgggccttttgttccatgaaacactttcttcaaataccctttctctaaccctagattctcacacagtagatccaacaaatcctcagcaagattctccagtctcttaccaaagtctttcatggccgtcctgccaaatcagaatatattacataatatttcccaaaaaagaaaatgattatgcttcactatgcaagtttcaagttacttttaagtaaaataataatttttaaatgggttttaacaataaaatatttaccaataaatatcacagaaagtcagaaattcttaaactcatgcatgtgagaaaaagtaaaaagtaagaaaatatttataattaacggtaaaagaggtagagtgtacaactgaaatttgtttacagtcaatttgagatgtatttaagaaaaatagaattaaattcggtcctacaaataagtgataattaactggccttattggtattcatgtatcctaagagatgttatgattaagggggagtttttgtgtggtgactaatttttttcatagaagaaaataaatattatttatcactaaatgaatataacattcgatctaaaatagtatttttctaaaaaaattatgtacctgtattcatcagacacatctgaaatgtcattgagattggattgagggaggtgacgaacgtagaaagtgctttcccaatcgacatcttcgacttctgtctcaagattatccaaacctttggacttgagcatgtcattgaacttttgttcttggcatgtcttgtaatggtcctttgtcatcttctcgatcttgtccattaagtcatgtggtaatccatggttcactatctgaaaaatgagagtatcaaaagaactaccttacc

SEQ ID NO: 7293 - DNA, 801 bp, Arabidopsis thaliana landsberg
ttttttttttccgaaaatggacgttacaattcaaagtttcgttatttcagctcggtgaaccatggactaccatatgatctaatggacaacattgagaggatgacaaaggaacactacaagaaacatatggaacaaaagttcaaagaaatgcttcgttccaaaggtttagataccctcgagaccgaagttgaagatgtcgattgggaaagcactttctacctccgtcatctccctcaatctaacctatacgacatccctgatatgtcaaatgaataccggtacacaaacagactttgatccagctttgaaaacgcctcacaatcttccaaaattattgattactttgctttccatgtctcttaacagattggcaatgaaggattttgggaagaggcttgagattctagctgaagagctattggacttgttgtgtgagaatctagggttggagaaagggtacttgaagaaggtgtttcatgggacaacgggtccaacttttgcgacaaagcttagcaactatccaccatgtcctaaaccagagatgatcaaagggcttagggctcacacagatgcaggaggcctcattttgctatttcaagatgataaggtcagtggtcttcagcttctcaaagatggtgattgggttgatgttcctcctctcaagcattccattgtcattaaccttggtgaccaacttgaggtaaaccggttattcttggttaaaccccggtttctgatagacgttagtacaactggttttgtctaacaactagcagcatccggttctagtatctagttgac

SEQ ID NO: 7294 - DNA, 922 bp, Arabidopsis thaliana landsberg
atgataaaacataatgtgttgatataggtatttttgatattttactttaagttagtctatttaagaataatcatgttaatgagatttgacgtcttccattttttatttgatgacgattttatttcagtacatcgcccatttgaatttaagtgacgacataacaaatacactaacacaaatcacaagggtacaattacgggtttttaacgaggatatttaggaatatatttgtgttgataagaattattttcatttttaagtattgcaaaaacataagctatactaagaatgtaaatatttcttagtgacacattctaatgatttcttatattgttttaaattctatatatttggtattacaaacttctcttatgttttatttaattactctataactatcaattatagagaaaagtaatttttatttttattgtttttggctaattgatgagttcataggtgccgaaaatccttccaaactattatcgaattaaggacacaaggtttggccttctttttgaccgatagcttccagactttcactaagctaagaaccacttggtactcttgtttttttttttttttttttggtttagttgtttaaagaattatcaaaaataaaattgttttcgatttgccaaaaatagtattttactatgatacatttggatatggactcagttttcgaaacatattttggtatcaataattttgaaacgaattatttacattgaggatatactagagagatccattggtggatgtatataagtatacgagggaaagtcgggagaaaaaaaaaaacaacctccattgagccaaagaagaagtggtttggtgtgaggagaatgagaagatgactcggtgagccagtagaagagtgatcgaccatgtgactcgttcactgtcacgtaacccgaaa

SEQ ID NO: 7295 - DNA, 2553 bp, Arabidopsis thaliana landsberg
atagaaaaaacaaggcgtcgagccacttacacttatataaaattgtatatgacttccatgtccgttgataaaatttttaaaacttgcttgtccaatttctatttcatagagtgaaaagttttggtagttggtactataggacatccttattgaagggaccgaccataaaaactttacatagagagatctaaagaaaaaatatttaatgcatatggtttgtcattatgtctacatacatttgtgaatggtatatataaaccagtattttaattattttctctttggttttaggcatggtttaaccatcttcatgtattattttttttgaatcaatgagaatgagcttatgtaatattttacttcttaattttgagaaaatttaattaaaatttgcattagttataatatggaacatatctaaatttggatatgtaaacccattaaagtatgaacacagaaaattcgtttcgattcactaagaattaaatcaacacctaaaacatacgagataacacgtaacgtaattttcatgcgtgatgttgaatgaagataatctatatcttcacgaggaaacacaaaaagaaaagttggaaaaaatagcgtttgagatgcatgcgtgagagtgtgcgagtggggaactggggataaagagaaaggttagaaaatagtaaaacactctagagcgtctgactcacgactatttttctgctcgtcgtttggtttggtatgcgatgacgtttgtgtgactcaatcgcaacttgccgtaccaaaagtcttgccgtacttcctcttcaattactaaaatacccatttcctaatataatcttatctttaaacaattgtaaactaccaaagagttctagactttaatttcggtccatagtttttatcgaccaagaatcaaaatcatagttgttttaagccacggttctgagcaagtaggttaatcctctttgccggtacaactcgaagatgggacatggtcgttgtttctctaagaaagatcgactagtacaactactaacaccatgtgttatctctttaatttcttagtttagttaccaccatatatttattaactccactttgaaatattaaatcatagttacttgttgacaatttttatttttttatattaattatgttgatagttagatgataacaatatttgtgttgtggcaaacgcagttgtattaccaataagacaataacaatggttggtaccaaaacagcatcacaaatttagcaataacctttgaatcaatcaattggggttttgctatgtttaatgagtttaaaatacttaaatacataactaattgataataactgtaacaacaaaaaaagaaccaattgataataaacgaaatataataatttatgtctcctacatatattgttgtagatatcttttaactttcatttaggagatttcataaaaacttactttttcagttgttaactttttttttttttttttttgttgttaaaaaacttctttatactaattagttaggatggttgataaacattgaattcgaatatgtgtttgttccctgcattatcggttgagctgatgttgtactcatttagccaaaacactaattaaaaatccatcatctagtgtatggttatagaagttttatcttaattaagtgcactaactcatgtccttatagattctgtttacatgtctgtctcgtttctaatcggttaaacatgatgattaataagcaatcaaaggaatagtcagtttttgttttattttttgctattttgtatataataacacgaaactattattgaacgtggaaggtcaacgaaaaggtgtttattcagcaagaggaaagggtaaaactagaatttcagctctccgtctcacaactaaagtcaatgcaaaaaagctaagctaagttttcgcttatataaacacgatcaaaactcattattcaacaaagtcttcgtttcatttttcatttttcatttctcaaccaaaaaaaaaaagagtgattttttttttaatcatcagtcaaatggaaaggggaagatcagatatggagatgataaacaacatggcaaattgcttgattcttctatcaaaggcccatcaaaacgacaccaaaagccgtgttttcgcgtgcaagacatgcaacaaagagttcccgtcgttccaagccttgggaggtcaccgagccagccaccggcgatccgcagcgcttgaaggccacgcacctccttctcctaagagagtcaaaccggtgaaacacgagtgtcccatatgtggtgctgagttcgcggtagggcaggccttaggtggtcacatgaggaagcatagaggtggatcaggaggaggaggtggccggagtttggcgccggctacagcgccggtgacgatgaagaaatcaggcggtggtaatggaaaaagagttttgtgtttggacttgaacttgacgcctttagagaacgaagatttgaagctggagcctcgaacgtcctcttctgatttttgttcgtttttctttttagggtatacttgtgtagggtaagtttatt

SEQ ID NO: 7296 - DNA, 814 bp, Arabidopsis thaliana landsberg
tctatacgatccttagaactagaagtgccaatcttgattccatttatcttaatatcgaattagctctccataaaatggtaccacaatagagatgacttgtcccgggccagaatccaatataccgtcctgaaggtgaatccctcttaactaacaagactcttctcgtttctacttatatatgtctgtagtaatactctaggtctcttgtttatctatagtttcacctcgtgatgattcgtgtgtttggaggatgtctgtcgagattgtttctttcgcatcagtgagatttcccatgcattttaacatgaatctatacctctgttagggatatgattgatgtggctgctctagtactagtgctgcggtaagttttggattgtttgtgatttttggcgttccccatttgctctgatggatagtaataagaatttggatgattgagtatattagagatatggttgatgtgccttctcgttactatgctttgatttgcgttatttatagctctcttaaagatatgattgatttgccttacctgttgttttatggatcacaagctattgttttcgtctaaaagaagtgtattgtcatcgcttcggctagcgggtttactcatttgactcgtctaacctgaaagtttagactagaatcccaagaacttatggcaccatctaacctcttgataatgtctgtttcacaagcataccagttaggtataatcttcaaggcataagggtaaatatccttaaccgagttcttgatcgtattctccacaacttccgcaacgatcccaatttctgcaaaacacaaatgt

SEQ ID NO: 7297 - DNA, 522 bp, Arabidopsis thaliana landsberg
gtaactgaattattcttctttctttgcttccgctacaagttagggcttattgtctctttagttgttaaatctaagtaattgtgctgaggactgttgtgttttgcagaaattggcatcgttgcggaagttgtggagaatacgatcaagaactcggttaaagatatgtacccgtacgccttgaagattatacctaactggtatgcttgtgaatcagacatcatcaaaaggttagatggtgtcatcacgtcctgggattctgcaaaaatttcagtataaggaagtcactacctgtgaaaaagaagctttgggattgttgtagtctcgtttctgatgcattacatacatatatgtaaagtcgttggctttatggaagtatattttagacatcttatgtaaaatcttctttatgatatactgcattttatggtatgggccgaatagacatcaaataaattcagagtaaacaatgtggaaaaacaaaatctctattgtatcaatgttcactgtgaggaatgttttggt

SEQ ID NO: 7298 - DNA, 520 bp, Arabidopsis thaliana landsberg
  unsure (1)..(520): unsure at all n locations
acagatgaaatctaagacataccaacaactttgtattgatagaacttctcggtgacataatctgggtcgttagtattctcaaaagccaaactgaatttgtatcgcttnnnnnnnnnnnnnnnnnnnnnnnnnnnnntattaataaaaacaaatcacatcaaaaagacagctcgttgatctaccaatgtataatgtgcctgatttacttatgttacctttcccatgccggtttcgatgactaccaccataagaatcaatcttaacgttagttttcatcaatgcctcaagtgcttgtagacgaaaattccgagcaccacaattagaaataaacgcagctgcaatagctctctcagcttttggctgtgccggagacataatatcatactccgcccacgagaaatatccaacaggaacatctgatgatagactagtggtcatcactatatcataacctctgctgatgaacaagagaacacattacactgcatatacattgcaccaaaagacacgttgtgaaata

SEQ ID NO: 7299 - DNA, 812 bp, Arabidopsis thaliana landsberg
tcatcgaatactctcaggaatggagaactttcgcctccgacgacaatcacggtgacagagacccaaacctgtgtttggtgctgccacgaaccctttgctcaaatcaggcgatcttgtcaccatcatcgagaaaccttatgaaaaggtttcctctgtgccgtgccagaaatcaagtcaagaaccatgaagaagacctaatcaagatagccttcgaagaaatccagagaatgactgatgcactagacctagatattgtaatcaactcttgggcatgtgagattgtctccaaattcgatggtcacgctaacaccaaattacgcagagggaagaagctaaacgctgtatgtgcagcctctgtttcaacggcttgtcgtgaactgaaactgtcgaggacattgaaagagatcgctatggttgccaatggtgtggaccggaaggatatccggaaagagagtgaggtgataaagcgtattctagagtcacatcaaacctccgtgtctgctgctcaagcgattatcaacaccggagaactcgttcgtcggttctgttccaaacttgatgtaagtcaaagagaaataagggcgatttgagaagcggttgagaaagcagagaatttcgatatccggagaaaccctaagtcagttcttgcggcaattatcttcatgatctctcatatatctcagaccaacaagagacttattagacgtaactgaattattcttctttctttggatttaacttccgaaacaagttagggcatactatctcttaagtaattgtgctgatgattatttgtgttttgcagaaattgg

SEQ ID NO: 7300 - DNA, 674 bp, Arabidopsis thaliana landsberg
tagcatttgagtttgtaggtaagtttaacggtggagattcgaagtctggattttccaaaaaatctgcatatcaaaatgtacaaactttagtttatcaatttgagttctgaagatgaaagaacaaatatataacgaagcatttgagattccaatgtacctgaagaggcgcaacaggaaacgagaagcaacaggaaaattctctgaaaccatatcgccattttgcttcaaactacaaagaaaaccttgaacgtcaacgcttcttggatccagtgaatgtgtctattaattagtaaaatatttaacgagaagaatgatgctgtaacatgttagcataaagttgatcattaataaatatattaataattctctttcaccttagtggacttgtctttgagttgtgcacaaatgagaagactaaacacacagatggtttgaagaagccagggccatcatccatatagtagaactgtgtctttttggatctggttctagtgtttgtacatttcaggaaacaaaaggttggtgaattgagagtgtgaacaatgttctatttaatttggatactccaacctaactcttaactcactcttagactcttagtggttgggggtattgaccgaattattatttttaagcagtcttgaagacatacaaaacattgcattaatcgaaaa

SEQ ID NO: 7301 - DNA, 2422 bp, Arabidopsis thaliana landsberg
agaaacttttatttcccaaactgaatcaaaacagacaactaacacaaatcctaaacatattgaaaaaggcatggaagcaaggactttagaaaagaagacatagatttgacttactctgaattagccttaatataagaagaccttttacgaagggctttctttatatcactctgcaggacctctttgtcctcatcctttgtttgctcagcaacagatttggacgtgttttcttctgtcagaagtcccatcacaggagaatcttttgttttctcatcatcaccagtcatatcttccttaccatcttttttcgtcgtgtgctctttagataactctgctgcttctttcactggagttacatcatctttcttctcagtttctagagaattttctgaagtttcatcattctcagcacctgctaagcactgttatcaccaagaaaacatatcgaggcataattagtcagctgcaagtagtaacatattttctctatttcatgcaaaacttggcattaactgtatagcaaaggatacctgaaccaaatgttgcttaacaaagctcttatgcacatccaaagcatgtttctccaatttcagatcctcctccagcaacctccgcacaccttcaaaggtgaagttgctgcaaaaagcaaattccagatgattctgctttccataaatctttctatgcaattatcagaaaacctttaaaccattaaccctacaaacattcttttctatgcaaatcttagtctcatatactaaatgaaacggaaccattacagccctcgtatctccacaaaatcaaactctgaatcatcaccaaaccaatcttatacaagcctagcctaccatggacagttaatactacacaaacattgcaatttacagacctagattaataattttcttcgtttcaaccctattttcgccaaatttaacaaacatcaaagactacaaaacctagtttctacacagaatccaattctaaatcatcaccaaaacaatcttatacaaacctagcacaccatagacactaaatactactcaaacatctcaattcacagacctagattctcactttcttcgtttcaacaatatttcaccaaattcaacaagcaacacagaccataaaacctagttaatccacaaaatcaaactcttaatcatcatcaccaaacaattcttatacaaacctagccaaccatagacaatgaatactcctcgaaccactcaatttacagacctagacattatcatttcttcgtttcgccaaattcaacttccgtgaaatcgaagcgaacagagatgaagaaagtaacgattcttactctgctttatctctgaggtaggttactcgggactgcatagccgcgagaatctgtgactcgatatctgtttttggtggtgttgttgcttcaccgtccttcaaatcaatcttgtcgccggagatctccatagccgaagtcgtcgtcgagtcgccgtcagacatttctctcagaagaagggcaagtccagtggtaatctctgtgatatacactcgtcagtgggatgggcattcgggtaagcgggtcgggttcggttaaaacccgacggttacagatctttcgggtagaaaagtttaggacgcaggtggataaatctaaaatatcggtttgatttcggtttgcatctaatcgggttcggattggtttggaacttcgggtaaatatccggattttcgagtaaaatttcaggttttggataaaatttaaattttcaattaaaatattcgggtatttttagttttgagttcgagttcgatttttcggatagaagaatttaagatctaatagaataaatcttcgaattcagattcggttttaaatcgtcaatttcgatttgggttgtcggtttcggttttttttcccagccctactcatcacttcttcagttgggacgcgaggacgtccaacagggtaaaattagcggaaccagatgaggacaaggacgtaaaattatatagtttatttgtttgttaatcagcttaatataactctatacccaaccagaactataataaccttgtatccaaacagacttttcaataaatccttcaacgaacactttcatcgcagagaagaagaaaccagattcttctccttctctctttctctcttcctccaatggcgaaactaacaacagactctcctctctgccggaaaatcgtccgttctttcttaaattttcttgattccggtaatcaccaccaatcacgtttctcgattttcatttccgttttgatttagagatatttagggtttttaaatcttcttctatgtattttgttgttgttattgcagttgaggttgctccaggtgttgacgaagaagagtcttgagattgctagagaatgtttaagagaagcttttaaacttagttcatat

SEQ ID NO: 7302 - DNA, 2154 bp, Arabidopsis thaliana landsberg
atgtaatggttattagccaattgtcctgttgctgcagagaatccgacaaacattctatcctggataacttctgaaagattcatggatcttgatataagactttgacttggcttccgaatccctagaggcgccaatgaaacgtttagtacagttccatcaaagtccacccagacctggattgaatctccactcaagagacttatgctcttattgagaccttttttgtctgaaaagtaagaagccggagcagattcaacagaggttaggctgttcacgtcgataccaacatgattgttatcgatgtcatcaaattctgcactttgaacagtatcaagctcaatagcaaagatatgagatgagggagacctgttggttgtggtgttgaaaagacccaaatactgagttgcatctgcgtttgtaagatccatggaaggagatagaaagaaagcaatcccatttccaccggtaactcccggtttacgcaccatagcacacacgaaatgcgttgagaacgagagaggttcagatgaattgaacactaagggctgcctgaagaaagcatgaccctttttctgctctgaagtgtcagtcagccgcagaagtccaccgggaaggatttgagcaaccccatcaacatgaagatctccctggcgaaaaccgttgaagctgaagccagtttcttgttgacttgacagatgaatcagaagaagaaaggagattaccatccagatcagatccaatcctggagccattgttaatgcaacaaagtgtttgctgttctgagaaaaatcctgtctctgagtcaatggtatggcaaataactatcctctccatctgcgaaacaaggtcggattattacttcacaagaagaagaacattctgcattttccaagagaattggtaagagttgacttcaacaatatgatagctgtcacattttagtcttctttgataaaagaattcagaagttccacataataaaatttccttgtagtttcacagttttgaaaggcaagcttctcattgattgtcataccaagtcctacttgtcttaaacgaaataaaatgttgaattgtcactatctccgagtattttaactctttaaaagccaagagcctactcaaatgtgcagaaacatgcatctcctaggatacgtgatttgcaataatatattgcaggtacctgagatctggcatgaataaggttagttacagactaaactgttgtgtcttttgatatctatcagttttccaaaatagcataaccattaaaagaaacaaatccataactatatcagctttctcaatacataacaatttatcactgtactcaaatggtgacaacaacttgctttacaaataatgaactaagtaattgcaagaatttacctgaaaaatcagttttttaaaaatcgttctacaagctaagcttcatggagaatggacatggtgctaccatatacattaatgaaacaaaatctgaatagaaatggctgaaaatcagtcaatattaagaggccaaaagaagagggaagttgttagaaactttcatcgcccactcccgtagaggactgagtgagtaataaacatagagttgttggaggaggaagacgaaaatgatagtgaagggatcacgagtggtgctggggaaagcgccattggagacagaactccaatccctggagaattgggccaaaactcgggtaaagctaggtttccatttaagtattgcaccacttgttccatggccggtcttgaatctggagcaaggtttgcacatagcaaaccgagtttcagaaccttctcgacttcctgggatgagaattctgtcaaccttggatctctagcatcaatcaaagaagaccttttccagcattcactaacccatttgatcagaaaacgttttgcttcaggtaagccgggttccacaggtctcctcccacaagttacttcaagcaagaaaacaccaaacgcgtacacatcagttccagtagaagctcccattgttgtaagctcaggtgccatgtaaccaacagttcccactgcagctgttgtgcttggatcagcccctctgtcatataacctggacataccaaaatctcccaacctttcattgaactctgcatccaacataacatttgcagctttgatgtc

SEQ ID NO: 7303 - DNA, 2343 bp, Arabidopsis thaliana landsberg
  unsure (1)..(2343): unsure at all n locations
tcagttgagttttttacaatttcttattccatttaacacgtcctgacaatgcttgagcatctttattccttgatttgatgcaactaaatctgtgagcatgaaatttgtanaataacttcattagtgccaaatattacgttgaatgtaatcctatanaaaaattaaaaaacgtttttgatttcttaatttattaacctggttgactaggaatcccatatctttctttccataattgtcttagtgtaggttttgaaacatttctttaaaaacaacattcattgtttttttctgtgattttcctttcttgtctgttataagaatcttcaaacctgatatttgtggaagattaataatcgtatacatattatagtaattaaaatggtgacttaaaaaaacttcgtaccagtttttgacgtcactctagagattgccacgtatagttgtccatgtgaaaacacaggcctaggcaaataaagtccaacagactctagtgtctgcccttgactcttatttatggtcatggcaaaagctacagatagagcaaattgcctacgcctcattttgaaaggtaatcttgtatctgatggtgtgattagcatcctatgaatcagaacaatcttaccaactctattacctgtaataaatctagcttgtattacagtatctgccatttgagtgacctttaatcttgtcccattgcataaacctttattaggatccatgtttctcaacaacatgaccagacaaccaactttccagagcaacaaatattagacataatcagagtaataaagaaattaaaaaaccgtaagtttctttcgaactataacatagttaagaaaatccagttgagttttttaccaattcttattccatttaacacgtcttgacaatgcttgagcatctttattccttgatttgatgcaactaaatctgtgagcatgaaatttgtaaaataacttcattagtgccaaatattacgttgaatgtaatcctataaaaaaacaaaaaaaaaagtttttgatttcttaatttattaacctggttgactaggaatcccatatctttctttccataattgtcttagtgtaggttttgaaacatttctttaaaaacaacattcattgtttttttctgtggttttcctttcttgtctgttataagaatcttcaaacctgatatttgtggaagattaataatcgtatacatattatagtaattaaaatggtggcttaaaaaaacttcgtaccagtttttgacgtcactctagagattgccatgtatagttgtccatgtgaaaacacaggcctaggcaaataaagtacaacagactctagtgtctgcccttgactcttatttatggtcatggcaaaagctacagatagagcaaattgctacgcctcattttgaaaggtaatcttgtatctgatggtgtgattagcatcctatgaatcagaacaatcttaccaactctattacctgtaataaatctagcttgtattacagtatctgccatttgagtgacctgtaatcttgtcccattgcataaacctttattaggatccatgtttctcaacaacatgaccggacaaccaactttcaagagcaaccaatattagacataatcagagtaataaagaaattaaaaaaccataagtttctttcgaactataacatagttaagaaaatccagttgagttttttaccaattcttattctatttaacacgtcttgacaatgcttgagcatctttattccttgatttgatgcaactatatctgtgagcatgaaatttgtaaaataacttcattattgccaaatattacgttgaatgtaatcctataaaaaaactgaaaaatgtttttgatttcttaatttattaacctggttgactaggaatcccatatctttctttccataattgtcttagtgtaggttttgaaacatttctttaaaaacaacattcatttgttttttctgtggttttcctttcttatctgttataagaatcttcaaacctgatatttgtggaagattaataatcgtatacatattatagtaattaaaatggtggcttaaaaaaacttcgtaccactttttgacgtcactctagagattgccacgtatagttgtccatgtgaaaacacaggcctaggcaaataaagtccaacagactctagtgtctgctcttaactcttatttatggtcatggtaaaagctacagatagagcaaattgctacgcctcattttgaaaggtaatcttgtatatgatggtgtgattagcatcctatgaatcaaaacaatcttaccaactctattacctggaataaatctagcttgga

SEQ ID NO: 7304 - DNA, 1285 bp, Arabidopsis thaliana landsberg
taatatgattacaaatttatatgcaggtttgcaactactatagcttttgaatttcggtaaatctttctatttaggacaaacaaaccttgaagtataaggcgacatcaacatctttattaatatgtgtataaaggttagcacttgattcctacaatcttatattctaatgacatgttgactacatcatttgtatatagttttgcaatacttcaagttagttatgttaagaacaactctaatctgattacaaattcatatgcaggttagcgtctgcctatagcttttgaattagtctatatcaatctaagaaggacaaactacccatgaagtatcaagcgacatcaacatctgtattaataagtatgtaaaggttagcacctgatctcctaaaatcttatattcttaggacttgttgactgcatcatttgtttatttaggtaaaatattcaatctcatattcgagtattagacattttcagagtaataaagaaatgaacaaaccataagaagttctttcgaactataacatagtaaagaaaatgcagttgagttttttacaacctcttattccatttaacacgtcctgacaatccttgagcatctttattccttgatttgctgcaactaaaccagtagaacataaaatttgtaaaataacttaacttcatcaatgccaaatattacttttagtgtaatcctattaaaaactgaaaacgttggtgatttcttaacttattaatccggttgaataggaatcccatcagattctttccatgattctcttagtgtaggttttgaaacacttctttaaaaacaacatttattgtttttctgcggtttacttttcttgtctgttataataatcttcaaaagtgatataagtggaagattaataatcgtatacatattatagtcattaaaatggtggctataaaaaacttcatactttttttttgtatgtcactctagagattgtcacgtatagttgctcatgtgaaaacacaggcctaggtaaataaagtccaacagagtctagtatccgaccttgactcttgtttagtcatggcaaaagctacaaatagaggaaattgcctacgcctcattttgaaaggcaatctcgtatctgatggtgtgatgagcataggaatcaaaacaatcttaccaactctattacctataataaatctagcttgaattacaatatctgccatttatgtgacatgtaatttcgtcccaatgcataaacctttattaggatccatgtttcttagcaacatgactagac

SEQ ID NO: 7305 - DNA, 742 bp, Arabidopsis thaliana landsberg
ccgaagaaattacatgaagtgaatcgaaccagtctgtaccaaactcaaggaaaggtaatgatgaaaaatcttaggtaccattttgctcacgtttcaatgtttttcttttaagtaattacactattggcatatctttttaggaaaaagagaggagtgaaggaatgatgaaaagagagagggctctagcttatgcgtacacttaccaggttggtcgccactctgtttctgttagagaaaaattccctcttaattgtcataaaatatgctatgcattataggtccttaaacatctcataatagttttggttttcatattgaagcgccaaatgcaacacacaaatagtgaagaagggattgggctttcttctaatgggcctgatagaaaccaatgggcttggaattggcttgaccattggatgtcttcccagccatacactggccgtcaaactggtccgggtcccggtcccggacagtacaatcctcctgcgtatccgccttttccgacagctgcggcaaccaccacatctgatgatgtatcttagaagacggtggaaatggacgtgaccactccgactagcctcaagggcaatataatcgggcttattgatcgagagtatatagacttaggatcatatagacaaggccataagcaacggaaaagcccaacccatataccaagctatatggctccaaccgcatctgctaaggctaaagttcgagatcaaggcccaaccgtcaaact

SEQ ID NO: 7306 - DNA, 2445 bp, Arabidopsis thaliana landsberg
aacatcaatatagctggtaaaatataaaatggaagaaatcagaatctcgccggggctatagcttcaccgtgtcgtgtcctaatctattgtcgggaatttgaagctaaagtaacattacaatgaggaaaccacgaacggcagagatggtgaattccggttatttaaccacgattcgatactagtaaattgatatttctcttacattattttgaaggcttcttattttaatgaaagttattttttttttaaataggtaacacaaagttggcatcttttttttgcttactaaattccaagcaaaatagagaaagaattgatatgcgtgcaagtttctgtccaaattcttgtcttttttggaggtgtggtgttgttttatcgacactccactttacacttcacaagtcacaacacttataacaaaagtgatcacagaggccagagttgagagtttgacaccgtcatcaatggcagaaccggaggtgattcactcatggtctgcaccaagatctctcagcaccagcctcatgtactcctttgctcaggtactatacccaactttttcctatcttcttgacaaattttccaagtgttaactctaaagattatgatcatccaaaaccaaaactcaattctgctttgctcgttttgtctccactgagaaaaaattgagtacgtgttagctccaaagagtaaagactatgatttatctaataaataacttggaaagtttggaagaacaaaaaaaacatgagatcctagaaagaatgaatcactatggagatgatttagtgttcctttctttgagattgatgttgtatctatatatcagagacttgacactgaagttgtcgacgagccgttgtatgcatcatttcttaaagctacaggttttgataggccatacagagacgaagttctctccaagatggtatgtaactgatttgcacttcagtagttagtctttcttcgagtacacgagtttaattttccctcttgtaatttaaataggagtgcaatggagagaaagttgtgaaagatgtcatatatggatcaggatctaagaagtaccggtattgtaaggtaaaaatcctctctgattgtttgttttggacgcttcaaagttcatattaccaaactttctttgttgtgttgttctgtttttccctctgaacagcatatctcgaagcagcggcttttcggtttgccaagtgaactgatgagtagaggaaagcatttcatattaatacgaaatcctcttaacatattggttagctttctcatcaaagactggttctctgcagatttttagccaatgtttcatctaaagttcttctgtgtttattcgttttgcagccttcctttgagaaggtacaccctccatcatttctcgaattaggcttgggggaattagtgtcgatatacagtgatctctgtcagatgggaacaccaccagcagtcatcgatgcggatgagcttcagcgagatcccgaggttttgtttctgtaatatttaaaacagtaaaagtttcacaaagatgtctttttctcttacatattattccaaccatatccatgcagactacacttcgcggtctttgtgatgatttggagattccatttcaagcctctatgcttaagtatggtcctctcctatgagacacttaaagtttgttttatatcaaagcattaagtttcacttttgtttgttatgttctcttgaagatggaaggctggtcctataccagaagatggagtatgggcaccatggtggtacaagagtgttcacgaatcaacgggtttctcatctccaaagaagtatcctcgggtaaggctcttgtttcttgtgtggttaataattctgaattcagtctaagatgtgtttggtattgttcttttccttcagacatttcctttgtcgcattacgatttgctggagcgaagtctaccgctttacaacattctcaggagccacgtgaagcacagttcctccctcttgagtagtcccttgcctcctcctagtctcccagttcctgaaaatgcaaaacttcttgcatgggtcggtgacgagattttgcctcgtgaaatggcaaaggtgtgcttgaaatgtggaagaaaacttaacagctcactgtttgttgatttgcattttgaacactgattatgttctatttcttcttatttttgtaaggtttctgtttttgactcggttgttcaaggcggtgactctgtatgggaaggacttcggatttacaagggaaagatattcaagcttgaggaacatctagatcggtaagaacagttatatccagaaaccaagaagcaaataacagagttttctaagcaatcctgttttatatgttggaatcttgggttaggttgtttgattcaccaaaggctctggctttcgataatgttccagcgcgtgaagaggtaagcatctgatgat

SEQ ID NO: 7307 - DNA, 4986 bp, Arabidopsis thaliana landsberg
  unsure (1)..(4986): unsure at all n locations
cggtggcaatgatacatgaattctgatcgtatggcttctgattatctctatggtatcctttcatttatttatgcaggggaatgaattatttgcacgaacataaacctgaagcaataatccattgcgacctagaacctccgtatgtattcctcttgactgtatccgtataatttatttcattacacaatttttctattgtactatgtttcatatatccaaaaggttctcatttgttcgagtaagagaacagaaacatactgcgggatgattcgggacatctgaaagttgcagactttggagtcagcaagctgctggtagttaagaagacagttaaaaaagacagacctgttgttnnnnnnnnnnnnnnnnnntgtaagtttctttaatctgacgatcttaaaaattcctctgtgaagttgtgtatgttcttgtcttgagctagcttagagctgttagctttaatgttttattgtctaaagctaaactacaaccaatctaatggttattttggaagggtctatgctgatgttactctcttttttcgttctggctaagcagggcgatatatggctccagaggtttataggaatgaagagtatgatacaaaagtagatgtattctctttcgctttaatcttacaagaggtaaagtaatcgagagagctattaagtttttctattcatagagtaaaaatcctccggcttaaacaatttataaacagaatgttgttttgtgggttaacagaatgttgttttgtgggttaacaaaacctaacagatgatagaaggttgtgaaccatttcatgagatagaagaccgcgaagttcctaaagcatatattgaagatgaacgtccaccattcaatgctccaacaaaatcatatcctttcgggttacaagagtaagtttgtcgaaaagtgtcctgtttttgaaaccaacattcgttcatggctcctctctgaaagtcttaaaatctctatctatttgccaggctaatccaggattgttgggacaaagaagcatcaaaaagaccaacatttagagtaatcatctctactttggagttgataagtgatcgaattgcacgcaaaaggagctggaaggttgttattcattcgctatctctcccttacatacacacacacacgcgcgctctctttagtattttaagtatctgagactgtttgatggtaattactacacaggtgatgctaggaagatgccttccaagattcagattgtttacaaagcgagattatgtgaatcccggtggtagtaaccgctcatcaggctcattcaacagatgagtgactgcaaagagctttgggtttgattttctttaattgccttaaaaggatgaaaaaatgtcaaatactgtataggtcttttgtatttatatatgacatcatgactgttgttcttaaccagaatgaacacgggggtgtgtattattttttacgcagtggtcgaaataaaataatgagatctctgagctaattctcgagttatttagtgtaattagtatctgaataagttgaagacgttaaattactatatgtaaatcctttttttttgttgcgtgaaaaaaagaatagggagacctcccgccactaaaaagggtctgcagtcgggcgagtaaaagtgtcaatgactgtccgaagacgagcattctccaaccatagctccctctcttcggttgaaatgatgggctcctcacaagatctgcaaatcgatggagagggcatagcatgaatcctagctctgccttctgctctcagcagatcacttcgctggtggagaaaaatcctcgtacgacgacgaggatacatataggaccttttcatgtgttatagtcaaagaaaaaaacaaaaaacaaaaaagttaaacaactattgtgaatttgtgatatgttgtttaaaaaataaaacctcgtttgtttaacataaaacctaaattgaaaagaattgaaactttagtcgaagatttaagaaaccatacctaccttgataaactcacagaactcctcaaacgatgaatctgtagagaaaaaacttctgctagttatgagtgactgagtattcattctctgaaaaccattaaccatatatatatataaacaagaaaaactattatgggtaggttaataaacgaaaggctcacgagattcatatttttttgactaaaatgagacaaatgttcatcattatttattgtaatttttagtggattctctgccaataaattcccttcttattttgcaggtaatgacttttttattcttaaagatatataaaaaggcgttacggttattcagaaaatacttattctcgtaacgcttttttacaacctatctatgtttgatacgttgacatgaaaccaaaacatatgttaagatgttgctctaaacttccgaaagattaagccatcttttccggtcctcgtgtccatttatccgtctctacctttagacaacatagatatttgccaagggtgcaaagtcattctaaaaaaatattagtaaagaaaatgatcccaaattttagaaaaaaaaagttttttagtaaaaaggttaatttattttggttttaccaaaggccctttaatagattaagacggcacatcacacataagatagtttccatctactctgtgtgaccacagaccatataacatcgtatgagtgttccgtaggcattcaaagagtaatggcacacctctagctgctacatcaacactaaacccaaaggaacaatgtttcgaaaatgtcatacgacaactattatgtgatgagttttcaactggattaaataagtctagagatttcattatggtcatctcgactagcatcctaagtttaactttaacgttcaatatataccttaagaagaagcgacgaaaatcttttaaaacaaatatcaagatgcgcttggtacgcggtgaccacatcttgatccaccatgcaattccatacatttattccacgatcaataagacacatattaccggcatggttattatgatcctttttctaagagggattttacccatctaccacaaataacattctatatctctaaactaatattcctaatggtctacacattcgaataaaacattatcatcatctcttccggaaaaaaatctctttgatatcattccaccaaatatcatattaggtcttcaacgattttcgactaagacctaaaactttactcattactatattttcggaacccgattattcatttaataatgttgttcatattaatttaaacgttagagagtcctcaacataacaaatatatgttgtttttccgatattattaattgatagggtatcaagtccagaagtttagacatttacacgagccaacgaaactttcttaagaacccccaaagacaaaggaaacaagagcaaagtatcatacatcacacttttatactatcgaagtatctgattgagatactcatcaattaaataataattaaaaagagaaaaaatatgaaagaagagagaaaagtggagaaacgtttctggcaagaaggatgattctgagcatttattcagagttgtcattcaattaatggttcatttactttaaactaattaaaatatattaatttaattaaaatattaatttatttattttttgagatactctctaccacttttgtcgatggagatgctcttaaagcacatttggaaatccagcgcacgttagctccgttacgatacagtgtgcaatagaccacggtacaccgtaacacgtaccacaaaaaccggtattatacatttacacgtggaaagatttaattggttaacagaaacccactttctcacccactctcaaggtttaactcttcttaccgccttcaatccaaaaaaaaaaaaaaccaaccaaaacaaaaaaaacaataaacaaattacagacagagaagagagagatcactatggctgtcggagatgatgatctggagaacagaatgtcggcgaaagatcgaggaatcggaagcagaggcggtgatcggaatcgaatcggaccaccgcctctgccggtagccttgtcgtcgtctactgaatttggcgataacgcgttgtcgtcgcggtggacgtcgtggcttgttccgatgttcgttgtggctaacgttgcggttttcgtcgtggcgatgttcgttaataactgtccgaatcatttcgagtctcaccgtctcagaggtcactgtgtcgccaagtttctcggtagactctcctttgagcctctccgaactaatcctctctttggtccatcttctcacacgtacgttttctaaattttgtatcgatgttgatttagggttctaaatactagagaatcacgttttggttctgtttctcaagtttgtcggttactaaatcgaaatttactggatcttgagatgttgaaatgatgaagttatgtgattgagagtttgagatacaagattttgatatgattgtgttttggttgatatatacttgaagattggagaagttaggagcacttgagtggagcaaagttgtggagaagaaggaaggttggcgtctcttgacatgtatatggttacacgcgggtgttattcatctcggagccaatatgttaagccttgttttcattggtattcgtctcgagcagcaatttggttttggtatgcaatttgggtggatttagtcttcattcttctagttgtgttattctgttgctagaaatctgaatcttggtttcttgaaattttcagttagaatcggagttatatacctattatcaggaattggagggagtgtattgtcgtcgttgtttatcagaaacagtatctctgttggagcttctggtgctctttttggcctccttggctcaatgctctctgaacttttcaccaactggacaatctactctaacaaggttaataccaatctgcttttcatttcaaacatacaaatcactccatcatgttggctcatgtgtctgatc

SEQ ID NO: 7308 - DNA, 963 bp, Arabidopsis thaliana landsberg
attgctatattatgaaattttcacaaggaaaccatttcttttttttaagaagattcttatgttctgtgccattcttctattttcaggctacactacgcagtctttgtgatgacttagagatcccctttcaagcctctatgcttaagtagaccctctatgctctagtgatctcttcgatttgacagttaatggcaaaagcaatgactgtatctttattgtttgcgttctcttaaagatgggaggctggtcctataccagaagatggactttgggctccatggtggtacgagactcttcataaatcaacagggttctcgtcgccccagaagtaccctcaggtacaagacctgttttcgctgcaatttaagatcctgaaactcagacatcattcaaactacaatgtgttttgttttgctttcagactttccctttaatgcattacgatttgctggagcaatgtttaccgctgtacaacattctgaggtgccacatgaagcacaagtcatcgctcttgtccagcaccttacctcctcccagtctcccagttcctgaaaatgctaaacttcttgcttgggttggtgatgagattgtgccacgagagatggcgaaggtgcttgagccatacatggatctctgtttgttatttcttgtttatgcttatgttctgatgttatttgtctttattcttgcttaaggtttctgtttttgactcggtcgtgcaaggcggtgactctgtatgggaaggtcttcgtatatacaaagggaaagtatttaagcttgaagaacatctagaccggtaagaagcaagtaagagaaagtacttcttcgaatcattcttagtaatatgttgaagtgttgcatataggttgtctgattccgcaaagcctctggctttcaacaatgtcccaacccgcaaagaggaaagtatatgatgaagataaaaatcattgtcattgtttggaa

SEQ ID NO: 7309 - DNA, 608 bp, Arabidopsis thaliana landsberg
cttctctctaagatggtaagttaattcacattagtcaatttaggcatagaggagaaatagtataatcgtctttttttctaataggagtgtgatggagaaaaggtggtgaaggatatcatttatggtccaggaaagaagaaatataggttttgtaaggttatactcacttctctttctgatatagagacttcaattttgttctataccacactgtgtttggaataaatttgtgtttctggcctttctctgcacagcatatatcgaaacagcgacttcttggtttgccaagtgaactaatgagtgaagggaagcactttatattgatacgcaatcccctcaacatattggtaagcttctcaaactcacttctggtgttatgttttcgtggagattcttctgggttggttttgtcttgacgtttatgggtctgatcctttctggtttgagatgtttcctctctttgctttcgattctttgacttttcttgcagccttcttttgagaagatacacccttcatcgtttcacgaattgtgactgggagagttagtatcgatatacagtgatctctgtcagatgggaacaccaccagcaatcatcgatgcagatg

SEQ ID NO: 7310 - DNA, 945 bp, Arabidopsis thaliana landsberg
  unsure (1)..(945): unsure at all n locations
ttcagtgagttttgtgataaacaatttgtgttgagcaaaggcagatatcaaggtcagttttaatgtgtccgatatttgggatctagaggagtcgttcgagagaagcaatgtcggtaaatttctcaccgggctctcaagcgtaagggacatgactataagtggaacaactttgaaggtatatatgcatacaaatatataaaactgaacatttgaatgtgtctctttggatgaaaattacattttctttgtattttgcagatcatttgtcactacctgaaacacgaaccgatgcctcagtttcgtaacatgacgcggttacatgcgaaattctatgtttgtgatttggaaatgttgccatgcgttcttgagagctgtccaaatctcaaatcccttgtcttggtaaatgattttttctttaaaaaccacatgtttcattcatctgttataaaagacgtttattcaactgtttgggataattgacatacgtatgcagaagctgaaaggtgaactggaaaatgaagaaattagtctatcatcatcagtgccaaagtgtttacaatcaagccttgagaatgttgagattataagaccaaactatggaagtggagaagagatgaaactatcaaaatatttccttgagaattcggtagtcctcaagaagtttaagctatgcagagattgtcatagcgaggaacaagagtctctcgtcgttagggaactcatgacattccagagatgttctagtgcttgtgaaatcaacgttgttagatttcaaagataggcttggtaatttgatttggctattatgcatcaattttggtgtttatactctataagtaataaactcaatntgtgtttgcaattcgagtcttctttctcatttcagcanatattcatatacttgattacatangaaagtagaaactgcaaatactcaaaatagct

SEQ ID NO: 7311 - DNA, 1253 bp, Arabidopsis thaliana landsberg
  unsure (1)..(1253): unsure at all n locations
atgttctatcgtgatgttcgtttgatctgtctcaaacgtctccacttaatattggttaagttttcaagtgattaatctgtgaaaacgcttctaagcatatgcccaagtcttgaagatttggtagtgaaacgaagctcccttaccaatgttatgatatttactatcgatgtgcctatgctgaggatattatctttcattgattcaaataaagactttgttttactttgattctactctggtttattaaaaaaattctcgtttnnnnnnnnnnnnnnnnnnnnnnnnnntgaatcaagtcatatccagcagtagtccatttgttataagcatcggtacatacattaatcataaagagtgcagcttcacgttcgctcatttctgggtggaatcttttcctaagattacctattggatctcctctgctaaagcaaggcaatccactttctagcatcatttgcaccgtgctaatgatttcgtccatgtaccggcgagcagctaagtatcccttgacgcacaagctcacaaactgatgccatgttttgcttttcataacacctgaaggatctagcaactgggtcatttcgtggctcagtttgaaatgagcattttcgaacctcatgtttccaccaggtgaagtttccaaaatgaaaccaaagtcgatgtggacaagtcttcccacgctgcaatagcataacacatggtaaatacatatattttgtccatagaaagtttttgatattaattttcattgcaccaagtgaagaagaaaaggaaagtgcaaaatcgggagcttactcatcgaaaaggagatttccgttgtgtctatctttgggctggagtaaaagactagccacagcatacccggcactgcttatgaggaagttcgctcgtgctgtttcaaaggtggttgagccaacgagtccatagttttgttgaaaaatctcatacaaacccccgtcggttgtttcacccatttgacttctgcttcgtgtatttggcacaacctgttataaaagaggagaaaagagagatcgaaaaaacgtttgatgcctgaaaataaatacttatacaaccatatctattttatccagccatggaaatggtgtaagattcaacattttaaattgaggtttacctcaataatacccttcccggcaccagttggaagtactccatatgggaaaagatagagattcagaccaacagcttgaaatatgtctccaagaagagatatcacttgcagggcaagaaca

SEQ ID NO: 7312 - DNA, 670 bp, Arabidopsis thaliana landsberg
gaggtttcttctaggcacaaattaagaattgtgactaagaaatctgacatgtcttttgcgtcctgctcgctgaaatcatatttctccttcaagactttgctgatgggccaaaaccgcaaccgccggatgtgccttagctcaccttgtcggttgaagaaatctcgtgagtatcgaccacctaatgcaatctacggttgaaaacaaatgaagctcatcaatacaaaattaggctctactattttctgagtttcaaccatcaagatttgcagtcatatgcaaccaaaacaactaagatccaactttagaaaggattcgatactagagatatatcatgcaatcttatatggtcacaacacaacgactatgtttatcagctttacctttcgtggcatcatccctagaagctccatcatcaatgccaggtgatcctgaaacaaaggcaaccagttcaagactgcacataatagtgatacaacttagctcttcataccaaactggcaaagaaagtgaatatatatgaacatacctcatcccggtcataattttcaccactgtgaggatcgaacaagacatctccggtggccagcttcgaaacaaatacaagcaaaggaccacatatctgcagaagttgagtattttgagccaagaacaacctctggacatcgatact

SEQ ID NO: 7313 - DNA, 1270 bp, Arabidopsis thaliana landsberg
tcagttatcgcaaaaatgaataacccaccaacgtttaccatgaagccacatgagtaaaaaacctacccgctacccctatgcgaacactttgagtagaaagcaaattcagcgtacgttcacacaagaatagattttggagacactgagaagacgaagctttcgaaagtaaacaaagctttcgataatttctcgaaaatatttgttctgtggttggcttaacactcaatatgcaccaacattctcacatcacaccctacttaagcaaatagtttagctatctatatatattcaaactttaagttggcacaattttatgtctatatcatatatactagatgagcaaatcgaaagatcaaaagcaatacaagccttacagacaaaagtgcaaaattggctgcttttcttttgtacagatcatttgcctggagatgcaaatcttgacttctctctatgtcggctcaagcttctatctctcggggatgatcccatccctgcttgccgtgtaatctctgcaacaacatttgagtttgaatacgtatgatgtgtggtctataaatgagaaaccacaaaaatgacgaagaattcatgaaaaatgcagttacctcttcgctttctttcaagttcttgatcaagctcttccttccacttcctctctatctccgacagcgcgacactgcaaagccaaaaacaactcaattccagatgtttaagaaaaggagataaatgtcaccattgaaccaattgctagcaatggagggcaatcatatcttaagacaagcaatcacactactacagttttagttcctacttaacgtcaacgaatgaatctagataattaatgttaaacctcaattttgaagaagaacaataactgttattggacttacctttgactgtttgattcttgttcagcaccagcacttgcattgctattcttcggggcaccagagctattaccactttctggactcttggaacaacaggctgcatctgttgctctagaaggtgatcgaccaatatggccctgactcggagaccgactttttggaggcagtttcaagaaaccacgaggtgcctcctctcgtttattgatattgatgttactctccatgcagatgggggagcatgtgatcataccgttgtagaattcttcgtacagaggcgtctgtaacttctttaactctgcagcctacgatttaagatattttcacacctcaaggtcaatgtttataaaacttttttgcggtttgggaaaattatttaaaaaatt

SEQ ID NO: 7314 - DNA, 522 bp, Arabidopsis thaliana landsberg
tggaaactcacacacatctgcaacaaaatctactatatcgggtaagagcaaccacggaagccacctatcgaatcttgcagcgggtttatgtcgaagattctcattgtccgaaataaaacacggaactcataacttcgatgagtcaaacgtaatcggagtaggagggtttggtaaggtttacaaaggagttatagatggaggcacaaaagtggcaatcaagaaatcaaaccctaattcagaacaagggctcaacgaattcgagacagaaatcgaacttctctcaagattaagacacaaacacttagtctcattaattggatactgcgatgaaggtggagaaatgtgtctaatatacgattacatgtctcttggaacactcagagaacatctttacaacacaaagagacctcagttaacttggaaacgaagactcgaaatcgccattggagctgcaagaggattacattacctacacacaggagcaaagtacacaatcattcaccgtgacgtcaaaacaactaa

SEQ ID NO: 7315 - DNA, 1465 bp, Arabidopsis thaliana landsberg
ccttgaggacctacccgaaccgacaatgaaatggcttttggaccatttggttgttgggtttaccaacttacttctcacccatttcccccaaacacaaaaatatttaaataaaatatctcaaaagttacaaatcatcaagcacacccccacaagttacattatgaagacaggaacataacatcatacatagagagagagaaaatgaagctaaagtcttgagctttagatttaacataatcatccccaactgatagtagagggaaaaatcatagaatacaaaagaaacccctaaattagtttcacaatcatggagccaaaacatgaatgtaaaattgggtttttggggttgagatacaaaacccaacaacaacaacaacaaaaatagcaagcataactagagaaagaagtaaactagcaaactctctcacttagtattaactcttcattgaggtaagagttaaaccaggggagttctttttttcttactttctcatcacgctaaatctaaacccacaatggagcataaccaaaagccctaatgtacaaaaagatcactctcacttgaacactagaagtgagattaatctggaattgacctatgtatgtaatggtatattagatgactattagtactacttgagtaagataaaagatcagtagccagaaatgttttcattgcccggtcattggagaagaactttctgatacttagcttctgaataggatccatctgagaatactcttttcctgttgaacttcccacatccattgttgacaattgggcattggactgtgaccggagggatctcgaagctcttgagaggcggtggcggatggcgccattgaggtaatggaccagctaagagtagtgtctgaagtaaaggccctgccttaataacagcttgtaaaagcttacccttctcaggcagtggcttgtcttgcaacaatggatccatgataatctcagttcctgagacttcttcaagctgacatggtggtggattcatgatatgatcagttggtgacataatgctctcctcgcaatcagaagatgagaagctcttgttggatcttagttgttgaggctgcacttgttcgtcttcaatgcttgaagctccagataaaggaggagtcatatgcttttgctgctgaagcgagtggctatcgaacatgagacgctgacatttctcgagagcttcgtctctttctttgatggttttggttaagatgtctttgagatggatcaattgctcgtctcttttccttatttcttcataagcaaacatctttgtttggtccagctctagtgttgtgtacagtagagactgtcttatttcttctgttgtctgtaaaaagtcgtaaaaacactcagacacataaatcaagaatcagagtacacacaccaaccccccaaaagaagaaagaaacatggaacccctaaattgagcagcctcttgctaagaaa

SEQ ID NO: 7316 - DNA, 1530 bp, Arabidopsis thaliana landsberg
cgcactatatatataagtacacacctctcacaaactcaatggtgttcccaaatagagtaaaagtgacgaaaattaacagagtaatcgaaaaacttacactttggagaaatctgaaaatcagattctgaaatcaaaagtaagaagaacagtgagctaaacagaaacaataaaaaaaaagaagatcgaattagtaaacagaaatcgaggaatgtacaatgggttgagtcataatcctctgaactttggtgctcgccataattgcctgaagttgcaagtgttcttcggagctggaaaactcagtgaagaagatagattttctaaaaccctaaaacttgcaatttctaattcgatttttctctcttcctcgcgagacagaacaaatatttcacacttttcgacttctcaaatatatgttttactcttcccatcctcgaaaatctgctattttcatttttctccccacaaaaacattatttaactttttagacccattactactatctccaaaacactgaaaaacgacttaagaaacagagtttaaagacagcaaaatcatgtttacaagatttcaaggtctacctgaagatgattgcttatatcttaattgtatattaatgactattgaataaataaccatctttttttgataaaatacacaaagttaaatgcttcactagcacaacaacagccgtagcaaaagctcaacatagatcactattttgactaattgatggaacagaaatacataaagaatcatgcttttttaatccttttacaacttcttgaaaagagtttcctcgatcattcgccattgatcattaacgattgaaaaggaaccttttttatctctacaaaagtcgaataatcactcttcatcggttgtttccatggctcaccatccatttgcaagaatgcatttttccaatcacctcctcttagttcaaatctaatcgcagccgcctaaaacgataaacggtttaatatcaaaccgaggttaaacctattcttataaagaaactttggatgtattttgttgtacctgagcaatgtgcttagctgagataatttcagccattacaaatgacgcatgccaaccttgctttaaaccgaagatctctatcagtccgtcatcacaatgcgcctccacaaatcctctctgttataaaacccgaacacgttctgttaaagcttgtagagaaagcaataaaacctaagattagtgtactgaataaaacattattaccttctctaaatattttggtctgagattaccccatggatgtcttccacttccatagttataaagattcaacaccacaatagatcttacgctacaccaaaacaaaaccagagagattataagtgaagccatttttttagttttaatcaaagataagattagttttatatgaacctcttaggaacatggatctcttcccactcggaacaatttgcctttttaatatggattttcataatggttcttaatccccctgcaaattcatcttaccacatcttgtcaacacaaca

SEQ ID NO: 7317 - DNA, 1074 bp, Arabidopsis thaliana landsberg
aaaccaaatctgaaaataaaaaaataaacaaaataaacaaattctgttttaaataattattaaattttaaatatggatagcgttttaaaattattaatataattaacttttaatacaattaatgatttttgattcataaattcattattcggatccaaccaccccggagattcttgtttctccatcataattggatccaggatatagtcctaggcctcagtagctccgtgtttttagatatgtcaaatctaaagcaattagttctcttttcatggtttttttcttgtctgatccttagctaaatatccatgaagatatactaaaggcaatgatcaattttatgattttaaatcaccttctcttcattccacattttcttttggtacatgtctccattccccattgaatatgtaaataactcacggttttgttatctttaggccgggatggtaatagcacaaagtttgctatggaaagaaatcactctactgaaaaaaatacaacatatggtcctttccttaaccgaatcaggggctaggcttttcgttactagattcttggaacaattcatatccatcggttgtgtaacgtgaggctcactttatctcctcgattcagataatataatgttacaccattgttacactgatacttaccgctatataaactaaacaggatactagaagaaggaggaacgatgttcatattcggggaaaaagattctacttgccctttgaaatctatcctcaagattcacagtcctcagttttactggaaggtaatttatgcataatacaataagagaagtttgaaaagcctttctatagctcttgattcttgattctcttctcttaggttatgacacaagcagatttaggactcgcagatgcttatatcagtggagatttttctttcgtcgataaagactcaggacttttgaatttgattatggtacatgttacatactctacttgtgcatatatggatacttacttcttcgattgttccagttatttctaatgttgatttgcagattctcatcgctaacagagaccagcgctcaccaaaatcaaa

SEQ ID NO: 7318 - DNA, 1362 bp, Arabidopsis thaliana landsberg
  unsure (1)..(1362): unsure at all n locations
gttgttctaaatcaagaaaatgctttaccttatctatcagaagcgagatttttcttatctgtgcagttctcagatcctcatcatccgactatgatcattgtgaatggttgaagtcagaatcatagtcaagtcagagaaaccaaaaaaaaaaaaaaaattccctaaaaacatttcatggtcaccttgaatactgcagaggagtaagtcatnnnnnnnnnnnnnnnnnnnnnnnnnnnnnnnnnnnnnngtgaattaaccaagcagagaatttgattatgaactcaaacaaaaaggaaacagagatataagagagatggaggctcagggcctcaagctacatacaaggtcatagtgacgagaaatgtttctacgagcttgtgttagagtgttctgcctagagacatgctttagaaaatactttgcagatgctaaacccgcagttataatcatcggtgaccaccatcccctgcgagaattgaaaagcttaggagacaaagcttgcatgcctttccttatttcagaaaaattcaaagcttttaccttttcttactaagatttgattttgtatctctgttagcaatgagaatctgcagaaagtttcattaattaaacaaactcgaaaagacgaaaaactcaagtatctatgcttctacatgtatatattatgtaccataatcagatttaaaagtcctgattctttatcaacgaaagaaaaatctccattgatataagcatctgcaagtcctaaatccgcttgtgtcataacctgaatatcaagaatcaagaatcaaagttcaaagatcatggattaataaaagactattccaactattcattgtcatatttatatatatgtaccttccagtaaaattgaggactgtgaatcttgaggatagattttagaggacaagtagaatccttccctccgaatgtgaacattgttcctccttcttctagtattctgttaagtccatagcggtaagtaataatctaacataatataatctaagttgagaaggtagggtgagcctcacgttacagaaccggttgatatgaattgtcccaagaatcttgtaacgaaaagccgagctcctgtttctgtcaaggaagggaccatatgtcgcggattgttcagaagagcagtttctttgcctaacaaacctcgtgcagcagccataccagcctgaattagacaattaacaaagtgaattatattacaaaatgtaatgtggagtaaagagaaagagctttgattgtatagaaattgatcattgcctttagtccatcttcatggaaaccatagcctgaaagaacatttagctagagattattagacaaggacaagagggaattgatctgttt

SEQ ID NO: 7319 - DNA, 784 bp, Arabidopsis thaliana landsberg
gttccgcctagagacatgctttagaaaatactttgcagatgctaaacccgcagttaaaaacatcggtgtccaccatcccctgcgacaattgaaaagcttaggagacaaagcttgcatgccaatccaaaaacttaatgcagaaaaattcaaagcttttaccttttattagtaagatttgattttgtatctctgttagcaatgagaatctgcatagaagatttattaattaagcagaggaactttagacataactcgaaaagacggaaaaaactccattgatatctatgcttggggtttgtatctatgcttctacaagtatatattatgtaccataatcagatttaaaagtcctgattctttatcaacgaaagaaaaatctccattgatataagcatctgcaagtcctaaatccgcttgtgtcataacctaagagacaaaaatcaagaatcaagaatcaaatttcaaaaataatggaataataaaaagactattcattgtcatatttatttatatgtaccttccagtaaaattgaggactgtgaatcttgaggatagatttcagaggacaagtagaatccttccctccgaatgtgaacattgttcctccttcttctagtattctgttaagtccatagcggtaagtaataatgtaacataatatgatataagttgagaaagtagagtgagactcacgttacagaaccggttgatataaattgtcccaagaatctagtaacgaatagccgagctcctgtttctgtcaaggaagggaccatatgtcgcg

SEQ ID NO: 7320 - DNA, 592 bp, Arabidopsis thaliana landsberg
taaagtttggtttctctgacttgactatgattctgacttcaaccattcacaatgatcatagtcggatgatgaggatctgagaactgcacagatgagaaaaatctcgcttctgattgataaggtaaagcattttcttgatttagaacaacaacttgtggttttttatctcttcttgaataaccgaagagggacatttcaggcgagaatagagaaggaccacgaggttttagagataggatgtggatggggaactttggccatagaagttgtgagaagaactggatgcaaatacaccgggattacgctatctattgaacagcttaaatatgctgaagaaaaagtgaaagaagctggacttcaggtttacataatccatttcttgatctgctttcttatctccaaggctacgtatgactaactatataacttctgaatgataggactggattacttttgagctccgcgattatcgccaactatctgatgctcagaaatatgacagaatcatatcttggtaaagaaaactctcattttccctctgttaatatggctctgtagttaatctatcttataagatgacatttttgaacat

SEQ ID NO: 7321 - DNA, 1465 bp, Arabidopsis thaliana landsberg
ctgtcgataattagtcacgtccctgaacgtctccgctttcctcaagacaggttttacatcgccgccggcgttaattccagacatactggttttccggtaatgacaagtcaacggcgttgattttccctcctcagttatcatgttccacgtgttctccagtgtctcgggccgcttctgtttcaccactttcaacgccttcttttttctattaacgcctgcaaaataagaatttcctatataagaatattacctatttacccctctacggtttatttcgatttaaaccggttataatcggtcattgtcgtcatatagcgtgaaaattcaaataaaatctagccgttacgttgaatgacgtcatcctttcctcaattattaaattaatattttcaaaagttttcgactatactcttactttctccggtaccttttgaactcgatttgatcggtttccggtggccggaactaaccgaaaccagtggtttcgcagccggagacagattctctgattcctccattatcggctgattcaactctgatctcatcaccgcaaactcatctccaccgttgatctgtcctgaaatcgccatctccttctcttcaaacacgacctccaatatctccacctccgcaacgaggatctgcggcggaaccgtcgccacgaaatcaaaatctgcgtccagatcaaccagccgtcgcggaggagcttgggtgatgacattgggaatcgtatattcgccaccgagtaaaatctcgtcgtcttcaccgtcttgatctccaacgctctgataaaacttggaagaagctatgataatggtgattatgacgttgatggcgacgaagagatacggcggtttcagccacgagagaaaggagctccaaaagatcgggaatcgtgagacagagaagtctactgcgataggaacagaggacttcagaaacagagacacggcgacgattccggtagtgattagcgccgccttgatcgaaatcatagacgaaaccattttttccgatttggagtactctcaatctgtcgactgttgaatcatagaggtggaggtggagctttatgtgaaaagcttaattacgctgtgatgttaaccttacaccgttggatctaagaatataaagatggacggttaggattagtgaaaggtttggcgaatggttggtcacgtgtcgttttagtttgtgtcaattctggaatctccaaaattctctaaataagaaaacaaatgaaacattgtaattttcttagtcgacctagctatatactatgactaatcaattgtttctcacgttgtgaccacctctttttaaccttatctgttctttttcctttttgattaattatttaaccttatattttacattcttactcttggcaaatatttcacttttcaatcgaccgacgaaaaaaaagtcgaacaattattttaaattagaaaatatatgcaaacgt

SEQ ID NO: 7322 - DNA, 574 bp, Arabidopsis thaliana landsberg
  unsure (1)..(574): unsure at all n locations
atttccaactgccttgctggttcaattgatgaattaatcccggtatacgacttcttcacatcacgaggtaaacctctccctaccaagtcttctnnnnnnnnnnnnnnnnnnnnnnnnnnnnnnnnnnnnnnnnnnnnnnnatacactttctggtcaatcttgcaggctctgttgacagcaatagctctaagtttatgaagacagcttcaaactctccagatagatcatcttctacaatgtattcatgcactcccagcagaagtaattttttgaatccttccctaaatgatcttcaatttctaatctaaaatactataaagagaaaactcctgtcgtgccctaacataagaatcttcttcattttcattcttatagattcagttgatagtgagaactcagtgaatatacaatcagtagcaagtataagccctagtccagcacaaaccaacgcttctgattctccatatgaaagccttgtttcgaaaacaaatctcaccaacatcttccaaaacaggtaaccaattntaagcattccatgtcctgtgttcacatctaaactgccatcacacaacta

SEQ ID NO: 7323 - DNA, 2044 bp, Arabidopsis thaliana landsberg
tccattggtcttaaaatcccttttttgtttctttcaaattactaggaaatcgacctgccagtgatgctaaaccatcagaatctcgtaaggacatagaagcagaaggttttactagcgacgttgggatcacgaagagtgtaaaggccaagaaagctgctttggaaactggcggtgatgaatctggtaatacagaaattggtgttgaatgctccagagaacagaatctttctgacgttcatgctaatggtactggaaaacaggaagagaaagctggtcatcatttccgaattgtgcttaaaagctctgcaactactgatccttctgtcctcggaggaagagatgttccacacaatgaggctaataaggaggaggaggtacgtcttagattggctaaaactataccaatatgaagcttacctttgaattattcttgattagatcgatattattatattgcagcggtttatcttgcaacaaatattgaatttctttcaaactaatttgatctcatgctctcctagaaaaggcttaaaattggagctataaggagttgttggatgtataatttgcggtaggaatagggaagcttaactagcaagaagtgccttgtagactgtaacaactgtttgaattgacatagggtaaatttggttttgggaaaattggtttgtttttgaacttttgttgaaaggattttaattttgcttaagataactgtggggaagcaactgataattacttattttacagagacaaggcacaatagctgatgctccagaagataatgcagctgattcttctgaaagttcccagaagccttctcttggttccatggttggtaaaacacgagaaggtgaagagaaaaattgtgatgatgttagtaggaaaatcagtacgaggaagaacaaattccaaaaagaaacagctgatactggtgccagtggagctctaggcctgcagactctagaccatatggattctaaagtgtcagggagctctgcgtctcagatctctggaggttctgaacttaacaaaatgacaccgagcagttcacttcctgatgatcacaaaccgcagtctgttgaaatggtatcagagggaataagtagtggcaatagagacagagctatcgaattaaaacgagaactggtggtttcagaaactgaaaaagatattcaggaaacaaagcctggatctgttttatttcaagagccatcaaagccttgcagacctattccgcatacggtttcaggaaactggtaggcctaagatggtagtatgcattggaaaaacatcgtcaagttcagccactgaaaagtcccctaagccctcaacttccaggaattctattcctggcttgaagcaacaaccaggtgatgatgataatgatgctaataccaatgatgaggactgtgtttccagtgatgtgatccgagagagagatggggatgatgaaccttcggagaaagctccgaaacatcctaaattttctattacctctaagaaatcgatgcagcataaccgtacttcccattcttcagtttccaagacaagagagtcttcctcttcttcaaagacatcttcagcaactcggattaatggtggttcttctgaggctcctagtaaacattcgctttcaggaaccttcccgaaaaatgaaaagcctggacaatcaatattccagtcatcaactaagaaccctgtgcagtctataatttcccttgctccaaatctgagcgatgaagaggtgtgtgagtcagaattcgatctctttctcatttgtcttccctattcttctactgtttgacatgttttgtttgttccatttatgaccagcttgcgttaagactgcaccatcaactcaatagttctcctcgagttcctcgtgtcccccgcatgagacagcctggtagcttgcccctgtctccaaccgcccctagttttaagcgcacttctagttctggtagcaaggatcacacaacggtatgatataaattctctcttatctcttttaggctcaaacttcgtggctgattatgtattt

SEQ ID NO: 7324 - DNA, 668 bp, Arabidopsis thaliana landsberg
cagaatagttagttttattggacatatgaaaaaacatacagattcctgaaaagcaaaacatatgaaaggtttttaatattttcatcttacttttgtctctccaaaacgttcttcctccaacatctcaacgagtggtagtaatggatcccaatgttctcaacgttttcaatgctgtatttgacccggtgttagatactaggtaggtcgtcggagaaggagaaagcagagaattgcatttggagcttaaatttgataaagaaaagattttaccatagcctagaggaagaggccatggctgaagtaactctggctaaagaaggaagacatccaccagggaatatgtattccgttatgaaacctgaagttagtctgctctcgttgtaaagagcctcgggtatcgctgtgaactgttgtacagttaaccattaaaacgatcaatggtttttgcaatataatgatgagggaaccgtgaggaagaagcaagtgttacctgtaggacaaaaatgccgttttctgcaagcgcatcttcacaacaactgaaaaacttatccataaactcgtggccaaccgcttctatcatctcactgaaacatccagaaatgttatgtcataaacagattacaaggtaatttaacaaagatggacaaaaaaagagttttaccaagcta

SEQ ID NO: 7325 - DNA, 286 bp, Arabidopsis thaliana landsberg
taataatccttttgatagatatatgagtaaacacgacaaaaacagaggacatgttttaaatatcttttatcttacttctgtctctccaagaagttcttcctccacaatctcaatgtttggtagtaatgaatcccaatgttctcaacatgttcaatgctgtattaacttaagtgttagattgatttaacaaagagagattgcggaaaagttatatataaacatttttaccatagcctagaagaagaggacatggctgaagtgactctggcgaaagaaggaacgcatg

SEQ ID NO: 7326 - DNA, 1286 bp, Arabidopsis thaliana landsberg
aaagtggatacaagttcgttgggttcaaaggaagtttgggctggtactacttactctgttgcagcttgtatgattcaagaagggcatagagaaaaagggtttcagacagcaagtggaatctacgaggctatttggtctgatcgttgtctcaggtataagaaacatagctcactttctgcttcattatacaaaacaaaagtttcaaaaatcttattttctgtgagtgcagttgctcgtttcaaacaccagaagcgtggaacatgaatgatgaatacagatctctgtgttatatgagacctcttgctatatgggctatacaatgggcattgacacgaacacaatcttttggagaagagaagcaaaagttagtggcaggagatgaagaagaagaaagtaatttgttgttaagacaacacaaagggttcaaagatgtggctcgttttgtgaaaatagtaccaacgagcaatgtacatagaagccgtctccaacacacgtacgagaccgttctcaagactctccgcttgtaagcacaggatgcaacaattatatacatcataagttattatttgtcttgtgtatcattagcgtttcttgttaagtgaggaacaaaatctaaaattctgatagtaagacgtcacaagtcacactattatctctggttttgggaagacaaatcttttgaagcatgaacaacgaaaataaatataatagcttaactatcagcaacagttcaacagcttaaggtcaacagcgattacaatgaagcattcaaggagaaagagtcagattaagatccaccttttcataagaactgtcttaccctccaactgcgtgagtgcagcaggtctagcaactttgcaacatttgatgattctcttaacgtggagttgcgtaaacctggcttgcatcgtattgagcatacgcggactggggtgattgggttttcactggtgcggtccctggagcagtcgcatacactgcagcttgagttgcaggctgttgctcatatcctgtttgagtaggtgctgcttgtgaataagcggcttggcttcctggttccgcaccatatcgttagttaggatcttgagagcttgtgttgtatccatagttatgggtctgagatataccataagcaggctgtgaggttggatatttgtatccaccggttggagctacttgcccaccgtacccagctgctgcagtctgctgagcaccattcttggtcatagtgggtagaaagtggctgaacacttttctactgttaactggaccagctccaggtgttt

SEQ ID NO: 7327 - DNA, 580 bp, Arabidopsis thaliana landsberg
  unsure (1)..(580): unsure at all n locations
ggacagagaaaggagcagcggagataaaacggcatgcgttcttcgaagnnnnnnnnnnnnnnnnnntccggtgtgcgatcccgcctgagcttccggatttctatgactatggagttcctaatcaagaagggaaaagcaattacttagattgcaaggcagttggggaacatcttgagtttgagttattctagaggaagatgaagaagcttacgtattattacagcctttcatagaactcttgcttgtatcctaagttacagagtcactttttggtttattattatttgtttcattttttttaaagaagtattgttattttattttactttttgtcaactattgttatttggttttaaatatatataattttttccaaatagaaaattacctgacataaatagatattgtggatacctttttttttttttttgatattgtggatattgattgatataaattttgttttttgaaaatgttgtgatccatgtaatgtatagtctcttaaacttgaaaatctgctcagtgctgctcatatatatcttgaaattagagttcataacaaacctttttccaagaattg

SEQ ID NO: 7328 - DNA, 541 bp, Arabidopsis thaliana landsberg
tgacagagagcagcttacatattaatggcatcttgtttatccgcatccatatatgcgttattataataacgttgcagagtcctcaagaactcttgtgactgggttgctgctctccactggcctcgcctttcactaaaaacctattacacaccaaaaattctaggaatcaacaaagtgtatcccaacaatagtgaacataatgggaacttgagtcggctgcagaagatcaatacatcataattcagtgcagaacaatgagacagattacaaaatgaatgttaactaagtctgatatcctttcaagacagtaaaataacgagggcacagctgtgattaagatataatatagatcacataacccttgtatttcttggacttcaaagaccaagatcagaaaatagaccagattgtctttacagcaatatcatcacaaatgatgaattcaaaatattcataaagaaaaacattttaaaatctgccaatcatgtacatgctgcttctaacataagaatcagatcattataattatggcagctgaaaa

SEQ ID NO: 7329 - DNA, 601 bp, Arabidopsis thaliana landsberg
  unsure (1)..(601): unsure at all n locations
tatgagactaaccctataatatatatgcttacatgcatatatatttctcgacataataggttagagagattttctatgagggctacgaattttagttttgtggggttattgataatcatagatatgttaagaaccactaaagcgggtctaaatttgttaataaattaatggttattggtcactagtaactttagtgtacgatagaaaatttggaggatctaatgctattagagcttgttggctcaaatgaagaagctaagcatatcacctatggtggagagatgtgtggaatctcttctgaaactattccaccactaaaacctttttatattatttacaactaatgtgcataaatcataatggagactttagtgaacgaataggtcaacatatttattctcccatgcaaaagatcaataatagcaactagaatttagaaaatagtaaaacatatataagctatgtttcactaacatatataaacgtggattaattaaaagtatatagccaaactatgggtggaaataatgcaaatcactatggatacagtactcattgaaatnttgaacaagagtggtgaaaaaggatgtaatgtcttttt

SEQ ID NO: 7330 - DNA, 1331 bp, Arabidopsis thaliana landsberg
  unsure (1)..(1331): unsure at all n locations
gacatcggcctttccttgaccgagggactttttctagaagcatttgcaagccgatgttgtttcctgacatcccatacatgtatctgcgtatttgcattggaacagagaccagcataagtttcataagcagctccctaaaatccaacagtaatttctaactatcatgtgaaacattgccttgtttttcgaatattaaggacgagattatagtgcaagagagcaccggtttgaaaatggatgacaatagttatttctcaaagagattcacagatctttctcttgtgataggtatgtgaagcatagagtaaccaaaatttgttacaggttacttacttgcttcgacgagcctttcttttccaggaaacaaaagatgtgatccactgcagaggaataagaatcaaaattacagaaacaagttagagtgagaacagtagaaaacaagagacagctttagacgaagttgctttgtgatcatacagaaacatgacaatcaccttaaagaccggcgtaaaagtcaatggcccagcaatagatgctttacgtagaggcaatctccgttgagggacaacttcctttgacaagtgttgagcaatttctttcaacagtaccatttgagccttttcagtcctcatagagagaagcgcatgtttcattgattccctgtcagcctccagtgcttgaagcctcatgtagagtttcgttatatcaggatcaccaagatccgtgtgttctctcgggaaaacaacattgccatcagaagcaccatcctcaatcttctgctccgctacaccgccactatgagccacactgctgtgatgaacagaatcaatggtataaactctatcactcatgtcatctcctatttccgacaagtcatctttagcattattattctctgtatacgagacatcttccattttcttagagctgtagctttgggacctcggggaatcaacaaaaacatcaggtcttagttctttagatgctcccaagtgtgaacttgatgaaccagtaggggaaatcctcctaagatgtctttgacgcctaggactctcaccaaccatccccttctgtgaaacatccctccctctattcaactgagtaaagctaggattcgtctccatctggctgagtcttcgatccaaagtctttaaatgtactctcccatgaggnnnnnnnnnnnnnnnnnnnnnnnnnncatctgcaacatagatatcagcctcaagagggtcttgggtctcattaatattgcatttaagaagagggtaatcttgtgtagggcagtcatattcagaactaagtccatcatgctcgggtacgactaagcagct

SEQ ID NO: 7331 - DNA, 1589 bp, Arabidopsis thaliana landsberg
gaaagtagtactttacaaagtaattcacattatgcgctgcaaaccaaatttcacacttgtgtgcttgagtttcatctccattgccgtattcgaggagtcttttctagaagcatttgcaatcccatgttgttcccttgtaccccgttcatgtatctgcatttacaccatttggccatgaggataagtaaatagttgtttcatcatctttgcaagtctctatacaaggatcttagtcaattataataatactacaaactcaaaactcaggttcgataaaaaggtatgagaagcacaagctaatcagagtttaagactgttcacttacttgcttcgacgagcctttcttctccagaaaacaaaagatgtgatccactgccacaggaataagaagacgaatccgtcaatgaggatgcaaagtaatacagcagaaactttagtacgagttgcttcttatcagtatattaagtgttaaacaaggtcacaatccactgatataagaaacaaaatcaccttaaagacagatttgaagttgaatgctccaataatagatgttttccgcagaggcaatctactttctgggacaacatcctttgacagatgttgggcactttctttaacagaaccatctgtgctttctcagtcctcatcgacatatttgcctgtctcattgattccctgtcagcctctagtgcttgaagtctcatgtcaagtttcgatatttcaggatcaccaagatccggctgattcgatatttctctcggagacattgcataaccatcagcagtgtcattcttaaacttttgctcagcagtaccactatgagatacactgtgatggacagagtcaatggtataaactctatcattcatgtcattatctcctatttccgatgagtcacccttatcccttgcaaaggaattaccagctgcatatgggggatcttccattttcctgaagctaccattgttggaccttggggaatcattagaaatatcaagccttttttctctagttgttcccaaaagtgaacttgcactaccagtggaaaccctcctgaaatgtctctgatgcctaggactctgaccaaccacgttcttctctgtataatgtctccctccagatacatcaccagtaggctgagtaaagctaggatttctctccatctgacttatccttcgttccaaagtcttcaatgggtgaggtgaatcagccaatgggtacttttcaacatcatcaacatcaatatcagcctccaggggacctgggttctcattcacattgcactttataggagggtaatcagatgtggggagatcatattggtaatcattttcgatcatgctcggatttcggctaagcatgttcttctccgtttcaacctcagcctcagtgaacccaaaactcatcattctatgcttataagcctgagcttcaaatgtcaaagcctgaatagtctgctccctcttatatatcaaatcttccagatacaaaagctcttgttgatcatgctccattttctcctcagcaaaccgcttaaactgtctcaattccatttggagttcagctttatccctctgcaacctcaatat

SEQ ID NO: 7332 - DNA, 2362 bp, Arabidopsis thaliana landsberg
ttagttttctgattcttgaaacacagtggtcggacaatatttgcaggttcctgtgggtggatgctataggatgatcgatatcccgatgagtaattgcattaacagttgcataaacaagattttcgtgctgactcagtttaactcggcttccctcaatcgccatttggctcgtacttattttgggaatggcataaactttggagatggttttgttgaggtatatatataacaatatggtttcctttataaacttctcagtttgtttctggatccgatgaaataaatcaaaggtaaaatcttatcgaaacaggttctggctgctacacaaactcctggtgaagccgggaaaaagtggtttcaaggcacagctgatgctgtgagaaaatttctgtgggtgtttgaggtatgaataacttatgatcattttacttgttttatcatacattaagtctgttcctttatgattctttaaaatcgtctgaatctactggtactttttattataggatgctaagaacaggaacattgagaatataatcatcttgtctggagatcacctatatagaatgaactatatggactttgttcaggtaatataatagtaaacattcctcttagcagtttcaaaactagtcttgctaactaactctaaacactatgcattggacagcaccatgtcgatagtaaagccgatattactctttcgtgcgcgccggttgatgagaggttagtttctttagcactatgatgtgacttttgtatgattttggttttaagatgttaacttaatctttagaaccccttatgtgaattttcagccgtgcatcggagtatggactggtcaatattgatcgaagcgggcgtgtagtccatttctctgagaaaccaactggcatcgatctgaaatcaatggtacaattttatttcctaaaacttaaaatacgtacaaaacagaatggcattgatctgaatatttttctgttgttttgatggttataactgaatgcagcaaaccgatactactatgcatggactgtctcatcaagaagcagcaaaatctccatacattgcgtcaatgggagtttattgtttcaaaaccgaagctttacttaagcttctgacatggcggtatccgagttccaatgactttgggtctgaaattattcctgcagctataaaagatcacaatgttcaagtaaaaaaaaaaaaaaaactcttctgtttttaaaaagatttcttgagttttatcactttatcacaaacgatttaaccaaattgtcttatttagggatacatctacagagactattgggaagacatcggaactatcaagagtttctatgaagctaatattgctcttgtcgaggaggtaagttataaagaggaactataattgagtttctatgaagctaatttttttggttaatacccaaaaatgtttcttacttttgaatttatctatgattcaatctcttaactattgttctttcgttcttgttttatgcagcatcccaagtttgagttttacgatcagaatacgcctttctacacttctcctcggtttctaccacccaccaaaaccgagaagtgccgggtagagatctttctctttacgtcgaagtcctctttgtttgcctgttaatctcgagtcttgattcgctgattggtatgatcctcgtgatgattttgcagattgtaaattcggtaatctcacacggatgtttcttgggagaatgcagcattcaacgttccatcattggtgaaagatcacgtcttgactatggtgttgagcttcaggtgtaaatccttggtcatcgaatgacctatagctgtatggacattgtcaaattcaaaagctgagtctggtatttgtttgcttcttgcaggatactcttatgttaggagcggatagttaccaaaccgaatctgagatcgcgtctctgcttgcggaaggaaatgttccaattggcattggccgagatacaaagatcaggtatcaaaccgaaatcacaataatcttctctgagtttgattcttaaactctgatgctatcttttattacattgaaggaaatgcatcattgacaagaatgcaaagatcgggaaaaacgtggtgatcatgaacaaagatgtatgctttcttatccattcttgattctctttgcatttgatgtctctaagatcaatgaagatcaagacttttgagagattcaacattcctaactttaatcgttttacttctcaggatgttaaggagtgctgatacgaccaggaggacaggatttcatacgattcgtatcgtggaatgcgctggtggttgctctataaagcgcctccatctaaagaccgtactgtgatatgaa

SEQ ID NO: 7333 - DNA, 1856 bp, Arabidopsis thaliana landsberg
  unsure (1)..(1856): unsure at all n locations
acaattgcaaacctttttgtcgacatcattcttcaggccaccaaagttcccagaaactttctctttcttcttcttctccttcttcttctctctcaagtttttttacaaatatattctcgaacccacctttctccgccggatctgattccaaaannnnnnnnnnnnnnnnnnnnnnnnnnnnnnnnnngaagaacaacaaaagggtttcaaatttgagcaaatgggtggctctggaaattggattaaatctctgataactaacaaaaaaaccatcactgatgatcaagtaactctcgaaaaggctctcttctttacacttgatctatctctgttttcatctctcagtaactgattctattgtttttgcaggagaagaacatcaagaagaaatggaaactatggaggacttcatcggaaggtttgatttcttcctcaaagggtttcaagagccgtggtggtagttatggaactccttcgttaggctcagatccgccgtcattctctgctgacgactctttcacggcggctgttgctgctgtcattagagctccgccgaaagatttctttcttgttaaacgtgaatgggctgctacacggattcaagctgcttttcgagctttcctggtttgtgaatttaaccactattactgagattgcttcactgttcaattgttaatcaactctttacatagtctgctttggtttagtgacctgttcattggttttaacatctgattgcaattctaatagaaagttagaaacttaaatcaaccatcaacacttaatggatcattaaactaagtcaattcatttgagcagctcatttgttgtcttctctgaagcttttgttgttaatgtttttatgaatgcgttttacaggcaagacaagcgctgagagctctgaaggcggtagtgaggattcaggcaatattccgtgggagacaagtccggaaacaagcagatgtcaccctaaggtgtatgcaagctcttgtacgagtccaagctcgggtacgagctcattgtaacagggggccttcagatggacaggagttggagaagccatctgatcaacaaaaagatgatccggcaaaacaggctgaggtaatgattatcagatatggattttgggatagaatgggactcgtgggagactaaatgtatatgttttgcaatgatgtgttgttcagaagggttggtgtgatagcccgggaagtatcaatgaagtgagaacgaagctacaaatgaggcaagaaggagcaatcaagagggagagagctatggtatatgcattgacacatcaggtaatgcattcataactagaatcaattttgcgaggattttactctctctcagagcatttgtgttcattgagtttctcaaattttgacacagccgaggacatgtccaagtccggccaaggcgagcaagcaagggagtgtcaaaaagaataatgggtcgtgtaagagcagtccaggttggaattggcttgaccgatgggttgcagacaggccatgggaaggtcggttgatggaaggtcctacaaactcatcagaaaatgcaaggaaaagcgagagcagtgtgtctgaacatgatacggttcaggtcaggaagaacaatctcacaaccagagttttggctagacctcctccaatgtcatcgtctgctacgagttctgagtcttcatcgacttctcaatccccagttcccttctcgggaagtttccttgaggaaggagggtactacagaaagcctagctacatgagcctcacacaatctattaaagctaagcagagacgatcagggtcttcgtcctcttgttccaaaacaccgtttaaaagaaacagtcaatgtcttac

SEQ ID NO: 7334 - DNA, 1470 bp, Arabidopsis thaliana landsberg
ctctcaggaactcatggactttgttcaggtatttatccaaatctaaatagatatgttcatcatcatcttaaatctctttatagttgcactaactcaatctgttgtaatagtctcatgtggatagtaatgcggatattactctttcgtgtgcaccagttagtgaaaggttagtattcttgaatctcgtttacgtcttttctatgagaaatctcagttcttaaaactagtttttgtggattctttagccgtgcatcaaattttggtctagtaaagattgatcgaggtgggcgtgtaatccatttctccgagaaaccaacaggagtcgacctgaaatcaatggtatagttttctatgattcttaaaacaaatcaactcccaaaacttaaaaacttttctgtttgtttatttacagcaaacagacacaacaatgcttggactgtctcatcaagaagcaacagattctccatacattgcatcaatgggagtttattgtttcaaaaccgaagctttgctgaaccttctaacaagacagtatccgagttccaatgactttggatctgaagttattcctgcagccataagagatcacgatgttcaagtaagattctataaaactcacgtcttgtctttcttttacccgttgaacacaacgaatgatctaacagtttcgtattgtttttggctagggatacatattcagagattactgggaggatattggaactataaagacattttatgaggctaatttagctcttgttgaggaggtacatcaactccaccttattatgacatcttggatacatttctcaaccttttgttcttgatctggttctgcagcgaccaaagtttgaattctatgatccagaaactccgttctacacttctcctcggttcctcccaccaacaaaagctgagaaatgtcgggtatgcatcaaaactatccttttctttatggttgtttctttgattccaaatgctaattaagtatggttctgttttgatgattttgttagatggtagattcaataatctcacatggatgtttcctgcgagaatgcagcgtccaacgttcaatcattggtgaacgatcacgtctagactacggggttgagcttcaggtgaatctcttaactttgatctaaaacaatcgaaattattttacgtatgttgcgatcaaactgagcttggttttctttctttcttttccaaaggatacattgatgttaggtgcagattactaccaaactgagtctgagattgcatctctattagcagaaggaaaggttccaattggtattggtaaagacacaaaaatcaggtaaggtttgcaaaaagcacataacatccaaaaaaaaccctcttcaaatgatagatttccgtctgaagcgaagagttttttttggttatgggaattttataggaaatgcatcattgacaagaatgctaagatcggtaggaacgtgatca

SEQ ID NO: 7335 - DNA, 1475 bp, Arabidopsis thaliana landsberg
tgagagtggtagatggcggcatgatactgaacgggtagagaatgtcgacgtcaccgcacctcgactagcagcctggccggcatacatcaccagcggccaggctatagatggccaaatagatcgtccagcacggtactattaggcactattagtaattgtgtcgtatcatgctgtgccggcactaatacctaaccagcagcctaggcactacactatagtgtctaattgtgtcgtgcgggcattatacaacactaacacctaatagtgctcgtgacagcccaggcactatttcattttaagagcttaaaaatacagaagatctttaagattatatatataactagctaagtgcccgtgcgttgcaacgggaatatataataccagtatactacgataacttatatacaaaatgtgtgttatattgttatgagaaaatgtttaataatcaatttgtgataatagtcatacataaattttgttattttaatctagttgtttcaccactacattgcaaccatcagtatcatgcagacttcgatatatgtcacgatttgtatggtctcatcattggagagcacgttccacacatgtcggaagaaatttcctcgtacatcgttagttatcagacacacaccaccatacgttcttgcttaaacaaaaaggtaagtgcgtgtgtttgcgaagagaattaaaggaaggtcggcacaaaagctaccctgacggtggcgaggatgacgaactggtcactgttgtcgatcctcgtctacgtcacctccgacgctaagatgacgccacaatcctcgatatagtagtcgtcgaacgcgtgcgacatgacgagtaccgatgacttttggttgggctgccaaacgaagtgtaccccgggctcatcagcgaggtagtacccctggccgttgcaccacctgatgcgctactccactacatacatcatgttcgaggacacttacacaacgtcagcaacgtccatcgtcccagcgcacaagaattcatgtccggtcagtagcgacttacgtggtaggttgggcttcaggtggacgatgagatggacggtgtgacagcgccgttgtcggatgcgtgcccataacaacccaagagtcgtcggcgttggtgacgaccatgaagtccccctatttgaagatggacagcgcggtgcagccgctttggaccgcgtccaagcggcggctgtgccggagcttgccgaacacaacgacgcatgcgaccacgtagtactgcttccagaggtcgaactggcagtcgccaagcttcttttcgtcgtcaatgagcgacgccaacgcgagcgtctcctgtcagtggtgtttgttcagggtttccaagtaagaaacatggattcatctttggcgttggtttatgaaaatgactcacaagtcagatccatggaaaaatattacggagaataaatgtcacacatataaaaaagaatttaagttgaaaaccat

SEQ ID NO: 7336 - DNA, 887 bp, Arabidopsis thaliana landsberg
gtggtgcaacggctaggtgtactacctcgctgatgagcctggggtgcacttcgtttggcagcccagccaagagtcatcggtactcgccatgtcgtgcgcgttcgacgactactatatcaaggactacggcgtcatcttggcaccagaggtgacgcagaggaggaccgacagcaatgaccactcgccatcgtcgaggtagcttttgtgccggtctgcctttaattctcttcgcaaacacatacacttgcttatttgtttaaggaagcgtgtatggtggtgcgtacctgatgactgacaatgtacgagggaacttctaccggcaggtgtgacacgtgctctataataatgagaccatgcaaatcgtggcatatatcgaagtttgcatgatactgatggttgcaatgtagtagtgaaacgctaaattaaaataacaaaatttatgtatggctaggattacaaatggattatgaaatatttttttataacaatattgtgagtcattttcataaaccaacatgtactacctcgctgatgagctcggggtgcacttcgtttggcagcctagccaagagtcatcggtactcgccatgtcgtgcgcgtccaacgactactatatcaatgactatggcgtcatcttggcgccagaggtgacacagatgaggaccaacaacaatgaccactcaccatcatcggggtagcttttatgctggtctgcctttaattctctccgcaaacacatacacttgacttttttttgtttaagcaagcgtgtatggtggtgtgtacctgatgactgacaatgtacgagggaactaataccggcaggtgtggcacgtgctttctcaatgatgagaccatacaaatcgtggcatatatcgaagtctgca

SEQ ID NO: 7337 - DNA, 1617 bp, Arabidopsis thaliana landsberg
gagaagagcggtgagactcagagaaagctgagattcaatttcttagaatcatgatgagcaataagagcaagctttagaacctttttggcgaggaagagcacggcatcaacagtaccctcagcataaattgatcggccgcagacattgtgctggaactcgaaggagacactgcaaagaaagacaaagaaaagggagctagttatggaacagagacacttttacaatggaaacaaagaaaagtataaacaatatcttagatattgcattacgtttcatcgggtgatgtcaagtgataaagatggaaagcgtgaccagagatatgctcctcaggtacacccaccatctccacttgctgttttggatcccgaatcaattgtatctgccacaaaagttgtatacacagaaaattcacattccgaggataaattaagtgattgccaagatgtaaacaataaaggatgaccaatgcacctgatccatgtcgtaagacacacccaattcctggaagcaagaaataacagcttttgctgttccggatgcatccaatttgctagcttgatgagactccatcacctacatatagattggcagttgattagatgtagcaagaagtaatataaaactaacagagaaagaaaaaagaatttgaatgtataaaagaagtaagaaaagtacatccaaggaataaccagaaaaggctcccggaaactgctcagccatgatctccatggccgcaagaaatgctacaacctatagaccaacaaagcacacaaatatgagcaaaaatgatcttaacttacatgcataagtaatcatttcttccagaaacattcaagtacacatacctgtttacccatctgtggagaaatcacagcataaatctttgcttcctcaacagtttcatacaatttgttcctatctccaccagttgttcccatgacgaaaggaacacctactttgctatacagctccgcattatctacattttgcgagaataccaaacttgaaatcaacaaacaatagacaaaaaaaacacttctagcagatgattttcacttgcacaaattctaaactaactcaatcaaggatcgttccgccaaccagaattcaaccataacttcaacaaatctagaatacaattgtcttttgatggtagaaatgagagattctgaagtttaccatttactgcagagggaattgtgtagtcgacaacaattagctccgggtgcttctcaaacaccgaagaaagaaccttttctctttcagttggaccgtgcacagtaatctcctttccacagacctcaactctctgaccatcctcaccagcagatccaaacgatatgggaacaatatttactcctgcagagtctgctgctttaattacagctttccccattttgccactacatccattcacctgtagaataagagataatgaatatagctaaatccaacataaaaatccccatttcaaaaggaacaagctttgacatttctacatttcaaacttaaatggtaatgcaaagtcaaatctcacaactttgagtctaagagaaatcatcagatgatcaggtttaccatgatggatatgccatttccaggcaaaacagatttcac

SEQ ID NO: 7338 - DNA, 881 bp, Arabidopsis thaliana landsberg
accaggacactgctagacatgatctccattgctgcaagaaacgcaacaacctagtggacaaagaaaagatattatgggtcacaaggatgagagtttacagacataatttctagcttgtatgacacactggtaagtacctgtttacccatctgtggagaaatcacagcataaatctttgattcctcgacagttttatacaatcttgtcctgtctcctccagttgttcccattacgaacggaactcctactttgccatacagctctgcattatctacattttgcaaaacaacacacattggaaagattctaaagatgtggtgttgtcacattcacataaatcaggatcatttataatagtgaaaaaaatcaaatttcaacacacatctaatcataatgatgtcattaaatgaaatttcttcagattacaggaataggagttgctagacttaccatttactgcagagggaattgtgtagtccacaacaattagttcaggatacttctcaaacactgaagacagcaccttttctctttcagtaggaccatgcacaagaatctcctttccacagacctcaacagtctggccagcctcttcaacagacccaaatgatgtaggaacaatattcactccagcagaatctgccgctttgatgacagctttccccattttaccactgcatccattcacctaaagtataaagattaaaaagagtgaacgaatggcttataacttgatcctacaattacactctagcaaagatctatgtaacttaccctagaatatttctgttgctagaaaaaaaaaaaaaggcaacagctttccatctataaatttccgggaaaatcacaatcatcaatggaaatgctaaatgtcacaactc

SEQ ID NO: 7339 - DNA, 554 bp, Arabidopsis thaliana landsberg
  unsure (1)..(554): unsure at all n locations
tggaactcaaaggacacactacaaaacaaaacagattatcattgatgttgcagacaatgagaacaaatgggttgccagcaatcagagaggactaaaacagaatcatcgaaagttttaaatcttgcattacgttttatctggtgatgtcaagtgataaagatggaaagcgtgacccgagacatgctcctctggaacacccaccacctcaatctgctgcttaggatctcgaattaattgtatctgatttcaaaagtaagcaaaaacggtcttacagatgatgatcttactagagaacgatagatctagagaacaaagtacgatataaacacctggtccatgtcgtaagacacgcctaatttctgaaagcaagaaataacagcttttgcagtaccagatgcatccaatttgctagcttgatgagactccatcacctatagagattacagccaattagcccgtatatgatacaagcacttaaatgaatatctcaaagtaaaagacgtacctctaaggaataaccagcanatgcaccangaaactgctcagacatgatc

SEQ ID NO: 7340 - DNA, 1135 bp, Arabidopsis thaliana landsberg
  unsure (1)..(1135): unsure at all n locations
gttccgaaaaccagaaaactctagttctgccttaaatagtcttaactagtaaaccaacaaggaaaaatgaacgggacactttgaacttgtaatatccaaatcaggctacagattcagatacataaatcaaacaccatgaattcataaacagcgaatccaacaagaactcaacaacgaaatcgagccaaaaaggatggttttttaaaaccttatcctaaggattttcaataaagtaagcaggaaaaaaaaagcaagagaggaaacgtaatctgacctctcttgaccagcagtatcccaaatctgagctttgacgactttgccttcgactttagtggttttggtagcgaactcaacaccaatagtagacttggattcgagattgaactcgttcttggtgaaccgagagagcagattcgatttgccgacaccagagtcgccgatcaacacgagcttgaagaggtaatcgtactcttcatcggctctgtaaccagccatcagacgagagatcgaattttgggattagggaattgggttttactgtgttgcttgctgctgtattatttgatgataatgaattaatgattcagatgatgacgatgaaagcttttgtcgggttggctctaaatcacccttttttcttcttctttttgtttttgaacagaaaaagtttaattttttaaaaagatgattccgcttaattagttgcacattttaggaaatcttctccatatattgttaacaacttccactcacaacataatcatttttaacttaatacagttttctaattacaatttaacaagattaacaataaacagtatacacctacttttctaaaatttatcttcaggatgaagatactatttactttcattttcttaagtttgggtttcaatgaatgtagctactactccttagctagcaacctgnagagtttataaaattagagatatttgtattgatttttaaaaatatcaagtttacttttttattagattataaatttctgaaattatgtattactcagaaactttctacggttcacataacaccttactataatgttgctccatccgaacaatcgtgttacttatgcaacatacacaaagaatagctaaaacatttctggtccatc

SEQ ID NO: 7341 - DNA, 2244 bp, Arabidopsis thaliana landsberg
ctccgacgtcgatcgaactctttcgttgtctgattctcttcttctaagatccttgagaagcttcctgaatctcagaacgaagatgtttcactcgtgtgtaaacggtggttgagtgttcagggacggcgtttacggagtatgaaggtttttgattgggaatttttattgtctgggaggcttgtttcgaggtttcctaagcttacgagtgttgatttggttaacgcgtgtttcaatccgtcgagcaattcagggattttgctatgtcataagtcgatttcgtttcatgtatcaaccgattcgtcgttgaatttgaattttgttgaggagagtctgttggataatgaaatggttgataaagggcttagggttttaggaagagggagttttgatttgattaagcttgtagtgattaatgctactgaattgggattgctgagtttagctgaggattgttcggatttgcaggagttagagttgcataagtgtagcgataatctcttgcgtggtattgctgcttgtgagaatctgaggggattgagattggttggaagtgttaatggattgtatagttcatcggtttctgatattggtttgacgattttagcacaagggtgtaagagattggtgaagcttgagcttagtggttgtgaaggtagttttgatgggattaaagcaattgggcaatgttgtgaagtgcttgaggagctgagtatttgtgatcatagaatggatgatggttggatagctgcgctttcgtattttgagagtttgaagactttgttgatttcgtcttgtagaaagatagattctagtcctggaccgggaaagttgctgggatcttgtccagctctggagagtttgcaactcaggaggtgttgtttgaatgacaaggaggggatgagagcgttgtttaaggtgtgtgatggagtaacaaaggttaatattcaggattgttggggattgagtgatgattgtttcagtttggctaaagctttcaggtaacttggcctaagatagcttccctataaatgtttccctttaactgaactgtatcataaaaacttaaacttggtgttggtgttccacatgatatagttagcaaaagacataattccatgctatgatgactgaagttgttaatatggatgatgaaaggcattgactgtttttgctttgatttgtgtgtttgatacataaactttggttacttaaaagagcagaagccatagttttctattgttactctttaggtcttttcacatcatgatcgcatcgtttaactgccaaaaagtggaatgcagcttttctgagaaactaatgtgttctttaactgaactatatcgtagaaacttaaacttggtgatgttgttttgatcatctttgtttcttgcaggagggtgcggtttttgtctttggaaggatgctcaatcctaacaacaagtggtttagagtcagtaattctacactgggaagagcttgagagcatgagagtagtatcatgtaagaatataaaagacagcgaaatctcagctgcactctcgtctttgttctctcttctcaaagaactaacgtggagacccgacacaaggtcgcatctctcatcgagtctagaaggtaccggaattggtaagagaggtagcaaattcttcaaaaagagatgattcaaaaagagatgatgttcgacattgaacataatgttatgtaatgtaatttaggagctcgcattccatgtgccctgaaaattcttatacacacaaactcttcttattgtacgggcattattactctgtttgtaaaatctgccaaatttgtagtcaatgttcaaaaactcttatgtactgcaatgttctattgttatgtataatgtataataatgaaactcttgtctgtcgtccatatagtatcaatttcaatcgaaagaatttacaagataaagagatacaagaaacattgtttgttgttagggtttattagtttcgatctctagagaaaaaaagtttgagaaagtcaaaacattcaaaacaaaagaaccttctttgtcttcgtctcgtatcttggatagatttcatagcttcgttacttctataagctctcatgaccgtgtcttgttccacttcctcttctctaaacatcaagtctgccacgtcatcttctccatagaagatatctctctttccggcttcagctaagctcttccgtcgacttaacccttcagcacttgcctgaaaacatggtactgatgca

SEQ ID NO: 7342 - DNA, 897 bp, Arabidopsis thaliana landsberg
agaggacttatgggtattcaacttaccaggccaatctgcatccctataattccaatcctgtgttccttcaagactcgacgagagatgagacctagtgtctggtctccaagttagttctttgagaagtgagaacaaagacgagagcgctggtgaaatttcgctgtcttttatgctcttacatgacactactctcatactctcaagctcttcccaatgtgaaatcaccgactctaaacctcctgatgttaaaactgagcatccttccaaagacagaaacctcaccctcctgcaaagaacaaaaatgatgattcaaaagcccaccgagaagaccaatgaagcaaaaaggacaagttacctgaaagctttagccaaactgaaacaatcatcactcagtccccaacaatcctgaatattaacctctgttgctccatcacacactttaaacaaagcttttatcccctccttgtcattcaaacaacacctcttgagctgcaaactctccatagcaggacaagaccgcaacaacttttccggtccaggactagcgtctatctttctacaagacgaaatcctcaatatcttcaaactctcaaaatacgaaagcgcagcgatccaaccatcgtccattctatggtcacaaatactcaactcctcaagcacttcacaacattgcccaattgctttaatcccatcaaagctaccttcacaaccactaagctcaagcttcaccaaactcctacatccttgtgctaagaatgttaatcctatatccgacacagatgaactatacaatccgtctacgcttcctaccaatctcaatcccttcagattcttacacgcagcaatgccatgcaagagattatcattacacttatgcaattctaactcttgcaaatc

SEQ ID NO: 7343 - DNA, 593 bp, Arabidopsis thaliana landsberg
  unsure (1)..(593): unsure at all n locations
gatgattcctgaataataatcaacccctatattagggtttgaacaaacctcattctattgaaatcgaatctctaattctcttcggcgaaccatgggcgaagaagatctctctgagatcaaagatttcaccagtaagatctttctccatctcttacctgaaattgtttgttgatcgatctgtcaatagtaatgattaacggttaatggatcactaaccaatgcccgcccagagctaaagatggtgaagctaagcctttaggcatcagattttattaacaaaatttggggcatcaaattttaaaattgttggtggtatagtggtcaacagtactaataatctttttctatgtgtctagttcgagtcaaacttttgtcaaaaattgtttttttttcannnnnnnnnnnnnnnnnnnncaaacacatttttgctttaagcaacaaaaacacttgggccggccctgcactaacctatgcagaacctatcacacccgtggaaggggctaagatggacatcttttgggacctctgggttacttaacccattccctgatagagtgatagtaacagtcctgatttgatctatcagaaaatcg

SEQ ID NO: 7344 - DNA, 1749 bp, Arabidopsis thaliana landsberg
gtgtattaaatatgtagattttaatttacctaagaagacgtaaaactcctttgagagaaatctcaatcctttcttcataaaaacataaaactctcgtttgctcagtgagtcttttctttctgtctgaaaattgttgaatagtttttgtcttctcagctgtttcgtcggaggaagcttcttcttctagacttcttcttcttctctatcgtcttctctgaaattcttcggtaaactctctaacacataaacgatgatgatcttctttcgttttttatcctttctgtttgatttttgggcattacaattttaatcgtgaactgaatgtgaaataatctgaggattaagttaagatcgattttttctggtccgtctccttttgttttttcttcataaattgtttctgtagctgctagatctacaggtgttgcttattgggatgaaattcaagttcggttctttgaattttccttgtttatgtgattgattttgagttttactaggttttgatttgtagatgaacatgaagaaagttgttttcagcttttgttcttttgctgaatcccaaattttacttgaattctctaaagaaacgttctttggtcttatgagatgttgaatagctttctaaatgatctgttttttttaatggtaatgaagctctgttcaacttcaaacaccatggttggaggaggaagtgctcagaagctaactacaaacgacgctcttgcatatcttaaagccgtgaaggacaaatttcaggatcaacgtggaaaatatgacgagtttctcgaggttatgaagaattttaaatctcaaaggtatagtttttttcttctccttgttatgtttaggttaaaaacttggtatctgagaactgattgcttaattgtgtttttcattgtagagttgatacagctggtgtgataactagggtaaaagaacttttcaaaggacaccaagagttgattttggggtttaatactttcttgcctaagggttttgagatcacacttcaacctgaggatggacaacctccactgaagaaacgtgttgagtttgaggaagctattagctttgttaacaagattaaggtatatatatgtttatgtgctaaactgtctcaaggaaattactgcttttccctttcttactctcttcgatattcattgatttgcagacaaggtttcagggagatgatcgtgtatacaaatcatttttagacattttaaacatgtacagaagggatagcaagtccatcactgaggtctaccaggaggtaggctcattgatgctgttatgtgtatcttttttttgttgctattctgtacttaggttttacatgtctatctcaggttgcgatcctatttcgggatcattcagatctgctcgtggagtttactcactttctacctgatacttcagcaacggcctctattccatctgttaaaacttcagttcgtgagagaggggtttctctggctgataaggttcttctcagacttttattttcctagaaatacaatgttctatatgtctaatcttttattgaacatcatttgattggaaattgttgcagaaggaccggatcattactccacatcctgaccatgactatggtactgaacatattgaccaggaccgggagagacctattaagaaagaaaataaagaacacatgagaggtactaacaaagaaaatgagcatagggatgccagagatttcgaaccacatagcaaaaaagagcaatt

SEQ ID NO: 7345 - DNA, 718 bp, Arabidopsis thaliana landsberg
aaaaaacttagtatgaatcaatgagcctaccttctggtatttcgcggtgatgggcttcctatgctttctgtgcatgtttaaaatgtctaaaactgatttgtatacacgatcatcgccctgaaaccttgtctgcaaatgaatgaatatcgaagagagtaagaaagggaaaagcagtaatttccttggacagtttataacacattatataccttaatcttgttaataaaactaattgcttcccctaactcgacaggtttcttctgtgaaggttgttcatgatgtgtgatcatataaccatttggcaagaaggcattgaaacccaaaagtaatccttggtgctctttcaagagttctttcatccttattataacaccagatatatcaattctatacaacacaatagtcggtaatcagttctcagaaaccatggagtattacctaaaccaagaccaaatgcaaacataaaagtagaaagaactttaacctctgagttttataatctatcatgatctgaagaaactcgtcatatttttcacgttgaccttgaaatttagccttcacggctctaaggtatttaagcgcgtcatttgtagtaggcttgtgtgcgcctccttctccaaccatggtttgaagtttagcaaagccctattgttcaaagagaggcagccaaaaaaaaaggtgaaacattattagaatcaaaagatggtgcaaggggtct

SEQ ID NO: 7346 - DNA, 3382 bp, Arabidopsis thaliana landsberg
tgttccgtcccttagacattaatcaggatttcaatcgtctgggttgctgctttctggatttctccgacagaaacccaaaccctagtaccaccaccttgaagctccttaattctatccgttctcgaattgaatcgtgcataggttagggttttagtggcgtgtatatatatattccaatttgttgattccttgggctctctcattgcggtggcaacaagttaaggtctttgataataatctcgtaaaggaattttcagtgaagatgggaagcgccgatctagtcgatgatcggacctttaacggtgatttcagtgtggaaggagttgctaagttgaaagagatggtcaaggataaactcaaggagtatatgggcgattacacggatgacattcttgtggtacgattttatcgattctccatctttttcagaaaattggaatatccgcttttggggtttattattcgtgttccttgtagctagaattgctgagttttggaattgaactttagttgttcttattgtggtgctaagaagtctctttagaattcaaatgacaacaaagtcttttgcttgcaggaatatgtgatcgtcttgcttagaaatgggagaagaaaagaggaagcaaataatgaattgaagatatttcttggagatgatagcgactcttttgtggcctggtatttatatatttcttatctttgtgtaacaaagtttattgcttttttagaaattcatattcactaggaggatatatgcaggttgtgggatcatctggctgaaagtgtagatgagtactttagttctaatgtggagggaactaccataaaaagctcattgataagcagtcatgaggataaagcacttgttcctctggattctgaatatgataagggacgtctgataaatcaaatggtgcacgtcgtggtagacaatggagaagccagccgactaatgtctctgagatccctcctcttctgagctctgaggttcacaaaattcataactacgagaagaaagatcataaacaccgacataataaaaggtctccatctccgcaggctcaatctcagaggaaaaggtctagaactgacgactcacggaatgaacaggtctgttattttgttaatttctgttgaatagcaatcaccacgtaatacttggattggaaaattgaaaaaaatgctaaaatagtttattggatgggatattgtgaagacattctcagtgtaaagttttggtcagagggcatctttgcgttctgctttgtatgagactaacatgtcagacgtccgtattactcttatctttgtgttataaggttgccttgttccagtatttgtcctgctgtaaagccaatgtatggatactggttatggttctctgattttgttttctttgacttgtttgatagagggaagctaaacctgatgtctctcgccggctgcttcagtttgctgtgcgagatgctctagctatatcaaggccggcaaatagttcgactgaatcctcattaaaacgtcttcgttcagtggtgtccacatctactcaaaactcatctgaccctgatccagctcggaaaattcgatctgttgctagggttgtgaatcccatggctactgttatgaaagctgtcatcgaagcagccgaagatgccaagaaaccaaaatctgggagaagtgtctttgacagaattagtcattctactggatcagagaccctggaccagaatatggtacttggtgaagtttcccccaaggatgaagaatctaggaattttagccaaggtcaggaagcggtacagcttcaatacacacagagtcttgccaataatggagtgtattttgagaacatgacaactaatgacactggcttgaatccagatttttcgtctgatcgaggcagactcggttcaagtgttaatgtgtctcacccaagtacttatcttgggaacagaattaacaatccaaatagtctgcagcatcgtttagtcgatgactccaaacgagttaaagggacaaattatcaaaatcgccttcctgaagttgcaaccaagcataagactgcaagtttctcaggcaatatagatacagggaaaacagtaaagttagaggagcagaggaaaataccagatgtgggtctgcaaagatatatggacgaaggcagattagtttctagtgaagctaccactcaattatctacgcagaaaatcttgggtgatacaatagggaatggaaatgtaagttccatgttttagatgcatgctcttactagctatttcaatgatagtcatcttccacaatatgttggccatgaaatataaaacatctcgaaagtttcttgttaatatttacccctcatgtctatgtcctgatgacttatttcgttcttactagtgatatcaactagactcctaatacaagctgccttgttgttctttgataggtaaaacctgctgccagtgtgaaagaagaatcaacgaccaataaatctgttcctggtgagttgttaaatatatcagtcttaagctatttgaagattcatgctattggaatttctattttttttttccttgacaacctcacttctttggtccctgttgttgtagttcctatgttaaagttgatctaagatgatatactggcctttgcagggacattatccactacccgccctttggaagatgctagttctcgaacaatctttgtcgccaatgtaataattgttaatgtttttatactcgtgaacttgaattgagcaaaaacttgtcaattggtgtattaatttgaatgtgattggtcgtaaaacaggttcattttggtgccaccaaggacagcctttcaaggcattttaacaagtttggtgaagtgcttaaagctttcatagttactgatccagcaacaggacaaccaagtgggtaagttgtctgaattcatgaccccaattaatgtcttgatatgtcacagttcagttatcgaggatacgttagtgacccaagttgatcgccttttgcagatcagcgtacattgagttcacacgcaaagaagctgcagagaatgcattgtctctggatggtacctctttcatgtctcggattctcaaggtaaatattgaagcccgtgttcaactgtttaccatagccaacttattgtgatctttaggattggttagcatcttagttggataaggaatgagtttgtgtatattttgatggatacagattgtgaaaggaagcaatggacaaaatcaagaggctgcatcgagcatgtcatggtctcgaggtggaaggttcacaagagccccatcatactttagaggtggtgcagttagggggtcgtctgttgtagagggtgaggcaggagtatgcattggaagcgtgattca

SEQ ID NO: 7347 - DNA, 4165 bp, Arabidopsis thaliana landsberg
tactctggtggcttaacttgcattctataacaataaattgatttcatgctcaccgatatgtgccggaacatttcatcttttgtatatataaggttcaaataaatctatggtggtcagtgtatgtgtttatgtaactatatatctctatgttaattcttttcgtgcaaatgaatttggatgtaagtaaaggacattaacttgaaagaatggatcaatgatatatcttaactgactaattattaatgcttagagtatgcttaaacagcttaactgactaattattaatcggaattatatgtgatgatttgacatatttaacttaagaacattgagtttaatgctttctttgatttatgagtttgagactttcattagttgcatatggctgtatctgtacgaagattctaatgaacttgtaaatgttttaaagataattatatgattataactacatgtgttgttctgtttggtttgataatttcaaacttaagatatagtatttgctcgacattaattgatgaaaattagtgggttacgttttaggtaggtatgatatggctatttattgaaagataggacaagaaaaacagaaggttaattgtgttgtacactacacgtgtacttgaagaggagtgttccaatgtaaacttgtgtgatgggctcaaagtgtggtagcagtagaatcatcactcgttatcacttttgttgtaccaaaaaatttataattaacgctttgcctttggcttttcgaagcggcagcagttttagcaccaagacataaaggcgataagcggctgtttgcattttggccaatttcgctcattcaagtacactaataataatttgaaagcttttcaagttaattaaattaatttaaatatttaaaaactatataattaatcttattgcattggattaatagtcatatattgatgtctttggttaattaacaatcctatatgattagtttttttttcctttatacatgatacaactaaatctgaagttagaatataacatttactgatcaatcatttagggttgttatgtaagaacttttttttttgtttccagcttgttccaaatcatcagagtgtagttgttagagatttgacaagggacatggaatcaaaagagaatatccattatcacggagagaccaagactgggccaatattagccaataattcaaatgtctataaatcatatatataacacgtgactccaaaacttatgtagttgtaaattgtaactagttaagtagcgggttaacattcataccacgatggctcttatcaaaacttgaaataggtaacggttaagggcgaaactggactagaggatcggctgaatttacataacaaatttcaagatatgtagggttcggttccagggagtaaagcatacacttagtttgcttaggaattccacttgactattatcatcacaatctttttttatagggacagaaatctcgtaaatattgtggggaaaatgatcgatcaacatctcacatgcatgcgagaattacatataaagaccttcctcgaaatttcctatctcacaagctaacaacgatagctttgtttttgtccaaaacacaacttcaaatatcactatcttgaattttaattgtgtgatttatatacctttcatatcgttgcccataccatacgtataacaaagctagtgagccaaacaaaatattgaggagacaatttcaaaatgattgagagagtagtggagctttccggaataataataataacatagtacatgaccattcgtacaactgtacaaagacacaaagagttgagttgtgttgtgttggcgtctctgcttaatgattttagtgaatattttgttttattcggagaaaaacaatccgagcttggagttattttttgtggtttatagattctttcacctatagttattttcagcaacttataacttatatttctttttattttggtctaacatataacttgtatttaaaaatcataaattgaataacaccaaaatataactaataattgtgaaatacagcattgtcaatttaaatatgtaaattattgattgaataacacaacattgtaattggattctaaaatgcaatgcaaatatccaatccaataaggcaataacctagtgatatagtttctgctgcacacagagggattgggctaaatattggcagacaattaggtagcaaaatgattagcgtagttttgacctctagagctgataaaaaagggacttgaagttgtagacaaaggcctttataatcagaatattatatttcataattcatcggctccatgtgtcacaactctttacatacagatttgtgaatactaaaattggaaaacttggatatcttggtatgattagtacaatcctctatcagtttacttagtatgaaataggttttggatttagcatctaaaatctcaaatcttgttgaaaacgattggcactagctaggatgttactggtaaccttttgacaagaaagcaagtcccttttgtggttaatttgttcctatcagataagtgattgatctccaataaagaaaggctcataagagttggttaagattcttgtataacgttgagtgattatttgatttggtttgcaggtcaataatgcagggattgctagtgtaatcactgatgttgatactcagagctgagatgggaaaaagtaggtactaggtagctttcgtgtttgatttgaaacaagcgtcattatattaccgattgatacaaagtcatcatcgcttagaactttgcgcaaaatagaggatagggttgtgtgaatgactcatcatatcattatagaggttaaggaagacaaaagaatattacaacatcattaccagaaatggtctttggttttttttccttctacacatcaaacactgattctcatgtcttttggatttctaccagaacaaactaaacaaacacaactcaacccataaaccaataaaaaaaagaacacagataacataatcaccaaaaatagaaaggttaaaaaacgaaagatgtacaaaaagatatgaattctgaatcccaagttttaccttctcttggtttaatacttgacgtgcacgagaacgtggcgtgagagacagacactaaagaccctattgcggcttcttcactttgattcgctattcgttgcctaggttcaaagacccgtccttcattagcttgatgcttaggctattgaatctccctcttgagtaatgacgagacgcctttctccaatccgttcctgttttcatcattgccgcaaactcttcgtagcttattctcccatcctaatgtcaaaaatccatgtcaggcacaaccagaagaaacatttttacactaactatagtctctaaggttctgtttaacgatatgagaagtgaactctctacagatagtatttccactacaacagagaaatcattttgcctttagtttatggggaccgcttacacaacagacaaatgccaaaagaataaaactgaaaaaagtgtttaaagctacatgttttgtcctcaggcttttaagaactttttgcaaagcatgtttccattacctatgtgtaaaactgtaaattcaaatggtttggttatcatcaaacaaatagcgcaaaaagaaaaaagatttaaagtcacatctcctgtcctttgtgcctttttaggacttcctcacaactttggtttcctaacactcttgcaaaagaaagctcttttgagtttcttttgaacatgatgagatcataccatagacagaagatttgacacttaccttgtctgtgtcaacttcttggaatatatcattggcgacatccacacagtcatctcctccatcttcctttaaggcgtcacaaagctcctggggcaaaatgtacccatttgcatgcttgtcaaagtaagagaaggctttgcggagatgctcatcgtttgctaccttttgcaggtggagagacactgctacaaattctccatagtctagagttccttttactttagtatccacctgttttatacaaatttgaatgatcaagacaatattttagtgaacctggattgtgaacgtgaacaaaataagatcactgaaaaattaagcggaagtgaatgatatgatcatgcaaaaagaagtttgac

SEQ ID NO: 7348 - DNA, 3202 bp, Arabidopsis thaliana landsberg
gtcatttttttcttccttataaataatgagtgccaatcggaaggtgatagcatcctttacgtcttgtttggtagattactaagtcaagttttattcatgaaatttccacttatcaaactttctcattttgttaaaatttaaaaccgtttttcaaaagttggtatagccatagacagaaaaaaattattacaatcctatctgatttgactcagacaccctaattagtcaaatctcaaaattagctaatattaactaacgagttgcgcattttgcagcagtacaacaaaattagtcaaaataatttaggataacagcactaatcacaggaacaggtatttttttttttcctttcttttgacatcataaagatggattcaacttatagattggtcagaggcaatctttataggtttcatgattgaataaaaaatatgagactcagtatctaagtttcaaacatgtttcatctgtgtttagttgattacattttcataatagtttattaatgacatatagaaatgcgaactatacaattataaaaaagatgtgaattttgccagatactcatccacaatatagacaagtttttaacctcaacaaatctgatgtgacatttgtcaatgtctgtggtttataacatgtttctcaatgtcaggatcacacacaccacttctcatgtataaatacacataaaagcaattggatttggtaagagggaatctgaaaagtgtgtgtctgtgagagaggagagagagaatatgggcaaaggaagagcaccatgttgtgacaaaaccaaagtgaagagaggaccatggagccatgatgaagacttgaaactcatctctttcattcacaagaatggtcatgagaattggagatctctcccaaagcaagctggtatgtctatgatctttaaaagcctctttctttagcttttctagtcttctggttctgattctatctatgcatgcaatgaaggattgttgaggtgtggcaagagttgtcgtctgcgatggattaattacctcagacctgatgtgaaacgtggcaatttcagtgcagaggaagaagacaccatcatcaaacttcaccagagctttggtaacaagtatgtgttatcttgttaatgtcatgttgtgggctcaaagttttgattttgacaatagcttttctgcattttggattcaggtggtcgaagattgcttctaagctgcctggaagaacagacaatgagatcaagaatgtgtggcatacacatctcaagaaaagattgagctcggaaactaaccttaatgccgatgaagcgggttcaaaaggttctttgaatgaagaagagaactctcaagagtcatctccaaatgcttcaatgtcttttgctggttccaacatttcaagcaaagacgatgatgcacagataagtcaaatgtttgagcacattctaacttatagcgagtttacggggatgttacaagaggtagacaaaccagagctgctggagatgccttttgatttagatcctgacatttggagtttcatagatggttcagactcattccaacaaccagagaacagagctcttcaagagtctgaagaagatgaagttgataaatggtttaagcacctggaaagcgaactcgggttagaagaaaacgataaccaacaacaacaacaacagcataaacagggaacagaagatgaacattcatcatcactcttggagagttacgagctcctcatacattaatgaagccataaagcaagtcattttcaccttgaaaatggaattattagctaacttattggcattattagtatataagcaagatcagataggcgcatgtagtagcaacaacgaagaaacgtcgaattgtagacaaaatgtagatattacagagttgaaagattgtattttgcaaatgattgctttgtagtgaaatcaagttatcacaagctaacaagtaacaaccacctagatttggaaagctgacagatgaaaattgattcatcacctaacagtttctacataagaacaaacatagacttctcttccaaaatagatatatcttcagccaagagagtaaaacttgaagaacgaaaatgttttagctttcacagattctgatgaatacatcgattgaatcattcacacagtttcaattgcaaatgctgaatttcaaaggaatcatttttttttgttttgcttttgtttgtttctgtagatattagattcacttacgctacatctgagttctcaaccatgtggaaggtgaagtagaatacaaacgattcagagaacttacccgaaaaaatccgatcaattttccaatctttcttcgtccatttgtcgttgcgagacctagaaacactgtgagacttgcagagggttcaaatggtgtaggagaaaacacttggggtaaaataagtaataaaataataatacagggtttatattgcaattattgtttttaagatccggtacaaaacggttttatatagtccagtgattccggtttctggtacgccttaccggttattttggtttttgatttaaaagagcagtcttttttgcttcctaggtcggtttcaaatcgttgatctttccgggaaccaccgttaaacccgtggatattagagttgccatcttgacgacacaaagtcgtgttttttcagggcgacgattttcgtttgctcagtggatctgtctcccgccagttcaatacgagaagaatctcgacattgcaatgtttgaaaagagtggaagaaaaaaaagttaccagattgagtggatgtttctcgctctcagaccattggaacccggaaatatcttgtttcgatcaaattggtttctctcaaatcactatagagactacggggagagctgtgcatgcgctttgtgtcaagggattagttcgtctgagtgtgttgcacaccaacactttgattaacatgtacaccaagtttggccgagtcaaacctgcgcgccacctgttcgatataatgcctgtgagaaacgaagtctcttggaataccatgatgtcggggatagtccgtgttggattgtatttggaaggaatggaattttttcggaagatgtgtgatcttggtattaagccaagtagctttgtgattgctagtttagtaacagcttgtggtcggtctggttctatgttcagagaaggggttcaagttcacggctttgtgg

SEQ ID NO: 7349 - DNA, 584 bp, Arabidopsis thaliana landsberg
gcgctctctgggaagatgaggaactaaagtcattggctcctctggctccctcagctatacatggaagaccatgaatgaatctagaggagagaagctcagcaacggtcaacagagcataacaaatgcgtatggcttcagtgacgatcccgggccatttcttagatttctgagagagacagagtggctgaatgagaatgatcatagacattgtttctctcttggtatcaagagaggagatggtgaaagtaatctgaatgtttcttggatcacaagattcaagtactctacgttatgtagatcttcttctgtgattcaagtatataccgattagaactattttttccttgaaagtacagaacaaaagtgttgttgaattattttacttgtaaaaccaaaaacataaccaaggaaatgaagattatgccgttaaaattcttctcttttggtcgaacgttggagtttttttcctgataaatagtgtgcaaggcacgtgagggaaaagagaaggaagcttgtggaagaagtgaaggctcatttgtttggtatgatgtgtaaataaaaaaaaggttgatttgcgcagaaag

SEQ ID NO: 7350 - DNA, 510 bp, Arabidopsis thaliana landsberg
ttatttgcctgtttacctttctaggtgcaagtataaattctatgattagtctattataattacaatttttattttttttactctgatttgaatgttttacatggacacgaaagaagaagaagaccacatgttggttccgaataaaacatggccgagtcaccctccgagtcaacctccgactcgcttagcaccaccacatccactaagcccgctcaatccgggactgtttctatttcaagccctcaaagtcaccatgtcgtcttccccgagatcccaatcgagatcgtcagtgaagaagaaatggctattctcgatgcagctcttgcagcctcccgctccatcctccttccgtgatccgttctgtttctccatcacggataaccgccggcggaagtcccaaaacaatccgctcaattactctcttctccaagaggaaattatcggctggttcagatatcgaagagtcttatctacatcgaattagagaaatcagcttaggtgtccagatct

SEQ ID NO: 7351 - DNA, 724 bp, Arabidopsis thaliana landsberg
gattaaagattatatatagagaagtaaaagggtatttctcctgttgtatgaagcaatagattactcaatgtaatgctagtccaatgataacaaaagaaagctttgtataccattagggcacgggttcgagacttgggaagctcttgaataaatttcccaaacccactcagcctaactctacccttaacttccaccatcgccggccactcgctagtttctgctttctcaccactgccatagaaaaactcagtcagagaatgaaagcatatattcaaatgtcatctgtactcaagattcatggtgattttgcacaagtaccatgatattctgaatttctgatagaaggaaacattaaacatacggatggactttgtagcatcccctactctactcagaatacttgacccccttaaacacctgatgcatcttctttttatacttttcacagacactatctagcttgctgatgtttcaattgatctagcatagatctattcttaagcttattcaaatgccattctaattgaatcagagaagtgattgattgctaacacaatttcagttcaagtacaatttacaatcttcaaagaaatatctaatattagcatagagcaaaaattgtctgtgcccaaagaaaacagtatcaaaaatattggataatagtgggatattaagtaggtgataagaactaccttttgaaatgccagcgacaggactacggaag

SEQ ID NO: 7352 - DNA, 444 bp, Arabidopsis thaliana landsberg
atccagggctcaatgcgggcctgcttgcatgccaatatccttttttttgtaatccccaagatactgattgtcacggggccggggatcacaatgagcttgcaaaccacaaacttctaccatgatggagaggcacatgccgaccaccagtgcctcgtatttaacgtctatgggataaccttcgtacgcgagccaaagtgattgttcaagaataactgtctcactgtaagcacactatgacattggaccctcgatgataagaagctccatccagatgaaaaatgctaaggtgccacggaatgacacgttcggtactagacaccgtcatcttgctcaggaaacttacgagaagggaagatcttaagctggtgcacacatgacactctacgtgaaattctcttaacgagaatgcccagttagctgatcctctgtactgacatggactga

SEQ ID NO: 7353 - DNA, 1549 bp, Arabidopsis thaliana landsberg
tgtataatattaggacccataccatattttccaattgagatgtgttgtataatccacttggaaaacaacttactaaaatgacattgcactatgtacttaataccgcactaaaccttcatactcttcaatattttataggatcaaggtaatggctatgagcctaagatatttatgaactaacgtagttaagaaatacgcgtccatataaacgtaaaagtaaaaaactttcaaaacatgaattttatgaacttgaaacaaaccagtactagcctacacatttaagtcgatccacattatctcataaaagagtagtaatatataatgtattgagtggtaaagtactcacatacaacttacaagccttaacgagtttttacatagaagacctataaggctataaggattatcaatagagagtaaagacagtctaagatggtatacacaagtatcataacagctcaaatgactaaatgaagttaaaaacgaataaaagaatatgtgaatcattcacagtgaatgcttagaaaacaataaaaaataaaatgtaagaaattatgaatgacttcagactctaacgttgttctgtctctacatttctcctatggtcagaagaggtggcacaacggaatcaacatcacactaatatcgtccaaggagcctcgtgatacagagaggtcaacgagcttcttgcaagccagcaatggcttccgtttctgatcggtccctttgcaaaatggtcgagctatgtctactgcctcctgattactaaccttgtcccatagaccatctgatgctaagatcaagaactcgtgttggggattgattcggagaatatttatctctggttcagatattatccattgtttgagatgagcatctcctattcctctagataccgctaatgatccttgaattctccaaacactattgaatgtatccacataaccgccctgcaggattatcgtaatcagaaccatgtaatcatgataaaacctaacagtaacttcttttgcaagaattcttaccgagctctcaattctgtttcgttcatcatctctggaagggcggtggtcagaagtcaaggcctccgcgaatcctccaacgctcaaaacagcacggcagtcaccagcattggccaccacaagatttccgtcgctgatcagagccgtgacacagcacgagccgcccttaacgtttttttccttgagaaactcagaatcagtcgctagataaccacgttttacagcttcttcaatctttgactcgttcctcccaccaactatctcgccaagaatgttactacacaagttcttagccgcaaactcagccgctgttggtcctccgtgaccatcatagactccgaatattgcctgcggttataaaaaagctaaaatgttaaatccccattttgtaagtcactggatctatctttttttttttcttgaacactagtcattggttctatctaatcaagaactactcatacaatttgtcatatatatgattcactgaattttcttataatctttagaacttctaatttgattca

SEQ ID NO: 7354 - DNA, 1711 bp, Arabidopsis thaliana landsberg
aggaggatgaaagtggaggtccaaaagtttatcaggccataaaataactgatttaatcaatagcagccttccagcataagatagcgatgaggttgcccagcctttgaaacggtttctcagcttttcaatgaggggagagaattctgaaactctcagcttcctgcacatcagaggcaaccccaagtatctaataggcagagaaccagtggtaaatccagagttagagacagctatggattcgccagggtctaggccagccgtgaagatttgagttttctcacagttcatgttcaaaccagaccagcttgcaaaagtatcaagagcctccgcaataccacacaaagacgaaaaggatccatcaaagaagaccatgacgtcgtccgcgaacatcaaatgagatatgtctagatcctttgtttttgggtgatgcttaatgaagccagccgcgaagctagagctcattagacgactaaaaacctccattgccaacacaaataggtaaggcgaaattgggtcgccttgtctgaggccacaagagctttggaagtaccctgaagtgaccccattaacagagacggaaaactgaggagtggtgatgcactgggagatccaagaaatgaatttgtctgggaagtttatggctttaagaatagctaagatgaaattccacttcactgaatcaaaagcttttctaaggtcaaccttaagcatacctcttggcccgatgttcttcctaccatacccattgaccaattcagtagccagaaggacgttttcagcaagcagtctacccggaaggaaagctgattgagcatttgagacaaaaaaaggcagaagggactgaagcctgccagctaataacctcaaaatcaccttgtacattgtattgcaaagagagattggtttgaaatcagaagttgaagaagcatttgggattttagggatgagaataagagttgttgcattccattgcttcagcatctgacccgaattgaaaaactttgtaacagcgtcaaccacttcaggtccaataatgtgccaacagctcttgaagaattcagcagagtagccatcaggacctgcagtcttgtttcttggcagggaaaagactgcgtggcggatgtcttcaggggagaaagctgattcaagagctgcatggttagcagctgagcaccgaaaagccaaaaggcttgagagatcagctggatcaaacaaagataaaggttcagtccctccaagaagagactgataatagtggacacaatgatcctgaatcttttcttgagagtcaattctttcacccgaactgtcaagcatgtagtgtatatggtttatggcttgtctggcagcagtgatacggtgaaagtatgaagtgttcaagtccccttctcggagccaggtgatgctggagcgctgacacaaaaaagattcttcggctcgaaggagcgtctgatacttctcatttgcagccctctctagaagggctttggctggagtggtgcttgttaggatctgttgttggagttgcaagacaaccaaatgggcctccttcactcgcttttccagattagaataattatccttactaaactccctgatgtgatttttcaggaacttcagctttcttggagagccggaacattgcagagcccactaaattaaagctgaaccaaagatttgcaaccaaaggcacgaaatccggatttttcga

SEQ ID NO: 7355 - DNA, 1989 bp, Arabidopsis thaliana landsberg
  unsure (1)..(1989): unsure at all n locations
aaattagagacaataaatcacaagctagcacaaatttagttctaaattcaactaaattcccaatcgcgttataaccctaacacaaaattaaaacaaactcattcaaagaaatgattttgtaaacaacccaacacacacaaaatcattctaaattaatgataatgtcaaatttataatcaaatccaaaacaatcacatagaagaaagattcggattgtgcataaactatcagtgaaaaacagaatgagtataaacgaaccttaagaggttgattcagatctgaagtttggttactgtccagtgttatgtttataaagaatgagaagaagtgtgtgggctcttgaacttaaaagcttcagaaagatacatttcaactatcaccgagctgaaaacgacgtcgtgtcaacctcaaggtactttttgccgtatagagctaaacatttgcgttgtagctattcataacaaatcttttttgattatacaagaacatatccaaatcaattacagactaagtattgattgtaataataatacataatgtccctatatttccctaaaatctgactctttattgttgttgttttttcttgcggatactataataatttagtgtggagaaatatgttttagcaaaagaagaaaacgattaagaaaagttaatgagagttgtcttcagaatcatatccataaggattattactagcccagttccacaaatctctacacatctcctcaatcccatatttggccctgcatttgttaccaacccaaatttagacttatctcatttacatattcccaactttttagtgtctaacatacaattttgtgcaagtaatatcttcaaagttatagctttatgtatgtatgaacttacttccaattcaattcactttctgctctttccgtcgaggcgtatacaacttcagcatctcccggtcgacgtcccgcgatcacaagagggattttctgatccacaaaagagttcaaaggtttaacaaaacatgacttagaatccaagtatctaaagatgaaagaaagtgtcactttttacctttccggatgctttttcaaaagcatcaaccatttcaagaactgatgttccatttcctgttccgagattgtacacttcacaacctgaatataaacaacacacanacaaagttaagagacttgagaatgattgtagtagataagagaaacgaatggaaatcataatataccgatcttgcaatcttctagcttacgtagagccgctatgtgtccatcagctaaatcgataacatgaatgtaatctcgaacctaaaacaaaacatgagatcaaaatgttgaaaacctcttcttgttttatgaaaacataaaagacaagtacatacccctgttccatcttttgtattgtaatcatttccaaagacagtgagatgaggtctcctaccaacagcgacttgttgtacaaagggcatgagattgtttggaataccacgagggtcttcaccaatgtcaccactaggatgtgcaccaacaggattgaaatacctaagcaatataatcttccattccgggtcagaaccgtatacatcgcggcagatttcctcaatgaatagctacaaaaacatccataataagtcagattcacacttcataattaaccacaatactcaagtgggttttgtcaagaaaacaacctttgttcgtccatatgggttcaaagcagaaattggaaactcctctgtacaaggaacttcttttggagagccatacacagttgctgatgatgaaaacacaagctggaaacagagtaaaagtagctaatcatgagaattgatcaattaaagtaaaaatggattcgagcttgttgtgtagtggcaaattatacatacatttttgcagccatgttgagccataacttccaaaagagtaatagtaccaacaagattattattataatagagcaaaggcttctatacactctcaccaactgcgttaagtc

SEQ ID NO: 7356 - DNA, 2622 bp, Arabidopsis thaliana landsberg
aaaagttcgtttcggtcatgtcatgcatgtttccatggactaattaatatgaaaaaattgtaaacaccatatggtcgcgcacactagatctatcacaagaactatcaacattacttttcaaccaccaaaaaattatgatagcctactgccttaagcctaacgcgatccaaccaaacgcaccactaaaaatccaattcaaagacttgaaacaggtaaattacattcgagcaattctactcctccgaatctacaaaagtggtgaaagtgcttgatgatgtcagtgatttccaaatatatatagagtccctcgaaaaggtaaaccttttccaaattcatgatagggtaagatcaaatcaactacaaggaaacatacgtggcagaaaaaaagttcaaaagataagattgtagtttgtttgacaaagaaataaagagtcgcaaatatggatggttacgggtaactacaaaaatcagagaaaaattgatcatatatcatcatgaattccataaaaggagaaagaggtggctacacaagcgatcctataaaaaaacagatcaacgagtgatccttgtagttgtggaacactaattcttacacgattttcgctaatccaaatcctgataatcttagtgttacactaattcttacacgctttaccctaatccaaatcctatgaacctaattcctgatggtttgaaaatttttactccctatgttcctaattttttatttttttctagagttttgaaaaaaaaattgtttaattatttctatatttaaattttttcttggatgaaaggtgcttttctttgtaattacattggtaatgacagaataatactcaatagtcaatactaatttataaaaaaatattggaagaagaaacaaaatgccatctcattttggtctcacacacgacaacataaaaagtcgagcgcgtggctttcacttgttatcaatgtcgctatcgaaatcaattgagcatttagtggaaaccggtaaggaaggcgcacgagatctcatcgagtaatctcggtacgggaactcgtcgtcaaaatgtccggtttgatttccgtcatcgaaatttaacgagtagctcaactgatcgtaccggaatttaccctgatccgatgaccggttaggcattgcaccacctccgcatcctccgctgctgtttccgactctccctcctcctcctccacagcagttgctgcgtccgaaccggcggatatacgtcttccatctaggtccagcgacgagctccgaccactccctcatcctccgccaccctcggatccaccatcgctcgtcgggttcgagtttgtcgacggtcgtgatccgttgccaccacacagatccgccgcgagttgatggctgagatgaggcaaggcagggcatgaggaaacaacaacctcgcttcgcgaacaatgcctcgtgcatatcgtcggtggcatcaacttcagcgatcggcggcgattgatgactcattctcagagagaaacagaaacgaaggaaatatggaatttcgtcctgatctagctactctcttttgtctccttagatcgtcgttcctcttctcatctccaactctaaaccctaattttctccctctacccaagagatttctatcaccttctccaatcaacgcgtctcttgagctgtaactaaaacagaagagcacaaaacggcgtaaccgccaacccggcaatattggttctcattaaccctttttaaccgctttggttttatcacatctaaccgggaatttcagctgttgatgctattaatttattaaaccacatatgaatgaagggattcatatacgtaattgacgttagcacatttggttccaagtattgatcgatacattaaaccgcaataaaattggtccgtttctctctggcccaaaattggttcgatttctccataagctgaaattgataactcccagtggatgtaatgtatctaatattcttggaacagattcattgcaagtgaatgttctaaccaaaatcacctaatctttttgcaaaatctaatatagtaagtaggataatatcttacttttgcaacaagccactcattcgtaaaaaccggacatactttaatgggataacctacaagtctacaactcatctggaaactatatcacaaccgatggtttagtatagctcttcaagtaacctttttatgaataccaatatcaatcagaagaaggataccggtcagcagtttgtttcagatcttcaagctgcgtgagaacatattcaagcttctggaagcagatctcattggctattctcgcgttgtaatcgcatttctcaaagggacggtactcgcaagcgcttttgatctcttcccttagtgtcacttgtatatcctgcaagtttcacaagaacttcatcttattatggattggcgataacattatagcacatttatgtacagtcaaagatcaacaagttcatgaaccagacaatgaagctgatatcttcaaactttatgattatctctagaaaaaaagcagaatcaaaagctttttacttgttcacagaatgtaatgatccctaatctagacatgtgtcagatgagagcccaaatgttctttaaacagtgagattcca

SEQ ID NO: 7357 - DNA, 2086 bp, Arabidopsis thaliana landsberg
cttttaagatgataaatgatagttacctggtgtcagggttgaatatggtatccagcttttcgccattgagcgattgtagagccgtaaaatattacaagggtgaagtatgaatccaacagtaagattctgtcagctgcaatggatgctacatcaagaagaattggctctggcggtgaatggaatgagaaagaaatcagtgaaggttgaatcatcacgactgaattagaaacgttctctctgtacaatatcattcgaaaatatgctgtctcgtctgggctgttgttaaagacctacaaaaggcaaagccaaatgagcccaaaaggataaaattgtgcgttaaaaagatttcagtcgatcgtgcatatagggacagtgtggataagtacctggacaaactgagatcggcgcaagtgaaacacaaactgcgggaaaattgataactgagaagataagctaaaggaagaaggattgcctttctggtaatctccaaaccaggtgcatagatttatcaacgctttatcgacccacctttggggattaaactcaggctgtaaaagaagaaataagaaacctaagaaacactaaaacatgataacatctatccgatattcagcttaaaaaatctaactagctctcatcatcgagtacctgagtctccatggtggaggaaataagtcgtgccattactacagcagctgcttcttggtcaaaaccattgctcaactcctatacttaacatagcaatttccaaggaatagttaatgaccatagtcgggatcagtctagccatgtacaaaaccactgaccaattctcaaacctggtggcttctaatcactacttagaatggattacaaagaacataagatgatataagccataaagtttccacaatataactggtgtggcaactcgtttctcataaatattacacccaccaataatattgaagtggtaatataaatgctgtcctctaaacgactaaacgttataagaatcacttcccccacttcttccaatggactccctatttaacacaatagattctgaacatactactcgaaacttgcctgtaagctttcagttcccattacccatcttctagaaagagttgttacccggagtcttgtttgaccatttgagtgctgatagctgcagaaacatgagcgttgtaaagaaagtgtgtgacgttattatatccataacttgcaataataattttagttggaaaacttgcaatcccttactatgtcaaaaattgaaagtaaaactgattgctctgcgactgcaaaacaacatcagctgtatctattttagcaatttcaaaaaccaaacatatggaagtgttgttgtcgaggccacacatcttccatgcgcttgtgtgtccctgaccgatggcagtgtcagagcacaacggtcctttctgcaaataatcatcagatattgatcacaataagcgaaggaaaaatagatgcctttaacagttttatatgataccttttcgagagatgcgcaagggccaataattccctgaactttgatatcctttgagcagttaatttcaaatataccactgtaagagagaaacaaatcataagaaacaactcgctgaagctgaacatagcatacaaaagactgtttattttcgataaagaaaacatacatgaaagttaggtaagccattaccatgaggacaagcctagatcattttcacctgactgacacacgcgtttgagagaatctctaaatactgagtggccaaaactttcagcaagcacgacaaatccaccagtctgctcaactgcaactttgagctcagcaatgcctacctagagatgcacatattaaataaaagagatagctacaaaacaagaaagacagtactaacaatgacagatatttccacagaatcacctgatcaacagaactagcaaaaacatcaagaacatgaccttgatgaacaagttgtttcgcaagcatctcatagaattcaacagctttgtggtaactacatagcagaatctttatcaatatccttataagaacaaataggatccgaaagctcccgagaaacaatctagaaagagg

SEQ ID NO: 7358 - DNA, 1034 bp, Arabidopsis thaliana landsberg
cttttcaaacttccatcattttctacatatacttcaagatcccatcttgggctctagacattttcttcctcctagcttgctcttgcgactgcctctgtttcgaaccatcgacgccttctttacacttactctgttgctccttgagacgtttcaaacgcattttgtctctccacatcctcttctcaagctcatccacatccatctcatcatcggtgtagtcgacatcttcaactacaggttcttgttcagcttgtggtaatggacacacatcgagagatgtggaggaagagaagaaatccatgtttccatacattcccatctcgttaaacatcatcatgtctcttccaccacaatcaagaacagagcctatcgatttctttaacctgaaaaagaaaaaaaaacttataagctttctttgatcaaacaaatcaccagaagctaaaaacaacaaatcaagcttaagggtcaaaaacaaaaaaaaaaactaaagagactaagaagtaatgttctcatatcaatacatagattgtcaaaatgaatattatagacaataaaaccaaacgatctagaaagaacagagagccaaaaaacatcgaaagtattatcaacaaaaaatagaaacaataataagataagaaaagagacaaagagtgtttgcctgaaagagttgcaaataaagaacaccaaaagtggtatctctctcttgttttataaaagaaacagataaggaagtcttgatgaatccccacaacttcagagatggagaataagaagaaaagtcagttaaagatcacatgggaagaaagaaagcgacattaattactgtgtggtggtttctgggtttgtagagtttgaagatgaaagagagaaagagagagagagagagagacatgaggaagaagcagatgctttggtggggggatttaaaagatttaataacgtcgcaccgttccagtcttttctcacttttttccaaaatatataataaaagagtgagcattgattgacatttttaggatcaaaatgaatgcaat

SEQ ID NO: 7359 - DNA, 558 bp, Arabidopsis thaliana landsberg
  unsure (1)..(558): unsure at all n locations
actctacgaaacgcgttcgcgcctcggtctttccgaaacctttcttttcgccgccatccgattccctgacacaaatgccccaaactggtacattctccatcgaaacaaggtttcttctttacgtttgagcaaactcgaatcacttccacctgtgccttatggatgttctgtcgtcacaatcggtcaagagatgtatgtaatcggtggactcctccatataagacgtttacagttgatgactctcatcgactgcagaactcacaaatgtcgctcgcttccgaaaatgaaaaggggtcgttaccatgcagccgccggagtattcgacggaaagatttacgtaatcggaggtttcaggatgagaaaaccggatgctgaatggattgaagtgtttgatctaaagaaacagagttgggaatctttgcctggtccgtaccctaaaactagtacggattcccagttttttgcacatgcggtgatggaagacaagttatacattttgggctcacgtngcttgattacgaaccaaaaagaactgtgaatgggacgcaccgtcaatgc

SEQ ID NO: 7360 - DNA, 2774 bp, Arabidopsis thaliana landsberg
catttgtccttactggtttagtcaacagttttgtctgaatgtaattaggattctatacaagaaatagttgtggaaatgcaaattattctgagggatttgtcagtgaagctcttctgattctatgctccaaaactgatttgtgtacgtattgtatagatagagagattgttgtattgctacctaaccatcgattcattgtattagtttcctttatggtctgtgattgttctgtgtgtttgtggtattattgaccaattcattataccgtttgcacgaatgcccttaaaacttaaatgatattttcctgaaagacttgtatatgttgggttgtgtagatagagtgtgtaattttgcaacttaaatattcattagggtggtccttatagttgttttaatgtgaagagtaattggtgtaaaagcctgaactcacttatatcatatcagtgattgttctatgtattctggttagcgaccaattcagtgagaaccagtgattcagaagctgttccttacttgcttttttgctttgagagtcttgtaaaccttgattatgttacttagactacagaaactgcttgtttttgatgagtctctgtacatatgtaatttcattgcctgattctatttttgtactttttccttgtagacaatgttgatcttggtactgcctgcggtaaatacttccgtgtgtcatgcctcagcatagttgacccaggtaacacactcattcactgtcttttagactaatcatcttacacatgcaatgttaatcttggtttgtttacttatgcaatattttcaggtgactcttacatcatcaagtcactttctggagaccagtgatttgtgctcaattatcattttgtcctctttatctactttatgcgaagtagtttgtttcttcgtgatttcttcttctctcgcctagaattgtcatacttgtttaagatctttgaagactttgtaggttgccttggtttctaaacaattgtgttaattgaaattttcgactctctgaattaatactagaatcatattcctgcagtcactaagtattatatatgatatataggttgacaaaaacaaagtaattctatgtatagttaacattgctatgaacacatgttttaggtctaaaataaatattacaagaaatctatgtagttttctcaaaataaacctaattctttaagacttcataggatctattaccaatagtttaatacatgtgtccctcaataatctcaactctacaccatatttactatttagtgtcatataaaacaatttcttaaaaattgaaacataaattgaaaattttatgagaaaataccatataaaatctttttcctcgatatcttcctacacattgttatcatttccctttaatttatcagtttttttccttgtgattttaaaaatttgttggttttactattttgaaacccaaataatcagcataaaaaattgattttagggtaacaaaaccaaaattgaaccaaataaaccgcatttaagaaagaaaaaaaaaagtttaataatcttttcgaaaaatatgttctctctcttagtagctcaattaaagctggtcaatttcgtcgccgtcccaaattctcttgggcttaagaacttctctctcgattagttctaattgagcagaactatcatccgaagttttcgttctactgtcggcgttgtgttacaatttcaatctttcaaactcagtgttactcttgtagttcttcgcttctcttatacaaagagttggaaatttgtttctaggtttttgatttgttctgggtttaaaatagaagagttttgttctgttcttcgtgtttttgtaaactgagtatggatttggataaaaagcttcatcagatttctatcgaagatgaaaaaccgttggtcatttcaaatcaaccaaagttttgttcaacatgacaaaatacttgtagtcttctaggtcgtttcctaaatcctgagaatcaaatgatgtctaattggattttggacatgcctaggatatggagactttattctaggttcgtggagtagctctatcgaaagacagattccaatttttctttaaatctaaggaggatttaggaggaattttgaaagccggtgtctggactcaatatgcctagtgtgtggtgatggaaagatggattgcaaaacccccaaaagatttgctttttcttcctgtttggattcatctgtgaaatattccgatgaaactattatactaaataaacgattgaggaaattgcgaagtgtgtggggaaggtgctggaaattgttcttgaccttgataaatcacaagttcaagattattgttagagttcgtgttctgtttcctgttgcaaatcctttgcgcaactcgaaagaagtacaacttccaacgggagaaatggtgacgatatcctttgattatgaaagaattagaaaacgttgttttcactgtcaacgtttaacccatgataaaaatcggtgttttttttaagcctccaaattcttcaattgctatttccaaaaggttggaggataaagacaagaagaaaaaggtcagtttacaggaaatagatctcttgcattcaacttcagttcatcctcaactcatggatgtttctatgatcttatctgcacgtcatggtatttgtgatgcatcaaagtctttaagtgatgatatatatattgagctccatgaactgaaaatatttaagggtttcaacacaagatcttctgacgctagttcttcgggaacatgtgtaaga

SEQ ID NO: 7361 - DNA, 1015 bp, Arabidopsis thaliana landsberg
gaggatttctaaaaaaatgcggtttatttgattacactaaatcagtttatactttgattatttggggtttcaaaatagtaaaaccaacaaatttgtaaaattatccagtttgatttttgttcaaccatttcggtttggtttggttcaaagaatggaacaaaacagagaatagagagataaaacagagagatttcgaggatttattacctttcttgaccagcggtgtcccaaagctgagctttgatgattttttcgtcgacatgaacacttcttgtggcgaactctacaccgatggttgactttgactcgatgctgaattcgtttctggtgaaccgagacaaaagattggattttccgacgccggaatctccgatcaagactagtttgaagagataatcgtagtcgtcgtcggctctgtaggctcccattattaaggtatttgatagaagttacaaaatcgtaaagaagaattcagagagatgttgcaatatgatctaatgaaatgaatgatgtgttgttgtgttttgtaatgaaatgaaattatgggtagtgggtaacgacgaaagggcttattggttttggttgtgttataaaaataagaataatattaggattcaatcatttgttattattatatgcatgacttagcatatgtatatgttttgaaagtcgttggaaagattagagaacaaacatgtttgacgaaatcgtcgggtttatggccgccatgaacttggtaaacgcagaacaatatacacttgcaggaaaaaacaataatattgtgtcttcaattcaataattcaatttatagcttttctcacataaaatcacagggaaatttgttcataaataaaatgatagaaatgtgtagggaagatatctaggaaaaagattttatataggtatttttcttatgaaattttcaatttatattttaactttgaagattttttttaatatgaaactaaatatagtgtagagttgaaattattgttggacacatgttttagacttt

SEQ ID NO: 7362 - DNA, 2450 bp, Arabidopsis thaliana landsberg
gcttcgatgatgatgatcaaacctccaagaatccacgggaactactactcagtacaggccttactgtgttggtgaatccagtctgattaaaccaatttatgctagaggcgggttcaacagcgtcatcaggaaggacattttgcagtggatggtgcagaagagataaagccgccaaaattcatcaaaggcccttctgtttcttagattacaacatactcagaaggaaacacttgtctcaaccgtatcactttgtatgagtttttaataaccggtggattgataggaaaatctcctggacaactaaaaattgtgactagtattacttacttgactaacacgtctatctgttcttcttcttcttctaattacaaccaggaatgtcttctgagagattttgggttctataatcaataacaaaacaatcaggtttacttttcgggttttcactctcgattggatccaattggcctatagactgactcgttgtctcatatcagtcctccaattttgctgaatcattctttttagttttttactactgaccgaaactgaacttatctaatttcgtgacagacaaatgagtacataattaaaatttaagattaggcccaataatctgcattcagcattattctgaagatgtctctactgtagtgattacggtttttacatgaagcctgctatatatatactttatcaaatatttcagagctcaagcagagagcttccttctctggcaagcacgaaaaggccaccatctcctctagaaatcctgagatccttgtcgagataagtggtcaagagccaagagctgcctcggtttcctggaaacggaagcttgagaggtggctgaccagagagtgcccgtgaaatgtttgctgccacatcttgtaaggggttcaaagactgctttaacaacgaaaggctaatctgctgcccaaagacgcccacactctctgggagatctacacttgatttgatcaccgggggttttagcgtgccttctttgaaagaaacctgacatttaccaaacattaagacaaccagatggtgataccaatacaaattcaatctacaaagaaacctttttaacatagctttgttttaatggtaaggtttgattgactggaatgtaatcaaaagtacaaactgttaatgcttcagtgaccttaatactcaaactggtgtttgtaagtttagttacctcaattcttgaagggcttcgaacttcaaatgaagcagtagcactgaaggagaagtctgcaaaagggctggagagtgtagtggagttgtcgataatgagattgtttgtgtctattgactgacttatgcttttaactttcaacaaaggtgtcgaacccgcagctagtagaggaatcaactcagagaaagcagtgtacctatttcataacccaagaaaatacacaaaattggaacaacagtaacaattcctggattattatcattcttcatcaaagatttcacaatgtctcattctcaattcacagtgttgaaattctcagcgacaactaaaggttcctacatcatcgaaacaagatcatttaacttacagcaaaacccagttgccgtcgagaagttctggattctctaacggagccggagtaggattcagagcttccagttgattcacaagctccaaaacctccgctcggacttctgacccagctttgaaacctaattcagttccgtacaccgaatccgccaaacaccttttcagctcccaagtcgggtcagacaccgcacttccatttccagcgtcggcttcagtttctcctccaatttctcctccccactcgtcttcgttccttggaggatccgattccataaaccgggtcccggattcctcaagttcgggtccggatttctcgccccattcgtccgtaatcacattcacggtcacattatctggctgagagtcgggctcatttgcatctccaggtttctcaccccattcatctgtaactgcagacgcatctaggtcggattccgattcagattccgagggcagagaagatcggattttagaaaaccggagtggcttgggacgataaccaaaagagaaagagagagagttaagttttagggagatagaaggagagaaggtcttgcttggatttatggaggaaacatagaggagtgaagaaggacgagcgacggtgaagagcgtagccatggccgatctttgtgttcgagcttggtgagaaaatttcggaaaacaagattactcaagtcttagaaaatcacacgaaatttagatgaccccagaaaaaacgcaattttaaaacttcaaaaaaaaaaaaaactttaaactaatgggcctgacccaggcccattataacgatttgtattcccctccctcccttatccccgtagtgatactttgtatgagtaagtttgaaatcaatcatcaatggctgcttttgcttctg

SEQ ID NO: 7363 - DNA, 1012 bp, Arabidopsis thaliana landsberg
agacatatacagtatccaattttgaaatcgtggtggagaactcaaacttggtgatctttcaacaaaaactatgtaaatctttttagccaatgaatttgattaataaatactgatacgtaattagttaagagagagagaggaagaaagaaaacaaaattttgaaagggcccataacatgtcctctctaacgtcaacatcatctgctactattactttcaccctctcatcaaactcactcaacctttcatctttctttcttattacataattcttcagatccataaaacaaattgatcccttaaccttcttcaccaacatctctcttacactcaacaagagatcatatcatgtcctctccaagagaaagaggaaagagtttgatggaatcatcaggatcagagccaccggtgacaccaagccgttacgagtcgcagaagagacgtgactggaacactttcggacagtacttgaagaatcagagaccgcctgtgccgatgtctcactgcagctgtaaccacgtgcttgatttcctcaggtacttagaccagttcggtaagacaaaggtgcacgtgcctggctgtatgttctacggccagcctgagccaccagctccttgcacgtgccctctcagacaagcttggggaagtcttgacgctttgatcggacggctgagagcggcttacgaggagaacggtggacctccggagactaaccctttcgctagcggagcgataagggtttatctgagggaggttagggagtgtcaggctaaggctagagggattccttacaagaagaagaagaagaagaagccaacgccggagatgggaggtgggagagaggactcttcttcctcctcctcttccttcagcttctcttaagagattctccatcgtcgtgaaagactttgtggtaatatatgtttccaatatgtgactttgcataatttacatataaagcaagcatatctgcatcatttatatataacatatagattttgattgatataata

SEQ ID NO: 7364 - DNA, 2369 bp, Arabidopsis thaliana landsberg
ctttaaaattccccattctacctctttttttatttccgtcagagtaggactctaaacctcaagtatacctctacttctcttaaaccattccgcctcttattctgtgcaatttctctcaacaaagtatatatgggattgacctcatccttacggttccatagacaaaacaacaagactttcctcggaatcttcatgatcttggttctaagctgtataccaggtagaaccaatctttgttccaatcattctgttagtaccccaaaagaattaccttcttcaaatccttcagatattcgttcctcattagtttcactagatttggagggttatataagcttcgacgatgtccacaatgtggccaaggactttggcaacagataccagttaccacctttggcaattctacatccaaggtcagtttttgatatttcatcgatgatgaagcatatagtacatctgggctccacctcaaatcttacagtagcagctagaggccatggtcactcgcttcaaggacaagctctagctcatcaaggtgttgtcatcaaaatggagtcacttcgaagtcctgatatcaggatttataaggggaagcaaccatatgttgatgtctcaggtggtgaaatatggataaacattctacgcgagactctaaaatacggtctttcaccaaagtcctggacagactaccttcatttgaccgttggaggtacactatctaatgctggaatcagcggtcaagcattcaagcatggaccccaaatcaacaacgtctaccagctagagattgttacaggtatttcattcatgctttatctctgcggtagtctcaaaaaaatatgcacctgtaaagaatatccatctcttcatgagcaaaaacactgacgactttaaataatttttgactataaaacaagagtgcataggcacaaatgtgaaatatgcaacacacaattgtaacttgcaccaagaaaaaagttataaaaacaaacaactgataagcaatatatttccaatatttaatcagggaaaggagaagtcgtaacctgttctgagaagcggaattctgaacttttcttcagtgttcttggcgggcttggacagtttggcataatcacccgggcacggatctctcttgaaccagcaccgcatatggtaaagttctatcttgaacaaagttcaaacaatatacgctatgattctaagaaccactttcctgacacagtcaaataacttttaataggttaaatggatcagggtactctactctgacttttctgcattttcaagggaccaagaatatctgatttcgaaggagaaaacttttgattacgttgaaggatttgtgataatcaatagaacagaccttctcaataattggcgatcgtcattcagtcccaacgattccacacaggcaagcagattcaagtcagatgggaaaactctttattgcctagaagtggtcaaatatttcaacccagaagaagctagctctatggatcaggtaagatgtgaaagcaatatataactagacttagtttccacagagagctccaaatcaaccgttggctactagcctactaacataatgaatggttgccgtgcaggaaactggcaagttactttcagagttaaattatattccatccactttgttttcatctgaagtgccatatatcgagtttctggatcgcgtgcatatcgcagagagaaaactaagagcaaagggtttatgggaggttccacatccctggctgaatctcctgattcctaagagcagcatataccaatttgctacagaagttttcaacaacattctcacaagcaacaacaacggtcctatccttatttatccagtcaatcaatccaagtaagtgagcaaaatgccaaaagcaaatgcgtccagtgattctgaaacataaattactaaccatatccaacattttgtggtttcaggtggaagaaacatacatctttgataactccaaatgaagatatattctatctcgtagcctttctcccctctgcagtgccaaattcctcagggaaaaacgatctagagtaccttttgaaacaaaaccaaagagttatgaacttctgcgcagcagcaaacctcaacgtgaagcagtatttgccccattatgaaactcaaaaagagtggaaatcacactttggcaaaagatgggaaacatttgcacagaggaaacaagcctacgaccctctagcgattctagcacctggccaaagaatattccaaaagacaacaggaaaattatctcccatccaactcgcaaagtcaaaggcaacaggaaagtcctcaaaggtaccattacgcatcaatactgccgaaacctagaactgtataaaag

SEQ ID NO: 7365 - DNA, 1629 bp, Arabidopsis thaliana landsberg
ttatataattttgttaaaattttaaattcacaatagttggtggtagaaagtgtaaatatagattattaatgtcatttttcaaaatcaaaatcttgaaaaaatcatacaatgtccatctccaatcctgtaaaagtctacaagaatattttttaagtaatattttttggaaatgtttaatccaatgatccatctatctacaataataatatagttggtgtcgttctcatgtattaggtctaagttgttaattagttttatgcatcaattttaccgacagcttttatgctatcacgtcaactacttataaatttttgagactaagatttaaatcactgaggcatgagaaagagaaacatcatccaggaaggaagtggaaagcagtacaatcttgcagtaacttcgttttcgttcttacagattcaagcagtagcaggtataagcccagtccagcaccaactaacgcctctgattcttaggacctttttaggctatacatagcattatgtttctatagaggcccattattaacatcggcacaaaggcctataagctataaaatttgactattgagccattttacattgtactaccattactcccaagtcaacatacgcgttacttcccccactagacagaaaaataagcaaagagttcaggtctggttcagcttcagcttctgtaatggcgactatatgttgaattttccagggaagtcacctcctttacatcttacacagcagtttaaaatgtttgtagaaatcagaaaatcggtggaatgaaaaaacaataatcagtgatttttttaggtaacaatcacaatcacaataacataaagattaaaacttttgacataacaaacaaacaaaaagactagcctagccctgcgctttcgtcttggcgaggagcgtcttctttgatgcgcggtggtctaacaatcttatcaataagtccatactcgattgcttcctctgcattgaaccttttcacccggctcaagtctttgaagacctgtatcatcgtcatcaatcaccatcattatatgcactcagaatctataagtttgatcaaaaacagtaaatataaactattggattttggtaattgtgaaacaaaactaaccctttccgcaggctggcctgtattcttggctagttcattgaagaggtagtctcttatccttgaaagctcttttgcttcattttggatatcatcagcctgacacaattttgaccattggaataatgaatttgcataattttaagcttttagtagaacaaactcgaaaggcaagttatttacctggccacgggctgcaccagctggtgattggagggcgattcttgacaatggcatcgcaaatcggtgaccctttacacagcaaaataaacatcatagttcaatttccaagtatacacagtcatttaaactatggacaatgatgcaaagaggattccacaaatgtgaaagaaatcaccttttctccagccgcaagaagaaaacctgcaaggttgtaagcaagcccaacgcaatgtgtcccaaccggacttttcaagctccccattgtatcatagatggctagacttggaaaaagctacaaaaagaataaacctttatatctttagcttcaaa

SEQ ID NO: 7366 - DNA, 1667 bp, Arabidopsis thaliana landsberg
aacttgcgtaacttttatatttaccagccaatcccacaagccagcattcgtaatttgcttagggatgctcacatctcctatggacattgagttgttcatatttccagcaatcccaaaatgcactatccctttcacattgaacacatctatcatctgttgtgttgctgctgctccattcacctgcaatttttttgtcttaatataagtgttcgtttgctacttttcatatggattacatttactaatatgcatctttaatatactatactacttactaactatattaaaacttaatataagttttatcatcaattcatcatttcaattattgtatacggatcaggatattttggtgtgtgcccattccctttttgtatactacttttagataagaaataagagccatataaacttctttattttgttgtagtttcttttgttctgttttggataatttaatgttgtggttactcaccattcctctcccacatctaacatacacaaccttctttccatgaatcttcccaattcgaaaacgtctccctgtattcgtaaggttattaaatcagtaactactaacaatttcatctcaaaagtactaacttccatttaagcaaaacaaaagactctatttacgttagaaaacttgaaaaagttatttgattcaagtggataccagagagatccaagaagggatgagtagggtcaggtctgaaatcgacactgcggagaaaagcattttcttcggtggcaatgaccgtcacaagaccgatgtaaggtcctccgcggttgagttttctgatggtagtggcggattttagtttgtgtgaaggtgtgggtgaaacaggcaaaacatgggaggaagaaatgattatgatgaagagaaatggaagaagagaaagagtgtggtccatctgattggttggttggtttacgattcaaatccacagctgcatatatatcatccaagtccaacttgatagtttcttctttccacgtgcttctcgtctctagactagctgatataacctttgtgtatgcattaaacatgaggggctgctggctgcgcactttttttttttttttgacaaatatcctacaataccactaaaataaattttgtggacgataatacacgctctacaaatttccaaaaaaaaatactatattataaacacaaaaacatttttgcaaatatttaaattgttgctgtcacgggatcgttgatatgaacaaagagacctgtaattctagttttgaaggctgaggttaaagtgttccatgcaagaagctgattttattagagaagaaaaaacagattttagtaattttatttttaacgtagaaaaaagagggaaaatacagattcaaacatccataatgataggttacacgtaggaattaggacagtgggagctttttaatgaactccaaaacagctttggcagtgttagtggcagccaaagatccgaactttcgaacagtgttatctcctcctactcctgctaaatctgataatccccttatcacaattatcggatacccatatgatgcgcacgtctggtcaaacccaaaacacatgcaaacaaaattaagtgaaagttcaatgaaaaaaaaaatggagtcttgagagcactgacgtcaaatcaagggggagggcggggggc

SEQ ID NO: 7367 - DNA, 739 bp, Arabidopsis thaliana landsberg
tgaatgcaggaagacgttttcgtatagggaagattcatggtaagattgttgtgtatgtcagatgtgggataggaatggtgagtaagttgaccccaaaataaaaaagtacaacgtgaaaaagagtttatttggttattgtaatgttatttcacggatcctaataaaaaattgaaatgataattaaaaaacatttatattaaaatcacaaaataaattgatgtactaaaaaaatatttatattaaaagtatcaaaccaaaactttctataaaaaggagatggtaaatttttcttgaattttatttgaaggtgaacgcagcagcagcaacacaacaaatgatagatgtgttcagtgtgaaagggattgtgcattttgggattgctggaaatataaacaactcgatgtccataggagatgtgagcatccctaagcaaatcacgaatgctggcttgtgggattggctggtatatacaaaatttacatgcacaagttttgttattgataaataattgcttctccttcatattgtctgatgattttagttctgatcgtcaaacagaatccaggcaaagcaaaaggaaatgaggatgtagcgtacttagatgtcgggaactataatgttccacaaggaaacaataagttaagaactattggatacagttacgaggaattatattcagtcagtggtcacatcaattaccaaagaaagtgttttggattaatacaaactaagagtgggc

SEQ ID NO: 7368 - DNA, 1566 bp, Arabidopsis thaliana landsberg
gaaagggatatgtactatacatggactcagaatagagatcgtccaagattcgacgaagagtaaaagccaaagaagaagagaagtgtatgattttgccactcgttttgctactttcttttgatattttgttttaggtgttcacatacatttgatagtgtaaagaaaacaaaaccactttctagttcttaaagaaactagaaatccatggacccgtctcgtcatactcatgtgatgctcgtatctttcccaggccaaggtcacgtaaaccctctacttcgtctcggaaagctcatagcctctaaaggcttactcgtcacctttgtcaccacagagcagccatggggcaagaagatgcgtcaagccaacaagattcaagacggtgtgctcaaaccggtcggtctaggtttcatccggtttgagttcttctctgacggcttagccgacgacgatgaaaaaagattcgacttcgatgccttccgaccacaccttgaagctgtcggaaaacaagagatcaagaatctcgttaagagatataacaaggagccggtgacgtgtctcataaacaacgcttttgtcccatgggtatgtgatgtcgccgaggagcttcacatcccttcggctgttctatgggtccagtcttgtgcttgtctcacggcttattactattaccaccaccggttagttaagttcccgaccaaaaccgagccggacatcagcgttgaaatcccttgcttgccattgttaaagcatgacgagatcccaagctttcttcacccttcgtctccgtatacagcttttggagatatcattttagaccagttaaagagattcgaaaaccacaagtctttctatcttttcatcgacacttttcgcgaactagaaaaagacatcatcgaccacatgtcacaactttgtcctcaagccatcatcagtcctgtcggtccgctcttcaagatggctcaaaccttgagttctgacgttaagggagatatatccgagccagcgagtgactgcatggaatggcttgactcaagagaaccatcctcagtcgtttacatctcctttgggactatagccaacttgaagcaagagcagatggaggagatcgctcatggcgttttgagctctggcttgtcggtcttatgggtggttcggcctcccatggaagggacatttgtagaaccacatgttttgcctcgagagctcgaagaaaagggtaaaatcgtggaatggtgtccccaagagagagtcttggctcatcctgcgattgcttgtttcttaagtcactgcggatggaactcgacaatggaggctttaactgccggagtccccgttgtttgttttccgcaatggggagatcaagtgactgatgcggtgtacttggctgatgttttcaagacaggagtgagactaggccgcggagccgctgaggagatgattgtttcgagggaggttgtagcagagaagctgcttgaggccacagttggggaaaaggcggtggagctgagagaaaacgctcgcaggtggaaggcggaggccgaggccgccgtggcggacggaggatca

SEQ ID NO: 7369 - DNA, 779 bp, Arabidopsis thaliana landsberg
acctgcaggggccgctggctttttccaagggaaacactgttctttttttattatgtcaccaagattacataggaaaagcaccattggaactggaaaaacgataatggaatccaaaacagaggattgaaaatacatagtgccaaaaacaaagaaaacagaacaagaaataaacagagcaaataaacatattacaaacatgatttactaaccgacaaaagtttagaggtataacaagaagttgcagaacttagtttcagagtaggaacaagctaactacgaagaatcacggtctttgatacgatgtctgtcaatacaccgaagatgataaatcgtttcacactccatacatgacacagctttcccaagcaccctctcatgacaaataatacaaactttttgatatgacctcgggaacataacttggaccattctatgcttgcctcccaaacaacgtcctctccaagttccaacgactttcggtcctgtcatcccaagaaaacgtttacctttcatggcgcaactgacgtggatgataaaattgcatattcgacaaaatagattgaacccttttatatcctctctgcagcttttacaactcgtcatatccgtagcaagtggttttggcatgagtgtcaaaagatggttccaatgaaaccgatgtcttgatggtttccctagctccacacagaagttatgtgtcacaaagctgcaagtcacgcatttccatggattaccaagtatttctttttcacatatgtgacaatgttctttgccttcga

SEQ ID NO: 7370 - DNA, 2416 bp, Arabidopsis thaliana landsberg
tgtgttggcttgaataattcttggtatttatgtttttagtatgatggttccacatatatattatttgttgaattgtagtaagatttttgtgaaataaatgaaatcaagtgctttttttttgttgtcttttttccgtaaaagaatattataataacattttgaaacgtgtggaacaacacaacgtttttgcacaggtgtatatatctgtagacgaagtgtgtgtgtttgtgaacgcaattaatacgacatttgtttattctttattcacttgaaaccaaaaagctcattttaaatttgctgcttccatatccaatgataacgacttaattagttgttttttcagttaagttgaaatatactaagaacttttgttttgttttgcagaatcaacaagaacgctttgagaactcagaacttcggaatctgaacaaccaccttaggtctgaaaatcagcggttacgagaagctattcatcaagccttatgccctaagtgtggaggccaaactgcaattggcgaaatgaccttcgaagagcaccatcttcgcatcctcaacgctcgtttgactgaagaggtactagatttgaactagagcatttctattatgtaaatgtaaatgttcataacaattgcacattgactatttcaatgaatatgaaagtaacacttcaaaaatgattaaacaagttgtatttcttgttttgtgggttatagatcaagcaactttccgtgacagcggaaaagatatcaaggcttacggggataccagtaaggagccatccccgtgtgtctcctcctaatcctcctccaaatttcgagttcgggatgggatctaagggaaatgtcggaaaccactcgagggaaaccactggacctgcagatgctaataccaagccgatcatcatggagttggcatttggagccatggaggagttcttggtgatggctcaagtggctgaaccactgtggatgggaggatttaatggcactagcttagctttgaacttggatgaatacgaaaagacgtttcgcacgggtctcggtcctagacttggcgggtttcgaaccgaggcatccagggaaactgcactcgtggcaatgtgtcctactggcattgttgaaatgctcatgcaagaggtaaattaatcaatcaaattatatgatcataattaatccttttctatagtatactataacatatattaggtcaggtgtgtaattaatgacctgtatttgcagaatctgtggtcaacaatgtttgccggaattgttggtagagccaggactcatgaacagataatggctgatgctgctggaaacttcaatggaaatctccaaatagtaagtcttctacactaatatagagttatacaaagaaaaaaaccaatacatgtttgatatatataagtttaaccaattaatattgttcttattcatagatgagtgctgagtaccaagtgctttccccgctagtcacaacccgcgaaagctacttcgtccgctactgtaagcaacaaggagagggtttgtgggcggtggtcgatatttccatcgaccatctcctcccaaacatcaacctaaaatgtcgccgccgaccctctggatgtctgattcaagaaatgcatagtggttactccaaggtatgtaacttattgttacattatggttatttttgtgtatcatcatatagtttatattttaaatgatgtttttttttttttttttggtttgaaaaaggttacatgggtggaacatgtggaagtagatgatgcaggaagttacagcatctttgagaaattaatctgtactggtcaagcttttgctgctaaccgctgggttggtacattggtacgccagtgtgagcggatatctagcatcttgtcgacagattttcaatctgtcgattccggtgatcacataagtaaactcattaccaaattttgcttcatatggaaaatgttttctctgttttcttttcttaaacgttttgtgatgttttgcagcgctaactaaccatggaaagatgagcatgctgaagatagctgagcggattgcgagaaccttctttgctggaatgaccaatgcgacgggttctacaatattttctggtgttgaaggagaagatatcagagtgatgacaatgaagagcgtgaatgatccaggaaagcctcccggtgtcattatttgtgcagccacttccttttggcttcctgctcctcctaacactgtttttgacttcctcagagaggctactcaccgacacaatgtatacgtacttacttactacttaggacaggacttcctcttttttttttatgttctttatataacatgttttgagatatgtatctgcagtgggatgttcttctgcacggagagatatgcacaagatagcagaaattacgaatgggatagac

SEQ ID NO: 7371 - DNA, 2532 bp, Arabidopsis thaliana landsberg
attggccaaatctcttttgcaaaatgatattattcatttattttttgtaaatgatgtttttttttgtttttattcttgtaaaaaaattatttcaatatataaaagtccagttttctttttacttttttgtttctgggcctaacatatgtttgagcctgcctaaattgcatcgaggaaacgttaccaagaacgatctttatcttcttttttcctggtcgtttatggtctaactcccatactagtttatctgaacctccatagattcgtgctttgagaccttcgatgagggaagaatcttgactccactcgccgacctggatcttattaatttggcagtgtctcggtgatcggtttcgtgcatgcgacgtagatggaatctttgtcggtggctgagatccctcttgcggtcgttgtgacagcggaaactatcaagagcaagacccacgagttatatagataatgatcgaagtagaaatataacagagagattcaagtcgaacgaacaataacaagaatcccgaaacaaaaagataatgatccgaatgaagtagaaaagaaaagagagatacaagggaaaacaataaccagaccctcgaagcaataaactaaaccgctcatactttgtaccaacgaaatatatatagaggataaaagtatttagcgctcagttgtaattctcttttttacccttttatctatgactcaattgtaacttaaaccacaatttaagtttggaaaaatgttttctcttgtgctcaattttccaaagatttgtatactggcaaaaaaacgatgcattgaggaaaagaaatgaataacagaatgttgtcaaatgctttattcttttatttcctacttcattgtgtgattatttcccaaatgctttattcttttatttttctactacattgtgtgattattttcccaagagagacgactcaatgtagcgtatattcagttattgtttcggttatcataaaggccatgaagaagagggaaacattttgatatatgatttctttcttgatgagaaaaaagagagtttataggatatggactgagaggaataacagacttctcaacaaatatatcctccaatccgcaagatatctccaaaggaaacgcaagaacagtggtggtctgatgcattgtctcacttacgtacgactaagtattcttttctagcaaagtgaaattcatgatgcgtacatatcccaaaaacaaaaaggagggtcataaagaaatacatgtcttagactagtactatattaagcaaaaatgcaatctttcacaaagagaaaacgaaacaagcaaagaatgggctatattgaaggtgaacgagcgaccgatcccatccacgttgggagtgtgaattagatttatttcctgcgttaattgccatctccctgaatcacttgtgtactcttcaagcctccaaagcctcaatagaagatatattttgttaatgtatacaaggaatccccctgaagtagtgtaggctcttctaaagcaagccttttgatcaggaaaagtgataatgcaaaaactgctgctcatcatcatcagcatagaagtcatatgctacaatggctcccacgctactccgataacgataatgggtgtcaagccagtgaagcatcttcttcaaactcaagcatcttttataggataaagacacgatgagtcgctgagtcgatgagacgaggacaacggacttttttgcgagtccacgttcccgtcagttgacgaatatatctccaagataagggaatcgacttcccaacggtaatcaatatccatacaaaccaccttatactccataacgacaccgtcttctactcgggtgactagacctattgcccaaactgatgaactgatccctttccaagggtgaggtgggagctgaacccactgccgggctacccacactgaacgtctctcctttcgttacggtttgaagcaaaaccaatccgtccgcgcaggctacgatcttatgtttatccaccaagccatgaggcgggatgtatgaacctagcctacggggaagaccatatctcttgcatccgtagaaccccgccatttcctcgactgaccaaccaaatgtcccgcacacgagtgaccacgacgaggaagagtttcggtgagcaaacacaaatagatgacggaaatacgttgattctattaatgatctccatcctttgcacactgacttgaacctcgttatacttacaaaaggtaatctcgccactatctctgccaataattcctctggaagctctattctacgcttgcaaccactcttcatccagtttacttctcgattttccatcaggatatatcttctacactctatttagtgtttcatgatcatgacaaaactcaagttgttaattttatttatttcaatcttattttgttagggtttcatcaggattttatactctctaggatgataattttttagggttaaataacgacaaaaatcaattattatctttagttttaaaaaaacaaaaatctttgttgggatat

SEQ ID NO: 7372 - DNA, 1473 bp, Arabidopsis thaliana landsberg
gcggttaaactaatcactaaagttgtaagcccttgtgtatgaggatttctttgcaaataaatcactataaataaaaaaaaattatgtgatcaaaccgagctagattggaccaagtaagccgaaaacggtaagtcaaatttgtgcttttgctaaaccaataaatcaaattgactgaatattattttgggattaaaacgaaactaaaccggtatcaaaactaaatacggtatattatcccttttctttaaacgtatcacacacaatctgatggacaaaaagaaaaaacttatcactattgccgatattttaaattaaaattgaacccaactcaaatttgtgcttggctaaatcggaactcaaattgaaatcgatatgcatatattcaaattaattaaggattaaaccgaaagtaaatcgatatcaactcaaaattggttattgattagtctgtttgtttgtttgtcgcttgcggttgcggcaaacactacagcaggttgttcgttttgtcgtcgtcgacgctgccgcaacttctatcgcagtcgcattgtctaagttttctgttttgattatcgaaattgtagtaacaaagaccactttttttggactgttcaccattgtctaagttttcttatttatgtgaattaattgatctttttctgttctattaattttttatataatctttacaagtactttaattgttgataaatactttcttttctttttttttatcaaatgataaatactttataaaattttagtggtgcataggtttaggggggagcagtgcaagaaccagaggcccataaccaaaagggggcacacacatttattttttctttgaaaacatactcaataaaaacaaatttgtgtaagtataagagaaaagaagaaaaataatattaaaaagaggttcatatatatttgcatttctttaaagcctaacgtaattcttctctttataaatttgttgtgtccaaattagatgttgatttactttagaccaacaattgcaaaatatttattgatttatggggtcaaatctcttttgcaaaatgatattgttgctttattttttgtaaatgatgttttctttatgtttattcttgtaaaaaaattatttcaatatataagggtccagttttttttggccccagagcctagcatatgcttgagccgacattggctgtacttagactattcataagcaaaatcgctctgatggctattttgattaaggttgggaatcacttatggggatgaaacactatggcatcagacctgatacgtacttatgtttccgataattctgttatcgactatagtgaagcggtttgtgtctattaggaaaaaaaaagtagatgaaaatcaatagttgtagtttttagcaaaacatgtaaactgggaaggtttttaactccccatttttttttttcccaatttggggggggattttttttattaagaaacaaa

SEQ ID NO: 7373 - DNA, 2241 bp, Arabidopsis thaliana landsberg
  unsure (1)..(2241): unsure at all n locations
tgttgtgatgcaggctatagcgacggttaagcgaacacctgcttacaaaaataagctcaaggcattagaactcgaacgcacaggtggagtaagtaacaagaagaagggttcaaagcagattgaccagtatgtacccccagttatttaaattgcctttttattagctgagaatgtgtcgtatcgctgaataaatcataatcatttattgtttgggcaggaaactacaggaagagctaagcaacgaacttgacttacaaatcaaaggagctgaaaaaccatcggtctgggaacttctcggtgttcgattcattctcctaccatacactatcattaaggtttcattttcttaaaatactttcactgtgccacatttcacagattcctccatatcctactttcccgagatagctgattcaacattctgttatcttccagcttctagtatggtacagcagttgggtgtggagatataaggtcaagaaagctccttattcatgggaagacgcatcatacctaacccgaagatcacttagtgtgcctgccgacgcatgggctaatctaggtatccttctattctctaatttccaacctgaaccgacatattgataaagattgatgtctaatacaatgtgattaaatctattgtgcaaattcgatatttttcagatgaatataggaaggaagatctggtgcgncnaanctcgttatccggagaaagggtataaggtttcatcgtcttatttcatctgtaaatgggctgcttccactcaaaggcagcaaaagaatttcgaggacacgaagaccctgttaagcttgcctctgagacagcttgtaagtttactcgcgctataagtttaaacctcctctagattcatttctctcaaagctgcatgttcatttgttttctgatatgagatgagaatcatcagttagattcaaatcattctttctctgttcactgatttagtttatctccggtttggatttttttagttttgtgttttggagtctttgtctgcctaacaatttctagtaatgatccttcaaagttggttaacactctatctcatgtttcttgttaccaataccatcaccttaatcttgttccttaacttgtcaagacgagttctctctccatgcaaattctaaatgtgaattattagtctctttgtttgtttgtttgtttgtttgttcctggtaattctttgttttgatctcgtagtgttgcttgtttttttctcttttccagttagtgtgagtgaggttgaagcattatttgagctattcaagagcataagcagttcggttgttgatgatggtctgattaacaaggtacaaagtttgtttcttttgacccaatttggatcttttcatgaccccatcgttgtatctttttgttctttacgctattcatctacagtatttttcaacttagttgactttatttgagcaataattattcttccatgacgatatgtctgttccatattgcatcgattcaatgtatcgtagcccttaatgtttgacttgaacttaacttattttattgattgctttgattttgaattttgaagccttcatggcccaccttgtttatgttgttttttaatcctggcttcacatgtatgcaggaggagtttcaacttgctttgttcaaaagccggaagagggagaatatatttgctaatagggtaaaatcttaattcttcaggcttttacaagattcgtcttctggaagagtgatctaaaccaagataatatgtccattatactaaacaatattgcttttccgcagatatttgatatgtttgatgttaaacgaaaaggagtcatcgatttcggggactttgtaagatcactcaatgttttccaccccaatgcttctctagaagacaaaatagattgtaagttgacataagatagtttcatatataggtgtttattgaagcttttgtgaagagatttattgattctggtctgccattatttctgaggtacgtttaggctttacgacatggactgcacggggtacattgaacgacaagaggtaatactaactagcaagctttgaatactagtcatgatagatctttgccatgtgcttgagtatacatcttttacttaataactttgcgagaaatcgataatgaatgtgatatatttgccggtcatgcaaatggtgatcgcgcttctctgcgaatctgaaatggaacctgcttgtgaaaccatagagataatact

SEQ ID NO: 7374 - DNA, 1341 bp, Arabidopsis thaliana landsberg
attggataacgattataactaaggaaaactaaagaggtttgattgatcgtctatatacgaactaaaattccagtaacgattccgatcacctgagagaaaattccgatggaagagaagaagaagaaaggcgaaaattgaaatctgactagggctttcgaataccatagagatcatcacgtgagtcacgtgaccgaccgggtacgtattaaaatacattgtgtcttgaccgtataaaatacatttgacccgttttgcaacaaatcgtaatcttcaatcaaaagctcttaaacccaaaagaacaactccaaatcttcactactcgatattctcaaagaacttgaaaacaacacagatccattcccaatttcagattcactcaaaaggatttttcttttttcattttcgctttttgtgatctggaaagttgttacctttaacaatgtctccgaaacatctagagtcatcacgaagctctattgaatcatgcacttcacagcttctctcatggcgaccatttcaccgctccaaaaccctagactcatctgaccaaccaccgcagaccaatgggtttcactcctttactcccaaacgcccttgcttctccgatcgatccacttctttcaccatcgaagctatgagccgtctctcactcgcagacgacgacaatggagggaagacattatcagcttccaattacagcaatagaggaagtttcaggttagtagcgaggaagcggcggcggcgtaattcgagatcggtgtctggtcggagtagtgatcggagtgggactcggagatgttgctccattggtgctcatgggacttgttcggatttgcctttcgctgttggtacagattcaagtggagagttttttggtgaagcgaattgggcttctgatgtgagtgaggcggcgaggaattcacggagagagcggcgagattctggtggagagaaggaagcttctggtggatttggatttgctaatggagttgatccaatggggaatgaatctgggtatgggagtgagcctggttacagaggtgatgctgagtttggctatggtgatgaatttgatgatgaagaagaagatgtcaagccattgttttggggaggtattaaattcagagactttttatagcaattgtgttccatcttgagattcgtggtttttgctatgaagatttggagattgatcatcattgattagattaaagatgacaactttagtgttatttcttctgatgaaaatgagtctgattttgctctgcttgtctattatggcattgcctcataggaattgtcagaaagttgtcaaatttgggtctagggaatgaaataatg

SEQ ID NO: 7375 - DNA, 1258 bp, Arabidopsis thaliana landsberg
  unsure (1)..(1258): unsure at all n locations
ccgccttataattccattgactatatattgctcgtcaaagtctcaatccaatagcaaaaaagtaaacctctcataaaaatcgccaccgagatattgattgttagaaaagctattataattgcacaatgataattcagttttgcaatcattaaagttgttgccagaattcatcttattacctaccccactaggccactacttcttcttcttcgtcccgaaaggagacactaatccaaacattgcaatctgtttacactaacttcgcaatcttaggatcatttctaatgaactgttcaacaaaaccctcaaacaattcagcaggaacaaacacataatatagaattgatcccaagtagtatctaactaactaaaaaaaatgctgaatttgatcacaaagattgaatttttaaatccctaaatgtttaaagtaaagaagatgaacaaactcacgggaagcttttcgagaacacgcattggctgagaagaagcttggttctctgcaacttcacgttgagccattgaccaatcatcacgaagcgttctaacaacaacaaactccttcaaacgagcgtgatccaccacgcggacaccacccataaggtagactctaaggaacacagacgcaaccacaagcaacattagaagacccaagatccgacgacccacgtttctccccgatctaaacccttgaccaatcacaaccgtcgatgcaccaccataaaacggaatccagaattttcggaggagaaggtaacgaatcaccggatgactgtaaaatcggtggtagtgatcgtgatggtaatgagatccagtagatgaggcagagctttccgaagatggtgacgagtcttgaccagtcgcatctcctccgtctaaatctgttgatccaacgatgggttggttaattgtattgcagtaatcagatgaattcgagggtcgttcggagataacgtctagagaatcgccaacacggcggcgagtggtgggtgcaataggtacggggttaatcgctccgacgactgacatatcgtcgccggtgaaatagggaattgaagattagacaaaaggaaagagatagagaaagaagagagagggttgatttttaggttttggaggaagtagttgaccatgtatgtatcttctggtatagtcaccgtcaccgtgaaattcgccgaagctgagtttttgttttcagatttttttatatttcgcagtgtgtctaatatatatntatgtgactgttctaatcatttttttt

SEQ ID NO: 7376 - DNA, 1102 bp, Arabidopsis thaliana landsberg
actaataaataaatcaaagaatgtaataaaatcatttcaaatttagcatataattagcaaaatcccggggggggggtaaacacaaacagacataaatctgtactatataaaaatttacacaaacacagacataaaacgaaacagagagagattagaaaaaaagcttcgacgcctctcagccttaagccgaatctcacggtggctactaatacagaaccccccccccccccccaaaaaaaaccataacatgcctaaccactactaaccctctaattccaaaaacaccaacaaacaaacaaaaaaaaaaaaaccttttttttctctctctctctcaaaaaaaaaaaatcaatcctttttttcaatttggcgcttttctagagattgattttgtttctcaggcggcgagatgtcggcggccggtgcaagccctttggccgttgcaccaatcacagcccctaccaccaccacgcgtcgccgtgtcggagattctttagaaaccacctccgaacgaccttccatttcctccgattactgcaataccaacacagtcaacatcgccgtatcacctgatatagacgacggagaaacaggtttgcaaggcggcgcgtgttcttcaccttcctcaattggttcctcctctagcggatctcattaccaccacgatcatcactaccatcatcatccaacgattcggtactttctgctccgtaaactacggttaccgtttctcttcgacggtgttggatcaacggctgtcgtaggtcaaggatggtggctctgttcagggagaaacgtgggtcgtcggatcttgggtcttctcatgatcttcgtcgtcgtttctctcttccttagagtctctctcatgagtgggcgcgtcgttgaccacgcgcaccggagagatttgaacgagcttgttgttatgcgggcgttacacgaagattggtcaatggctcaacgtgcaatgacggagaatgtcgtcattgagaagcttcccgtgagttttttcttcattacattttgcaaaattcattttcatgagaaaaaaaaaacaatttttttagctatatagattattctggtcggtgcacaattgaggaacagc

SEQ ID NO: 7377 - DNA, 2287 bp, Arabidopsis thaliana landsberg
cttcttgaaattcatcaccattccaaacttactaaaacccctcctcccaatcccaaatgaatatgtacttcttaaagccacgtgtctttctctttttcattaatatttatttatttttttaaaatgtgaaattatttctttggtttaatatctctggatcattcttctacaatgatcacaagtatttagatcatgtgtaaatagtcccatcatgaagttttaattaccaatcggtattgcacatcaccgattggtactgatccacctgcacttttgtcgatcttttggaacaacgaaaaagaaactaatttaatatattttgttatccgctcgaagatattaattataagctttaatttggaacttctttatatcaattatatatatatatatatatatatatatatacttctttgttaatagaaaatgggaacgatccaaaacttaagacatttgatctccacaaggccgtcgacgtacagagaagaagaatggccaaaaataagtaaataaaagagaagaaaccgaggggaagatgattttgcattgccacgacccacgagcatccatcggccatcgcctttttggattcacatggcaaagacaaacttcgatcttccttttttctcgtgaagttattatctctctaatttctagtctggtcgaacctatatttcatcatatatatcattatttaattcatatgctgatgcatgggacattatcatgttaagtcattacaaaaaaataaaaataaaaataacttacgttggactctcagtttaccttctcctatggatttcacttccttgtataagaatatacatcttactcaaatcatgatttatatgcaattctcttttgtgagattttttttacatataaaccagaaatgttgaaagaagaatatccaaacacaacaaaataatagaagaaatctcacgtagaacatggaaatggaaaaagaagtgaactcgtgaaccgatatatttaccaaaagtgcacacatagacaagtctttctcattaaagcccaatttcacactttcacattttcgtgacgtcttttgaagttttgaatacgaattaatgttcatgtacgctataaagacctaaaaggttgtcatatttctccactttcatcttctcttcacaactatcctaaaccttttttccttttcttcttcttcactctctttcttcccggcgtcactatggcggctgccgccggtaaaggcagcgaactcgaccacatcaagaatgaatccgttgatctggtatatatatttacgtcttcttagttttctattatctatatgttttaaaaaatctttggccctactaattttaaattttctgttacataaaagatacatatatgtatagtacgtaactagtaactacctttgatctaatcagttaatatatttgtcccatgcgatttactcatgtttccattagaaatgattagtcaaaattatataaatgatgggtctaggtacgaatacccatggaggaagtgttcgaggagctgaaatgtacaaaacaaggtcttacggcaaatgaagcttctcaccgtcttgacgtttttggtcctaacaagcttgaagagaagaaggtttcttctttatttttgtcttttttttctttgtaaacaatcattgatgaaactcctttaatgttgtgattggggtaacacgcaggaaagcaagttacttaagtttttagggttcatgtggaacccattgtcgtgggtgatggaggtggctgcactaatggcaatcgctttggccaacggaggaggacggccaccggattggcaagactttgtggggatagtgtgtttactattaatcaactcaaccattagtttcattgaggaaaataacgccggtaatgctgcagccgctctcatggccggtctagcccctaagacaaaggttaaccaatagtacttttgataaattgcctatatacaaattaactattatataaaacaatggtgatataacagtttatttgttggaattttatacataaaaagggtttgaatgaagatttaacacttaaaaaaaaaaattaaacacaacttttgtaaatttcaaaattgactaaaatcctcaaatcagtgttagtcagtgttaattaaacgtttactagtatgacaaagtaactagcataaactaattacacgctaattttgtgtatatgttaatgtttttgttaatgacttaatgagtgaaggttctcagagataatcaatggagcgagcaagaagcatcgattct

SEQ ID NO: 7378 - DNA, 1798 bp, Arabidopsis thaliana landsberg
  unsure (1)..(1798): unsure at all n locations
gctatcattgctgtattgtttggttgcctattctttatttcatcggataacatgcaaaccctcatagaaaagttttcagtcaagtggtggtccatgtatgcatgcttgctcggattcttctacttcttttcttccccatttatccagaagactatcagaccaaattattcaaacttcagtcggtggtaagcaaccgttacttccatcttctgaaaatatctaatatcgattttcactctataaaatttcctacttctttgtttcggtgtaggtacattgcttggattttagttgcagctttgtaccatctcccaagttttcagtcaatgggtttggatttgaggatgaatttgtccttgtttctaacaatttacatatcatccatagttttcctacttgtcttccacattatttttcttgggctttggtatattggtcttgtttctcgtgtggctggaagacgcccagagatcttaaccattcttcaaagttgtgctgtaagtatgctatccccaatcttgtagatcaaggttacttgctcaaaaacattattcttaaagaaaaatcaaatttcagtgtcctttatcttgtgtaggttcttagcatatcgtgctgtattttctacagccattgtggtaatcgtgcttttcagagacaaacacccctcgagaaaaggcattctagccgtttttcattatggaaaggagaagatggcaacagtacttggcttgcgaaatttactcacattgatgagctaagagaccaagtctgctcatcatggtttgctcctgttggatctgcacgtgattatccattattgtccaaatgggtcatctatggggaggtcagggtctggcttctgttataacattctaatttgttgtgtacgttcttatttgaccactctctgttgtattcctaccttttaatctacagttggcatgcaatgggtcttgtcctgattcatctgatgaaatttctcctatatactcgttgtgggcaacgtttattggcctttacattgctaattatgtagtggagagatcaacagggtaagtgnnnnnnnnnnnnnnnnnnnnnnnnnttttgttaaatgaatgttgtaaataaaatgattactgtttttacaatgataatgtacgttttcgttgtacggttaggtgggcactggcacaccctctgtctgtcgaaaattatgagaagttgaagagacaacaaatgaaacctaatttcttagatatggttccttggtattcagggtacgtctatgccaactgatcttttttctttttacatattttagcatctaccaatgtcttctttaaagtaggatacttgggctgatctgtctgattttctatttcagaacttccgctgatttgtttaaaactgtgtttgacctcctcgtatcagtgactgtctttcttggccgctttgacatgcgaatgatgcaggtatactatttcttatactgatgtgataggatctgatccttttatctttactgatttgcttattatattgcttttttgtaactttccccatttttaaatgtgtaggctgcaatgaacaaagattgtgatggaaacaagagcaaggaacttttatatgatcattttgctgataagactgacttctggtttgacttcatggcggatacgggtgatggtgggaattcatcatattctgtcgcgaaacttctagctcagcctttatatacaatgttccgctagataatgattctatatctctagaaaggggtaacatactgcttattgggggagatcttgcgtaagat

SEQ ID NO: 7379 - DNA, 1076 bp, Arabidopsis thaliana landsberg
cagatttgatcattgcagcctaaagatttggcacaagggaaagcagcaaaaattaaatgctcttatcttcagaatgctgaatggacctgatcatatcataaattaaaaaggtatacctgcagcatccgcatgtcaaagcggccaacaaatactgtcactgacacgaggaggtcaaacacggttttaaacaaatcagccgatgttctgaaatacataattagataggtcagcacctcgtgaattttcctgccttcatcgttcactcaccacattgagacaatggtaagcaaaaaggggaaattttagtgtagcactgacataccctgaataccaaggaaccatatctaagaaatcaggtttcaattgctgattcttcaacttctcatatttgtcgactgacagagggtgtgttagagcccacctaaacagcatattaaaactttaagattaaacatgccatttgaatgtaagaccagagttgttcatatgaatgtactgttgatcctcaattgcaatattaatttgaaaggtattatgccatagatagattaccctgttgatctctccactacataattggcaatgtaaagaccgataaatgtggcccacaacgagtatataggagaaatttcgtcagctgaatcaggacatgaaccgttgcatgcaatctgcaaataacagcgtaagaatatgaaaaaatttaaagggtgaacaaataaaacatattcacaactcattagaacagtttacagaagagatacctccccgtagatgaaccatttggataacagtggataatcacttgcagatccaactggagcaaaccacgatgaacacacttggtctttcagctcattcatacgaatgaattttgcaagccaggtattgtgcctatgttctcttttccagaatgaaaaccagcttgtatactgtcttccaagaggtttttgcctcagaacagctcgattaccacaatggctgttaaatatacagcaagccatgctaagaacctgcatcgatgaaagacatgaagacaataatctttatacgaaactacgaaagacaatattttaagc

SEQ ID NO: 7380 - DNA, 834 bp, Arabidopsis thaliana landsberg
agccagttctacacgacctttgcattgcacatccactaaacgattacacaggacacgccctgttaccagcgaatacacattagatgtcaaagttaatcaacttatagtataaacccagaaagacaaagacttttaataaactcaagctgcaaataaggaatttgagttccaagatctgattttttggtgcgtggattacacaatagaccggaaaagtgatcggagaaagaaagaatcacctgagagagaatcgaagaaagaagatatgtgtgatcagcaaacaacccagaagaggaggaggattgggtacgctaacgtagacgtctccgatgagtctctaatggattgaatctaggccaatgattttccggcgatatctttcgtctccgcatcactaacgacgaagcgtacacggttcaccagtttcgatgtttctgggaatctatatgaagaagaagaatcacacgaggtttttaactgcggcggtgaaagaagagtcaaagagatttcaaattgacaaaaattttgattagagagagaggcgaagaagaagaagaagatggattggtccagagtttacaaattttggctattttattgattgattttattttagtttaggtttatttcctttttacggaaagttacaatttccgaaattttgtgctctgtgtttatcgttttccatacatgtatgttgaactcgtaactttaatggatttcataaaattaattagaagcgttgatgagttagttataacaacacaatttagaattggacgatgatgttaagcctagagttctcttttgagttttgggttactattttgaagc

SEQ ID NO: 7381 - DNA, 1457 bp, Arabidopsis thaliana landsberg
  unsure (1)..(1457): unsure at all n locations
acctttgcagcattaatccgattccccattagtttaacagccttggcatataagatattgtcctgtacgatcttatcaagctcaggaaaatgccaaccaaaccattcacgaaccctcatagcgtaagtgttaagctctttgtcaagatcatcaagcagaccaatagcttggattatcatggtatccacctaaaatacaagtacaaggtgaagtaacataagcgtcaaacaaacacaggatatatagacaaactcaattgcaaattcagacctaatgttggaagagtaaaaaagggatacaaaaagttccataatttatcaaaagttggctaactcaacaaaatcataattcagagaactaaatagaaaccaatacaaatcaaatgactaccttgtcggagctgaactttagtttatatctggcaaggctgtgagacaaccccaagctcattggacctagatcttgatcacccaatccagatataagttcagtaagctggcttctgatacctcttaacagctccataacagcattgttgtgaacacagtctattttctacaagagtgaagcaaatccgtaagaaacaacccttcttcagaaataaaagagcgtatcggaacataatacacaccagtttctccttgatgatatttccaagcttagaatcagcaacagctaatgtttcaccaacacagttagctttcaaaaacttgcgtagacccttgcttggagttccctcaagcaatttagccactgcttcaagagcttcagctgtgttgtcaaacttgtcaaaagctactagcttcaccatctgtaacaacacaccaaaaattgctatgagaaacaaatattattagccagatacaaaatttgaactatgtctagaacaaaagaaatcacctttcgggctaactttgcggtcgagaactcattacccaaatcctacaatcacaaatttgacatacttagaataaaaaaaaaacacagacaaagttaagataaatgaacaaaggagaatgatttagttagtaacctcaacattagagagctttccttcgtttaatactttgaagatggcaaaaccacctggcgtctcaaacannnnnnnnnnnnnnnnnnnnnnnnnnaaaaaaataacacaagattaagagaaacccttgaatcaactcaaagtcaccaaacttacaagtaagtgttttaggagcgaaagtcattaagctagtaagaacaatattcaaggtaaaaactttttccctgtttcgaagtttacaaatcagaatactagtttaggcagatactctgttcaaattcttgaaaatccgacaaagaacagagctatactttgtcaaagtctaaaacttttggaagcttcgtcgccactaacaatgaagaaagagagggcgagagagatttagtaccttagagggggtttacgcacaacagcagcgttagaaaga

SEQ ID NO: 7382 - DNA, 691 bp, Arabidopsis thaliana landsberg
gccagatataagctaaagtttagttctgacaaggtatcttcggttcctgactaattgtattggtctttttattttgtgatatgatatgtgaagtatatgaatttgttaattgatcgaagctaacttgtgttaaattatggaacttctgtattgaactagcctttgattgtccgacattaaacgtttcctgtgtttgtttttgcttctcttgcatctcctaactgtttagtttttgtcaggtggataccatgattatccaagctattggtctgcttgatgatcttgacaaagagctgaacacatacgccatgagggttagagaatggtatggatggcattttcccgagcttgctaagatcatatcagacaatatcctatatgccaaatctgttaaattgatgggaaaccgagttaatgctgctaagctagacttctccgaggtaactttcaattttgtaaactgtgtagaggcttccatgaacaaacgccttgattaacgacctaatattctcctgtttctggtttcattgtagatcttagcagatgaaattgaggcagatcttaaggacgcagctgtgatatccatgggaacagaagtcagtgacctagacttgttgcacatccgtgaactctgtgaccaggttctctctctttctgaatacagagctcagctttacgattacctgaagag

SEQ ID NO: 7383 - DNA, 2258 bp, Arabidopsis thaliana landsberg
  unsure (1)..(2258): unsure at all n locations
aacttaattaattctttcttaatgtaaaggtcgacacatttgttccttcaagttgaatctatatatgtatgttgaacggtaaagatttgcgtatttttataaattcaccttcattattcaaaaggccaaaaaaataagggacaataatgtagaatcaaaattttataagaaaaagagtgaatcatcgtacagacaagacgactcatggccatgtggtttctgccattttgatcacaaaaattactttcgggattcttataattataagttctgttgaataaataaatctagagatagtacagttattttttaattgacaattatatttgaattcattcaaaaattcgactctgtattgattttttttttataatcgttagtaatttgatttatttatatgaattcctaaatgtgtacaataatttgaatttcattttcatactctgaaatattagttataaaaaaattagaaaagttttaataatgaagagatatggaatggcagaatttttgttcacatttgcttcttaaactgatgaccctcaatgcacaaaaccaaaagtataatacattttcacttttagtcttttagatcaatgaaatcaacaatcttcctaccataacatgaaatttagaattatgtctagctgttatggtttagagcacaaatttagtagtacaatacatcatcaacgacacacgcatatatactctcacttcttagaattcacatctccacagtggttaacactctcgaagtcacaccggaatcataaacgccatctaaaaacgtaaatcttttgaacctaaagcaatatagcttccatgagcaggcataggaggaagagaagcgataaggataaagccattgcgtcggagaaagaatataccaacggtagtgacgtgttttagggttatgaggagtgcatagagacaatgttctgtgcaacgtaacaatgatcggaaacgccttgaaaggagtgagattgttgggaattgaatcttggtatacgcgctatgagtccaagatgaaatcatcgggaagtgacgtaatcggagaccagtgccagaagccgcgagaatccccaaattttaggctcaaatcaactattcagagtgagtgagtccacgtttagatcctatcagatgactttttctataaactgattgacttgttatggttatgtgaataatgaatgattgtcaaggacatgttttaagaaaaaatgtatgaaaatagtctaaatgtagaactgaaatttcggacatcttgaaatggaagtcaaaagattaaaaagcaattgtaatttcttctacgactgaaataaaaaacttgaatctaatcccagagaagatggtgttttacattcagtagcttcaaaaggaggaagaaggttttcttttctcttatgctgcaacaagatctggtgtctcggcttcaacagatagtaaagtggtgtgaactttgtcaacccaactgtctaattgatccctcaaagccttgatctgtggaatccctagtactctcggttgcgcccatgagacataaattgttccgttcacttggtctatgatgccctcgatcaaatgcacctgtatcattcattttccactttagattctacagaagcatacacaatcattctatgtctaagtcaggaacaaaaccagtcaagatcatttgagttctataacaaaattacgcaataagacgacaactgcaaatacataaacctagagatacaatgcgtatggtgatgtttactatgttgttcttaatcagatgacaggtagttcagtatcattatgttggtcactcagacaaactcttttcttggtcaccacaacagattttaacccggaagctgcagagttttttgggtactaaaagaacacaagagagaaaaatgcaaggagatactaatacttacagaaaggctcttcatgagaaggtgctcaacatcttcaatggaaagtttagtacgctcagcgattgatgctcaaaggaatggttctatcttcagcgggtcggctgatgtagagtttaaaatcaaatgtattagcacatgattttatttctttgattgaaacggcgtgaggtacaattgcctagagaaaagtttacctgaagatgatctcgataaggcacaggggttgctcttttccaaaagcttcttctcgttctcaacaagtgctggttgagcaatcaaggatgcgttgtgcacacggcatagttcttgatactgaactntatctcc

SEQ ID NO: 7384 - DNA, 569 bp, Arabidopsis thaliana landsberg
gaatgacattgacccatcagtctatgccaacttctattgggtgtcttctcagtactttaagttccgtcaagaattttctgatttcgggaaagggctctgctttatcttgcatacacgtctgtggaggacctttcagaatcgtttaagctggtatgcccctgtaatattatgtaccttgttcttatattttgttcttaagttaagtttcctgttagcgatagtggataagagtattcagaaatttgatgaaatttagaggaaactgaagaaaaaagttgcgtactagttagcttccctagagtcaccgatcaaattttgctaatgtcagatcatatctgtgtctttcaggatttggctttcgatttgtcactatcagctctacttggggagaacatctataactttggggaactgttagcccatcccattgtaagttttccttcatcctcgacataaactactgttatattttcttgagtagataaaaggcttcttgttgatctttaattgcttggatttacgatagatactgtttgtgagttgagacagcttctaactcttatgttata

SEQ ID NO: 7385 - DNA, 2615 bp, Arabidopsis thaliana landsberg
cctttttatattagttctttcccagttaaagagaatctcaattcgcattgtgatgtaatcgaccatgtatagttactcaacatattgatgtcctaatatcaataccaattaatgaaaaatttagtcttttcggttatttgtttttaaatgcattttcttattcttgataatctatacacaaatatcatatatattaaattaatcagctgtaacaactcaaatttcagaaagaggataatgtgtgtgaaagaacagaaaatacaagagattcctttttattcatatatatcttatatatactaacatgaataataatgataaaaatgtcacacatgacaaacctaacaacaaacctgccccaactattctattccaaagctaaagtcaacaatttcactctctttctttttattcttctttacgttaaattgaaacttaaataatgtaataattatgtgtttactagaaagtagaaataaatttcataataatatctttatatgttaggcacaaatccccaaaaataggtcagacatttcaactgcagacagatacagttatgtatacgtgtaattgtaagctaatgtttttttttcacttacaggttacaaattacatagaggtccacggtctaactttgggtaatttaaatgtggggcttatggataagacaacgcaaacgattaggcaccaattacggcgtttagtttctgcctaaattacaactataaatgtgtattaatatatatcttagtatgcattaatgtggttaggtacgagaaacagattcatataccaccattatggcattattatagtatgcaatagaagattgaatatatatttgacttcgaagattgaattttttttggtttagagattattctattactcatatggaatctgataagagttgctgtttctctttcccaaattaaagtatgtatacgccttgatgttcttggtcaaatgtgaatggttaatgtctcttttggttcaaagagaattattcggtcttcttaattatttcgaccaaagattactagattggtattgattttctcgaaaacgtttttcatcgtagtttgttttgaccaaaaagcgttaaaaacatggaaattattatgcccttctttcattgatcaaatttttatataccaaagccatagtattttgattcattccaatattttatactgagtatcactgagacactgactatatatatgtatgtattctcgcgctatccgtaatatgctaggtaatatagcagtgattattaaacgcattaagatcatcatacgtaattcacgataatttgtaatccaaaaacttaggtgtgaccaaaaaaaaaaaaagagttgaatccttcacctaccaaaaaaatggattgtgaccaaaagaccatgacatatcaaatttttagtgattaaaccgatttcttccaagatgctagtatttgtttttatcttgccatattttagtgatttttcatagtagtaaatatatcactttgaccacatttaaagttgatgtatgtccccttcgcatttgtcatgtcggttaggcattatatgtctccttttttcctgatcatatgctcctatcaatttctacaaactcatgaaaacgattactagctatataaatcaagcatagggttcataacatgcaactttaattccccacaattatcgcaaataaaattgtatataaagggtttatcgtaattatcataatgttaacattttcataatatagatacttttggtttgaccatcttttccttaatataagttaataaattaagatgctcttttacttgcaaacagaaagttctaatgtgaaaaagaaattgttattgcgtaatcatgatctcacttatccgtcagcataagtaacgatccactccacatagctacgtcacttaaagtcccatagtaactaattttctttgaatgttatagcaaattattagcaatgtatgattctttgggtcaaatcttacactaaaaacattaaaataatttgaatatcaagagattcatatattcatattttataaccaaaatatgtagggtctaaattattgcttcttgactaggaattacctatgaataattattaaggttcgtgaaacagtgagggaaaaagaagaagaagaagagaagacagtctctagcacgtgccaggtcatgtgtcggcgacggtcaaatgccggtgcaagtgtttccacgtggcagcctaatactcccaaaatataatcttttgttttcgtaaacttttttccctttgaatctttgactgcctcttactgcattcttcacaccaaacgaccggccggtgactgagtgtttccggtttccggtaacacatagtcttcgctgactaagactccttcaataacgtcgtcttcttccacgcgccgtttagtcgtagcgcgtgttatcaagcccgtccactatatatgccacgtatagagtggggaagaaaatgaaggtgagaacttttcatgtcctactttttggccccataaaaaaggcagcacacaaaaataacccaaaatttatgcatgtttatcagatgtggaaaaataaaagtagaattttaggaaa

SEQ ID NO: 7386 - DNA, 668 bp, Arabidopsis thaliana landsberg
tacatagctcaacagacgatgaagatagagaagatggaacgagacatgcagacaaaagaggacttgaaaaccgtggcgttgggcacctctaagatcaactacatggatcctaggatcacggtcgcatggtgcaaacgtcatgaagcacccattgaaaaggtagttaattatatacaaaacttgaatattgatctaccatgaaacaaagagagtcctctaataaagttttttttttgtaatggctggttcgttaatgtagatattcaacaagtcacttctggagaaatttgcgtgggcaatggacgtagaacctcacttcacattctaatatgcattgcactgcagcagctgatgagagtttctctataaaacagagcaaagcaggctacattttttttcttccaagtagataaattctttttgtttgtatctttatttgagatcatgtcttctttttttttcgtatatacaattgttcattgtttgcttgaattcaaatttagtctgttttataaaaaatgaaaccataatctttactattttaaaccataaaaaaaaagtcaattgtaaatacaaaacaccaaaggccaattaagatttattccaactggaaggatagagcaaaaaaaaaagaataatctggcgcaaaaatgacttacacaaatcaa

SEQ ID NO: 7387 - DNA, 1705 bp, Arabidopsis thaliana landsberg
  unsure (1)..(1705): unsure at all n locations
ataatctaaaaacaagaacacaataataatagtatgcatttgtttaatcaaaatcacaatttactcataggtatggggaaaaaaataaaaaaaatactatacagttttaagagtctaatttggtacgattgacggttgtaataattactattgattctcacatccaaaaaccagaaaaaaaacgtgttatgtttttatactaaaagaaagtttattaaaaaaaaaaacctcagaatcaaagctctctcattagcactttagcagtcagtctataaatacatgtctcacatccacacaaaaagaagaagtaagtatcaaacgagagtacaaaagatgacgtcactcaacagctctgcatcaccaacatcnnnnnnnnnnnnnnnnnnnnnnnnnnntactacaacaagcacccacttgtctgaagaagaagctccacccagaaacaacaacacaagaaagagaaggagagattcttcttctgcttcttcatcttcttcaatgcaacatcctgtttacagaggtgtgcggatgagaagttggggcaaatgggtctccgagatccgacaacctcgtaagaaaactcgtatttggctcggcacttttgtcaccgctgatatggctgctcgtgctcacgacgtcgctgctctcaccatcaaaggctcctccgccgtcttaaatttccctgagcttgcttctctcttccctcgtccggcgtcatcatcgccgcatgatatccagacagccgccgcagaagccgccgccatggtggtcgaagaaaaactgttagagaaggatgaggctccggaggccccaccttcgtcggaatcttcttacgtggcggcggagtcagaggatgaggagaggttggagaaaattgtggagctgcctaacattgaagaaggaagttatgacgagagtgtgacatcacgtgctgatctggcttattctgagccgttcgattgttgggtgtatcctccggttatggatttttatgaagaaatatcggagtttaatttcgtggaattgtggagctttaatcactaattaagttaggaaagtgcattatattgcaatattgcatcatagataacatttgtatttcttttctttttgtacggatacgtagcatatgctactatactagggctagtgtaccaaatattgtaaaatatacttattaatatttctgtaaatgtgtaatatatataacatacaattattgtaagtttggaaattggaaactatcgttacgcaatgttcttgtacttgtgaatcacaacaaacaaaaatgttatttaactcttcttaaacgtataaattcctaaaagagtcaatggtcattctttgtttcttctcaccagtcaataaccctcttctccaatgctgactataattgattttaaattgttacaattattgtgaagaaaatagttggaatctatgacaagttgacattattctataactacattccaatttacaagattgaagattattaatctaggtatgtcgattagataattccagaagcaagaaatttatattatagctaggtaactgtaggaagttaggttggaacacaatttgtcatgatcaaatatgagaatgcattatagaacacgcttaaaataatttagatgatgtacaccgcccaatctttttacctatttaatattttgctaattatagtctcttcttttttttt

SEQ ID NO: 7388 - DNA, 1012 bp, Arabidopsis thaliana landsberg
gacttgaaataagtgacatctaatgaatagtactgccaaaaccaaaagccaaacataagaatcatgttgggaccttgctccgagaaaaatcaagaaaatgtacctgtttgcagtgaacaccaaagtcctcaatcttatttaaaggaatagtttgatactcagaaacaggttcatctggaggcttatatcctttagagtatgttctgaaagcaccaatctcaaccttaccagctgaaacagtccttgtgggatcaataacaacagctaaaaatggctcctgatgctgttggttaagcctctgcgtagaaacatcaataccggagagccagcatccatatccagggtgagagtgataccatccaacaacattctccagccgccccgccttataaaggtcaagttattataaccataatcaatcaaactgttctgacttatatacaaactttctaaagaaaaaaatcaaaactttgaagtttcttgaatctcacttacgagcttgttggtctgtgaatactcaaccatgtactcataagcatcatcctgagcattaacccttgtctcagtaccttccactggtaaagcaaaagcatccataacaatgatagtatcaccatcggtcttaccttgcataagacccattatttcaattgtaccaccagagcgagcgtgaaccaccatcttaagaagagcgagcgctgagatcttgactcgtttaaagtagtgaggatcattctcccacggtttctcttgctggaacctagtctgtgaagtatcgtcgtagtagaagatgttgtcggaggttgaatcaggtgagtctactgttagaatgctgttctctagttcccatgtcttccttgctatcgtcgacgacgaaccctccattctttttcgaattaggaattcagttgcagaaatctagggtttcatacggaatccatggaccgtgatcgatctgtctgctgaagaaatgaaaactgtgtcaaaaatgttacttcggggattgacttat

SEQ ID NO: 7389 - DNA, 498 bp, Arabidopsis thaliana landsberg
agcgagcctttgtttgtagatctgttgtagatcgccttcttcccggtggtcccgattatgagtttcgagtcccttcactttgcgtgtggttgcttctctccttatcggttccattatttccaagtttatcttggtctttccgctacgtgtccgcgcgtatctaccagagatttgggcttctctgtggcggggtttgttttgaggacaacttcctccttcacgtctgaagcctctgtcctctccgtttgagtcgatcgtgtgttggagtccgaatcgagaggttttcatttgctgtggctgattttttagccttggttggtgtactccatcgactcgttgtagcttatgttgcctcggcctctcttttctagcccttcttcgcttaggtactcagtgattggttactattggtgctttgaatctcgtctagctttcaccgtcgagtctggattttggcgttctacgtctctgttggcatcttctacatgtggacaatag

SEQ ID NO: 7390 - DNA, 2761 bp, Arabidopsis thaliana landsberg
tgttagtatataagtcaggaaggaattttcacttgacaaatggttaggacattgagagctgttttctgtggtggacagataatagcttcagaaaacaatgcagtttgttggacgactcctcttggacttccagttgtacagccttatcgaaagcctggtagacatttggtaatgctcttaacttctttgataaatgacggagcaaaaatgatcagctgaaagaaatgaatagcgactctcttgaatattactgaatatcactgaatttgagaggcatcaattttggcaggttaagactacccttcaggtgttgactctaagccgtgagactgataaggtaacccaaccaaatttcattcaccatataacttttctccatattttccattaattggaaaatatgactagacattcttatttggagaaagactagggttcagcctacatcttattttagtgtagcatttgggtagatttgatgagttttaagcagaaaagtctcatctttctgcaccacattctgtattcttgcttcaggtcatggcgaggaggcagatgactgcttttgcaccaaattttatacattctcttgatgggtctcacatgatgatgacagcagttgcctgcaacagggcgggcttgagtttcgcaggtcagctttagcatttccatatgcatctaactgatcttgattttttcattctagattcttactcttcatacccaattaaaatttgtaggggtgcatgattcgttctggacgcatgcctgtgatgttgatataatgaacacagtactcagagaaaagtttgtcgagctctacgaaaagccaatcttagaaaacgtaaaagaatctacttattacatctttcaaggggaatacaattaccaacattacactttctttctttgttttattataactaaactcatgatggagggtttatctgtgtgttgatagttgttggagagtttccagaagtccttcccagacataagttttccgccattaccagaacgaggcgactttgatctgaggaaggtcctagagtcgacatacttcttcaactgagctgcagcacattcaggttacttacatactggaagctccactactccacatctaacattcaggacagagtaagtttgattcttcaggccaatacatcagccacgttgatcaaagtggaaaagattcttaataaggaatgttgatggttaacctcaactccgaggtgggcttcgggttacttgtaaatatacacagaaagagtgtttcaaagcttggcaggagggaaggtgttggatcggattgttggatccgattatcgaaccagtgactgtggcactccggattactagcagtttcttatcgaccacacaaaattaccaagagatacatgcagtcttgtaggaactgaaaacgggtgctaaaggataatcatttaaatggtcttagtagacactcttttttgattgacttgtaatttattatatactctaaaatgcattttatataataatatatgaacttgaacaatgttcattatccaagaaagaaattttgaacattcaaagaattgaactaagcatacagaaacaatcttttatagggaaaacattaaaagaaaaaacaaatgattataaactcttatctgttaatgaatattggcctattgggattagctccttaatcttatcttggccgcataaagataagttttggatttgatcgttgagagggctttcatgtggtaataccagcccaattcttaaaggcatcaagaaactcaattttcttcatcttcctcttcctcaactttggcaatctgagattcttttgagtctccatgaacgttgctttatacctccacttatccacgaatatctttatctcctgacatttctctatcacttgcaacgccgtgccaaagaagcctcctttgaccaatgcattcaagaacgcatccgcaagagcatgctctagttttgctttcttgtctttgaactctttccataaaaccacaacctcgaagtacttctcgcagctcacatatccattgatcaacgacaagtatgtctggttattcggctcatactgaaggaaagtcatccttctgaatgtaccctttgcatctcctaggcgaccagatttacaaaaggcatggataatcgaattccaatcatgggacttcacttctacgcgtggatcttccataacttcctccacaaactctgccattaactcaggtctctgattctcaaggagaccagtcattattgttaagtagcatcctttcaaatccgccactcttgtttctctcatatccctaaacaatgtaagagcagctaggaaatcatgttttgtcatggaagcttcgatcatagtgttataggtctcaacgtctaattgaagcccagagctgctgatctctgtaacaagctgagtagcttcagatgttctgccttctttgcaaaaggccttcaagatcggcacatacaccccaatccctccagatcctccctgagcattcatttcatcgagaatacttttacccgaaaatccgagcttgacacaagcatttacgattccaaaccccactgatccgccaacatcagtggacatttgattccaacttctgagctttgatgatcagtttcgctaaactctcaacgcttttactctctatgaaccctctaaccaattcacagtacgtttcctcactgaaactcgaggcttctccaacttctttaagactac

SEQ ID NO: 7391 - DNA, 764 bp, Arabidopsis thaliana landsberg
ctctcctatctgacgctttctattaatagcaatgccaagtgtcacaacaccaaatagagacgacaattttttaatgatagagatgtctttggcttgtgtcctgaaagcttttatcatgtgttgagaccagcccagttcttgaaggcaacaagagattccattttcttgtagttcctcttcctcagctttggcaatctgagtttcttgtgagtctccatgaacgcttgcttatacctccacttatccacaaatatcttcatctcctgagatttctctaccacttgcatcgctgcatcaaagaatcctcctttcaccaatgcgtacaagaatgcatcgactagagcatgatctagtctggacctcttctctgcctccaccgacgatatcttacctttaatctcgttccacaagagcaggacgttaaagtacttttccccgctcacatatccattaatcaaagataagtatgtctggttgtttggctcataacgtaggaaaaccatccttctgaatgtcctccttgcatcttccagacgcccggatttacaaaaggcatgaataatcgaattccaatcatgggaattcacttcaacacgagggtcttcaacaacttcgtctagaaacgctgccattaactcaggtctctggttctcaagaagacctgtcattattgttaagtaactccccttcaaattcaccactctattttctctcatatccctaaacaatgtaaacgcagatataaaatcctgattcgtcatgga

SEQ ID NO: 7392 - DNA, 2178 bp, Arabidopsis thaliana landsberg
attcccttaggcagagttcaaaatcaaaaccaagaagatatcgctacttgagtctatacgctcccagtcaccaccaaatcaattggcactctgaactgagagaatggaggtgagatatttgatccttactcttacttagttccggttaaagcatatgaaagactcaaatttttttacttttgacacagaggcataaagaagaagataacggtggagacatgatcgacaagtgggagtgacatacaaggggaataggttctaagttgatgtcaaggattggttatcgaaaattatctcgtttgggcgccttgggaaatggcatcttagagcctatcctagtagtcgttcttccaccgagggtctccctagacattgctctttatcttattacgagggacaaagaggaacgcaagaaagaaaaggaggaaagaatcagaagtgggaaaaggaaggacgaggcaatgagcatacacaacgagattgtttagcagctccatgagcaaaacgtcctttcatcggaatcatttgacaagggacaagacatgcatgtggaagccaatccatcccaagctgtcttcctctccaacaaccctgatggtgcaaaagaagcactgaactctctgacacaggagaaaagcatggaacaaaatgcatctacagaggattttgagcttattaacaaggaagaatataatagcaagaataagaggaagagaaggagccgaggttggaaaagaaagcgtgagaagaagtttgtgtaaaaactttagaattataaaaagtgatttctcattaatcttctaatgtgacattacatcagtatatatagtacacaagatgagtaaataactagaatcatgtaaatggaagcttaatcataattatgctcatataaggttaatacacccccctcaagccaaaggaaccaaatgtgagaagaggcttgaaacagatagtcgaccaagaatcgaataaaatggacccggatgcaagggcttggtcagtacatctgcaagttgattacccgaagatacatgtagaacactcataaacccattctgcacttgatcacgagttgtgtgacaatctatttccacatgtttgatcatctcatgaaaaacaggatttccagcaatactcagggctgacttgttgtcacaaaaaagcttcggagaaaatccatagcaatgtgtaaatctttcaacatttgaaccagtcggtgatgtataaccctgaggcaaactcatgtatatctcttcatctaaatcactatgcaagaaagcattagtgacgtccatctgtgttaaactccatccaaaccttgctgctaaaccaagaatcaacttcacactagccaatttagccacaagagaaaaggtatcaaagtaatcgactccttcatgctgtgtaaagcctttagtaacaagacgagctttatatctttctacgagccatctgtagtatacttaatagtataaacccacttacagctaacaacattcttaccttcaggcaaagaaaccacactccatgttttattaagttccatagcttcaagctccacatccatagcttttgtccattgtagtgatattatggcttgcttaaaagttttgggttatgtttcaagagatattgaaaagataaattgctgaaaaggggatttaagtgttgtataagggagaacagatgaaagaggatatggtgtggtgacttttatcggtgatggaggcttagaagtttgaatgagacaattcagataagtaacttggtaccttagtagggtgtttcggtctgaccttaggtactgaaatcactgcagtatctgtagtaacagtctccctagaaccaaatgatgtactaggtggattttgtgtatgatgtgtttgagatgatggtgatgaatgatgcgcagtatgtatgtcagatgaatctaatgcaacaggaataggtaatggtgtaatagatgcagggatgacatcacacgaatctgtcagatgcagtgtatcatatggaaagacagtttcatgagtcaccacattacgagagactgaaatgagattagtatcaagatttatatccttgtaacctttatacccagatgcgtaacctaagaaaacgcagtcatttgcacgttgactggacatatgtctatctttccgtagagtagatgcataa

SEQ ID NO: 7393 - DNA, 2603 bp, Arabidopsis thaliana landsberg
atgggttcgctgcattaaccaacctccctcgtagaaaatttcaaagaaaggataagaaaacaagaaaatgcttttagttgaaaaagaagtgacagatgcagaagaattggtcaaaatcattttgacaaaactaaataaaaaacaatcaaatgtcactttcaaaattattagtttatttattatttttatgatgaaaataatgaaagcaacttctatctgggactggtaaaaggacctctctcaccattggttgtacattagctgtcaaatttttacatttccattacattccctaactccaaatatatatacactaaactaaattcttcaagttacttcctaattactactatagtaattatttcctaacagtcaaaacgtactgaataacacatataatatagtttcgattgattaagagatttgaattaaacagataaagttttacgattatatattctaacattttatttgtctcacaaaaaaatctatagatttaatgagaattaaatgaagaggacgaaaggaaaaacaaaatgaagaaaagacatatgaaacgtagtcccctcttttctttgctttcttctctacataaaactaaaactcctctctttcacggccctttaagtaacgacgccgttttcatccaaacacaaacctctggaatcgtgtcaccgttggagctccggcttcattaatgggcatggctttcttcaagacctgaagacaaaagaaagtaaaaatatatatacactagagagaccaagatcctcgtttatgggtttcatcgtgtcttgtgcttagggtgacataaaaacccatttagagagcttagaccaataagttttagagtttgtgaagttcttgttggttagtctgctgtttctggcaaatgctgagtctcttctctctgtaagttcttttttcttcatttactctgttttgttccccatttttggtattttttacttaactttaagtattttaaggcaaaataaaatcatgaatcttttggtgttttttgatctcatcttcttgtggggtttttctattgaagttttgcttaactctgaatcttgtctaatggagctaactcgatccaaaataaaaacacttttaatgattaactagttccactcattatatgaagtaattaatgagttaatcccgtagtttcatgcatcatacaatgtattgtctatgtatggaagcaaagtatgatatcatatttaaacatctatgattgtgctactaaactttaaataatactttacgctgatgtgatcttatgtggataacctctgaccattatctactttctttgaccattgctctagttttctaatccaaaagtcgtatcttccaatgcattagttggtccaaacctagatttgcatcccttaatttgtagtagttaacatctaattttgatgttaaaaccaagacaccactttgtttgtctggtctgagaatatctcaaggcgtatagttttgtccttatgacgcttgcaaaagcaagttgttgagttgtaatcttatgtttttttctgcaacttgccttggatgaagccatgagattatctttataaatggtagcaagtaaaccggtttcttatgtcgaaaaaccgatcatttttgttttgtttgatgacaaggaatggaatactctagagactcggcagagatgatgatggagaataagcgcaatgtctactcgcttgaagataacaaaattaaacgacacaagtcatctgatctctctttctcttccaaggtcttgtgatacatcaaaatcaaaattcattgtggctatgaagctaccggacattctgtaccagcatgctaatgatcttgaaactttgttgttctgtggtttaaacaggagaggaaagacatattagcagaacgtatttcagctcttcaacaactagtttccccttacggaaaggtactacttggtccgaaataatctttcttacacgctctttgtcttctctagccatgttcaagtctctatctatgcagaccgacactgcatcagttcttctagagggaatgcaatacattcagtttcttcaagaacaagtcaaggtctgctcaagttttctaatcaaatacttttcattcattcacctcctccaatccaatgatgattatgcttgattttctctgttcaggttctaagtgctccttatctgcaagcaaccccttctactacagaggtgagctgaatctatgatctggatctcgtttacttggatcacaatgcaagactgatattttccatctctgtaactaggaggaagtggaagagtacagcttaagaagtaaagggctatgtcttgttccattggagtatacatcagaagttgctcaaaccaatggtgctgatatttgggctcctgtgaagactccaacatcttctcatgcttttaatctctcgtcttctaattcgccctttcgatgatttgctgctaaattctctgtctcaagactaatgaaaattagccaaagctttggtctgatcatgtattgatggagagaccttgaagactttgaagtcggcgatggctgattctgttattttttactgattaatccca

SEQ ID NO: 7394 - DNA, 1584 bp, Arabidopsis thaliana landsberg
  unsure (1)..(1584): unsure at all n locations
tataccaccttcattggttggatggagatgagtatactaacaatatatattaataaaaaaaattgaagagagagataaatgagaaattgttatatgtatgatttctcatatatgccattttattagtggtttaacttaactttttaaaacaatacaaatttaagaaaataataaaattatataaaatattaatagaaaatgtttgagaaatccaatagtttcttgactaatggaggtgctcttacaatcaattgatagatatgtatttgatttattgtgaagcagttagagaagagaaaaaaaaaatggaaaaaatgaactctaatagatatgtattccgatgaaaagccacaaagaagttggtcttgtattcgccggaataagtggtcctgtttctgctcccagcaactcaagtctctaacttactcaaatcgcagctacacatctatatctactaaatcaacagtcactatatcaaaaactgcaacattctcctgctgacacgtaagcaaagtcacaatttattgtgttttgaaacgtaaaacaataactattgtctcattaaaattaaaaagaaatattaatcccaaatctcttcccttttttctcgccgttttcttcacgatcttcctcatgtcttgcaaccgttcttgcttatttaaattgtttagttttctttgcgaattttcttattacgattcccaaatttttcgcttttggatcagttactttctctacgccatggcagatttacaatttttacagtatttgtttccgctttcctttctcgaactataattcatcttcactctcctttctccttctatgtcaattgtggctgaagaacagaatgattataattccaatcaatgtatcaattttcatattctcgagatttgcatgtctcttctgttccggtttcagtttttaacattattttgttttatactttgtgagttattacaattctcatctaatcattttttgttgagaaactacctatagaaagacatgggtttcgttttcagggtcccgtgtgatacattttcagaaaaagaaaactcttacaccatcgtgaccaacccaaagacatgccaagattatcaattctcaattagttcttcctttgcttttataaaatagttgatcacataattttttaaacgcaatcaagtacttgataattgactctttgcttttgtgaatttcagtaagaaaggaaaccaagccgtacaagcactagatatactggtagtggtatacactggagaaaaccaactttttctcgagctcatatattctcagaaaacatcacatgggacatctacttccctaatctgcacaatctacttccctaatatgtaatatctctatgattttgattcctaaacatacgatttttatcctccgttatttgctccactacttcatagtactccacgttgactataaacgaccacaatctctttatcttatcataacaaattcgattaatcaattttacacagaaaagatctttggtaatttcatttactggctatcacatgaactggagaaaatgatngatttttttttaatcttctt

SEQ ID NO: 7395 - DNA, 658 bp, Arabidopsis thaliana landsberg
aagccaaacaattatggaaactgaaattgtaatattcagaaatttacaaatttgatacattaattgaatgtacactcgttgtggttgacctcttcttcagccataactgacctcgaatgagaagggagagtgaagatgaattttggtttgagaatggcaagcagcaaaaaaaatgtaaggattgttaatctgccatggcgtcatggtgtaaagcaggcggaaaagaaaataactgatccgaatgtgaaaaatttgagattcgtaattagaaaattgcatagaagatgaaacaacataaattagcaataactgttgcaagatatggggaatggggaagatagtgatgaagatggcgagaaagaagaaaataaattatggattaaatctctttaataatttatgttaatgagaaaagaattattgttttacgcttcagaaaaatcaaaactcaataaattaagactttgcttacgtgtaaacaggagaatgttgcagtttgtgataaagtgactgttgatttagtagatatagatatctaataatatttgttcaaattttttgtttctttttttctggtaggcccaaatttttggtttctattattagatagttaacccgcattatatgtgaaataaattattaaataaatatattatag

SEQ ID NO: 7396 - DNA, 1832 bp, Arabidopsis thaliana landsberg
cgtttagatagccaatcatatttagctggcttaatttggtcgatgtgttagtttagtgtccagcagccaaatatcttgtcaacaacttgtctgcataggatttgtgctggctgtaatatggagattggccatggaagatttctgaattgccttaattcactatggcatccagaatgttttcgatgttatggctgcagtcagccgatttctgagtacgaggtgaaaccaagctctcttccatatcctcttcatttgctttctggttctacttaacctttagattttcttttgtaatgtgtttcccttttttcctatagttttcaacatcagggaactacccttttcacaaggcttgttacagggagagatatcatcctaaatgtgatgtctgcagccactttgtacgtaaacctctttccttttctatcattttagcccataaatatattcatgtgttgttgtttttttccggatcttacacttatcgtctgttgctttgtttttctcccgaatgtaaattctttgaacagataccaacaaatcatgctggtcttattgaatatagggcacatcctttttgggttcagaagtattgtccttctcacgaacacgatgctaccccgagatgttgcagttgtgaaagaatggaggtgggttttcttctcctctaatatgtccccaaacatacatcatctactcaaaagtgaaaacattttttagccggtaattgacaacttagctatactttgtagccacggaatacgagatatgttgaacttaacgatggacggaaactttgccttgagtgtttggactcggcggtcatggacaccatgcaatgccaacctctgtacttgcaaatacaaaatttctatgaaggactcaacatgaaggtagagcaggaagttccactcctcttggttgagagacaagcacttaacgaagccagagaaggtgaaaagaatgtgagtaaagaaaagacaattatccagtactaagctaatacttgaaattattatcacattctgtttctaaagtattaaaccttttcattttgcttcttagggtcactatcacatgccagaaacaagaggactctgcctttcagaagaacaaactgttagtactgtaagaaagcgatcaaagcatggcacaggaaaatgggccgggaatattacagaaccttacaagttaacacggcaatgtgaagttaccgccattctcatcttattcgggctccctaggtaaaaaagactctttttgcttccattgaattgatcttatgtcacagttcaagcattgatggttttgctgaattttgttcaggttacttactggttcgattctagctcatgagatgatgcatgcgtggatgaggctcaaaggtgaatttcttactactcctcttaacgtcttatattactgcttctttctgttgatcacattgttgaaaccttgtttcgttttggtcttaaaaaggattccgaacactgagccaagatgttgaagaaggtatatgtcaagtgatggctcataaatggttagatgctgagttagctgctggttcaacaaatagcaatgctgcatcatcatcctcctcttctcaaggactgaaaaagggaccgagatctcagtacgagagaaagcttggtgagtttttcaagcaccaaatcgagtctgatgcttctccggtttatggagacgggttcagagctgggaggttagctgttcacaagtacggtttgcgaaaaacacttgagcatatacagatgaccggtagattcccggtttaagaacccaaatggacaaggtcttctactttatttatagga

SEQ ID NO: 7397 - DNA, 2318 bp, Arabidopsis thaliana landsberg
tcgtcatacccatgcacggaccataagtgatgttcatgtcaaattgtctaagcatctcctcctccttgtcataatcctctgttaattaaaacgcggcgggtgcctcctttggggtgagtcaaaataaatttttttctagtcaacttaataaaatgccaagtttcgattgttccctaaatctcatatgggattggaaaattaaaccctaattttctaccatgaataaggaatcagatcatcaatagaaagaaaaccctaataagttacaatttacaaagaaaataaaagccgtaccgttgagatcgacggagccgtgtgaaatcaatgcggcggtctgggtaacatcacaaccttgagccgccgcgtgtttgggagcgactttccgggaagaaggtttggacttggagatacctccggtgatattgcttttagtctgcttgtagaaacccttcaaattcttcgccgtcgtcgccatatcctctttctctttctctctctctctctcgttgcagttcaaattttgaatctttgagtcagcgttcctttagcttctacgcgacgattgatagaaaaatatacctttttttgtctcggccttataaaccgcccaatgatagtaatgggcttcattatcagcccattttattttttatacttttcgaattcgagaagaaaaattactagatatcatactgtatcttttaaatcctgtaaatcacatctgaatctaggatgatatcgcaccatacgaaataagatcaagaatccctctatgtaaatctaattgggattttttcatccttaatttgtttccacttgtgtagaaaccatataaataaaaagttttgaactatggtcccattactttattacatttggaatttaactgttgataatacatgtgaaggcgtaaatcattcaactttgtcgtactcaacactacacgtactcatgaacactatgtcactacacttgaacctagtatatatatagtggggttgaaatctctttctttgtaatggagcttcattatattggataaacagtatattttaactttttaagctattaaaaacctctggttctaacatctaaaagtgatttatcccaaattgattagttagacataaaatgttaattaaaaagcataattacaaaagtttagtaatcttaaatttacaatgagtatctattttgacaaactaaaaggaaatatttttggccgatcattcacgtagcgggaatgcatattgaaatatattacgaatactaatctactttacgagtcagaaataaataaataaaaattacagaagacgaagctatagtaatatttagaggtggagaggccaatgaatgccttctctccgacaaggtaacggagccggcaaagctatgtgcgacggcaacttctcccctggcatcactaccgatacatccaccaccgtactcaccggaacctgccaccgttacattccttatcattaacttaaaacaagttaattgcgacttaattctataaaacaaagaacaattctacaagtacgtaaagatgttttggaaaaaaagtattctatatgaaagcaaagaattaaactacaacttgtgtgtcttgcttttcactttccaaagttgggttatattttttgtattaattttgacgaatgttttccacttttcaaaggtttttgcaccgaaaagaaaagcaattttattttgcagaaacaaacgaaaaactaaactcaacagtggcaagttaatgcggctcggctttataaaaaggacaaaaattcttttgagaaatgctttaataacttttatttagttttgtgtttaccatggatgcttgatcagcaagtttctggaactgactggacccatctctctgtctttgtctgatctgatgtggtgaatcaaatgaagaattctcaggcctaaagagatgctcgaatatggccatgatcaagaacatggagatgagtatcgccgtcgctacaaacccaaatgagatcgcattcatcgacgttgacgatctccatggcccttcactatctccctctctgggactgtatatgctccatgagcttgacttgttcattttctccttgtggcatgcgaatcttgagccgttccttgatttgaagtcgatgagtcttcttaactctttggagaattttagaacaaatatcgaactggagaaagaagaatcaggagcctgaactccttcagattgttcttcttcctctgttttgttttcaagaacgtggagaagaacagatgagtcttttatcaagaatcaagttaaaaattgacaattg

SEQ ID NO: 7398 - DNA, 1205 bp, Arabidopsis thaliana landsberg
gctccacagatccacgaaatccagtgatcttctcacggagctcaaggagcggagcacgcatacgaaccacagctgcatcgatatctacgagcttagtgcttaaattgacgaaatcggcataatctcgattgatgagatcgacaagttctcggttgagggatgcaaggtgtgaccggagctcagatcggagagtgtcaaagggaacaaatgtacggagctctgagatgtaggactcggagtcgaagttaggggagaggaagagggaaggcttgaaccatagaggatgagagtcgtaaggatcggagaagaagtctgtggcggatctcggcgctgacgacggcgacggcgacgtcgcgaccagatctgacatttttcgcttcgctgcttcctctgcgtgggaaatgcttcacttatacaactgtgtggactgcttgccgaattcgagttagagagatgaactgcgtgacggcaaaagtgtccagtgcctgatcaatcttaccaaaccggaggattaaataaattggtttggtcgaccctgggtaaaagtcaaaattggttaatatacgatgcattctttatttgaaaagtcagataaaatgcccaaaaagttatgtgctattgtggaaaaccccttaaataatccagctaagcacggtgttaagtaacaagcttaaccgtaatcaaaagtcaaggtggaggagagatcttgcaatctttggttcggcaagattagactgcaaatattttctaccaaccaactaaaccggatcatgcaaagataggtcgatagatggaaaaagttgcagagtaaacattttgtattaactgttgtaaggttcaatttcaaacaagtatcaaaattacgcagctatatgatacaaaacgtctaattcaacctatttcacttattgttttattctattcacctgaaaaaattatatacaacgcattctgcttgcaaccaggagctctttttaagaccaaatttcagttacggtttctaaaatatattcaatcctactcctacgtgtagaagctgaatgattgctgctttccggatccaccttccccgtggagtttgttccattgttgaagcgctgtcatagtcgcagactctgatgagacgctcgcagacacctgattcaacaccaatgacaatggttacagtttactaagcccaaaccgatcatgaaaaaagaaaaaaa

SEQ ID NO: 7399 - DNA, 1308 bp, Arabidopsis thaliana landsberg
  unsure (1)..(1308): unsure at all n locations
gacataaccttgatggaatagaggaagtaatgactaaggagaaagttgtttcatttgtttcaacacgtgtcatttctcgttatcaattatgtcgatttgtctttttaaaaattactagaaaaatgattactcaatgagcactcaaccaattattaatctcaatacatgtttcttccaaaaatgaaccattagtggttttgaacttttataaggatagacataatttttattctgttctattccgttgtacaaaaatggcaagataatgttgcgatggtgtgtttgatgtggtcatgactttaaaaaaaaaaaaagtttctgatttagttcatgaactaaatagaaaacaagtcccttatgaaaaccattctcgagatgaatttggtggttaaagataaccacacattcatcttgccaagtctacgcaaggctttcaacaatcaaagagttcggtgaaaacgttaaggctatttttaaccatgcctatgcaggacttttttttttttaccatgcctatgcaagactttgagtagtgaaagagttcggtgaaaatttcatggcgttgaaatcgactgtgacgggagcagcatcaagaaactaaatatgctacatagattcttcaatagataaggagaagaaaatgataggtggctcagtgactctgatttttgagcctacaaaatcaactctaaactaaaaccttgttaaatgttaactcaaagcctaaaagcaacttctgatcttagttcatcaggttaaaacttaaaaaaaaggctacttaacgaaaacagacttacaccaaccttcttacatttgcttcaactcattgatgcaaagcatcatccctaacaatggaccacataacaaactgtgagggatcaacatgaaactatctttaggtctttgggagctcactttaagaacctttttcacctttggtgattggtaagtcatagtgactccttcccaagtagtgtacaagagaccatatgagaactctcctacttctggagcagatggtgcaatgcagcttacagatacataaacaccacacggctcctcaaaacactgcactacaaacaatagtttcttctcatataccctttcaattagtatcttatcgctgatgaacatcatcgcggctatataggaaacgccattgaaactataagccgtgctacctgtactgcgagtaagatcatagtgctcgtatagatccttgtatgagccagtataattgcaaccttgtacagggcangagcatggagagaagtgcatatcttctcatgggtgattctctccataata

SEQ ID NO: 7400 - DNA, 518 bp, Arabidopsis thaliana landsberg
atatgagtactgacttaattctggagaagatggcgcaatgcagcttacagttacatacacaccatacggctccctgaaacactgcactgcaaacaaatgattcgtcaagtgttccgttctaatcaatatctttttgctgatgttcatccggacacttaagggaatgtcacaaatgaacgtattaatctggtttatttccatatgggtaatacgatagtgagtgtacagatccttgtatgagctagtgtaattgcaatccaatgcagggcaggcgcaatgagagaacatgcattccttttcatgagttaactctttcccataagatacattctttttgcaacctaacttggcgttcggacacgggatcaagatcgattcaagaacactctccattgctctgcagcgattgtggccaacaggcgaagtacacgcagggcatttgttatttagtttgggacagcaagaagaacaagccaaatgtccattatcacactgaaattcaaaaccagtaacttgtg

SEQ ID NO: 7401 - DNA, 2609 bp, Arabidopsis thaliana landsberg
aaagttttccgtactcctatggcggggatgtacctgcactcaaaaattgaaaaattcttccttttcatatagattctctattgtgggataagacatagctaaatctcaatcgagcacattactcatgctgctgtttttgctgttgttgtgtgtgtgtaatgcagtgaagattggggcaatggtgttcacttagatttgaatgacccacgcattttggcaatggcggctgcagaacgccatttctttgatgcggactatgacgaatacgctgattctaactctagcggagctgcattctgtcgctctgctgctcttataggaagtccacatttggttttagtttcttactttgaaatggaaacttactgaccgttaaaaatggcagttaatggcgcttttactcttacgacacgctctaaatcttacaaacaacaactcagatgacgaagaagacgatccatcagctttcttctttgtacgtacatctctcttactcacagttcgttacagaattctcctttttgctttcttgttataacatttttcgttttcttttgtcttctttcggttagcttttcatgcttcgagccggtggttttctcctcccgtgttacatcatggcttgggctattagtatattacaacgtcgaagacaaagacaggtatataaatctttggaaaaacaaaacacataaataaacccatgtgtatgtatgctcatattctcgtgtttttgtgaaaatcaggaagctgctgctctagctgctgcagaagtagcgtttatgttacatagcggtgggggcgggggaggacaacgcagaagaggtttgcactttgctgtaccaccagagcttatatctaatccacaccaccaacctgaagcttcaccgcagtgattatatattcccgtcaccggtaagagaaatcagtcatcatctacgacgttggtttctctctatctctcacttctctctctgtgtagtagcttgtgtgtttgttgtgtaccggtcttgctctctcaccaaacacacaaaactgagattataaaacacggcaagtttctttgtctattatcttcttacagacgagaaaagaaagattcttcacctattggatttatgtttatgctctttatttatcttgttgataattctttttcctcgctaatacagtacaatttactaatttagtacttaagaaaatggcaaaatggtaaataagggagtaattaaatattggctcaattagacaaaaatagtctcttacacgatgggctttgcgcctttgccccattttgtcttttggtatcgaccaagtggacccttttgtaggcccaaatgtaatggagccatttcgacaaacgtcctaattcctctcttttatctttttgacatagtcttcttactctgtttgatcccaacaaagcaagcagagaagagtcgttgaactctttttatgccagcagagaggattttgacatcagaccaaaaaaaagtcttcttcttccataatccaacacgcaattctcttgtatgtgttggaaattatcataattatttcgagattttcttttggtttaataatgtcgtcgataaggtagtacatatatttatttggctaacttaatttcaaacgtattgacgtattgtactgtttgagaacaatttgttcaattcataatacgaaattttctcagacatattacataggaaagagaaaaaaaaaactaatctagagagattcaatgggaaaatctaaaaaaatgataaactaaagacatgactttgaacaatttcaagattcgatattcctcagtcttacacacagagacattgcaccgaaaaataactgacatatcctgaagaatagttcagtttttatccaatgaagtcaacgtccgagataagaaaacaaagtcaacgattgtgatatcacttttaaaagtcttgagagtgtgaaattaataagaatcgaaaaggagtttttcggtggcaaaacatagctcactgtgtttcacaggaacaagtcaagcccttcacatgttagcatttaatactcttttttatttttgcttgattattattctttatttgtatatttttcaaattcgtttccaccactagattttgcctcctttatttattgtaccgcctatgcgtgtattgtatacgtatagatatgtctgcgcctgcatatgttcctcttcattacgtatcctattcacacatttatctcgacatgatttgttggattttggattatatggctcttattttgtttaaagatacgccaacaacataatttcatgagatgtatagtctactgcaattccatcatttgcatttaaatccgtataatatatctaaaatgatgtcaaaatgtctatttttatgtttggtttttagaaatattcagaccactcacgcagttcaaacataccattggaaaaaatgaaagcctgaatttgtttaggaaaaaaaacaagaaattggattttgacaactcttaaaatattataataatatttatgtcaattacaaaaccacattatcacatacagcctcataattagtttgtaataaattaattaaataattaaatgtattaat

SEQ ID NO: 7402 - DNA, 725 bp, Arabidopsis thaliana landsberg
tttaacagcgcgagaaagagaatgtcggttattgttttcgactaagatgggagacttctgttactgtccaaaggagctgataagtaagttaactgaaaattttgagagattatatatacattttgaggccttcttgttgatatgtattgaatttgtggaatcttgcttttttttgtgtgcagtgtgatgtttgaaagactagccaaaaacgggagaaagttcgaagagaagactcgagaacatgtaaatgaatatgcagatgcagggctaaggacattgatacttgcataccgtgaggttgatgagaatgagtatatagaattcagcaagaacttcaatgaagctaagaactcggtgacagcggatcgtgagagcttaatagatgaaatcacagaacagatggaacgtgatttgattctccttggtgctactgcagttgaggacaaacttcaaaatggggtaagactaaaggttataaaaatattttggactcggatttgggtcaagtaggactataacaggtttaacttgattgagtttcaggttccggattgtatcgacaagctagctcaagcagggataaagatttgggttctaaccggagacaaaatggagactgcaatcaatattgggtaaggaacttttgtttttgttcttatgcctgaacctatacattgttcttagtgtgtttgtttcataggttctgacattttttcgaaatctct

SEQ ID NO: 7403 - DNA, 604 bp, Arabidopsis thaliana landsberg
tttcagcattcaggggattcatgctagacatagaagtacagtcccaacaatagacagtggcaatccctcagatgcaaagcctcggtctaaccccaccgccatatttctcatgtaggtaatgtcccgcgttaaccagtcctatactatcagcttgtttggtgccataaaaccctttcgcaaaaaccgctgtaacaaacagattgatcatgaacgaaacaaaaagcgcggctgatgattcgattgtatagtaattaagagcttcttgaactctgtttatctcctttggatccgtcttcctagactgcactaaagctgaatgcaagaacacattatgaggcgttattacacatcctacaactccaacagcttctcttatcgtctttgatccgagtttcggaataataatacctttcaaaatcatcatcaagataaaaccaaatcaagaaatggtatcaaataagagacaatgcttaatcttacaaacttacctatgaatagttcttcaacacttgggttagtttcattaaacatccaagcgaacgaaagcgccattgtcgcaatcaagaccgcgaaaagaccttctaatctgctcattccacatttc

SEQ ID NO: 7404 - DNA, 2147 bp, Arabidopsis thaliana landsberg
aggaagggttcgcaagctatgaggcatgtatcattagagagtttcttaattactgttttgatgcttgtgttggattttttcactgagcttgttgattttgcaggtgaatttttcttatcatgaagctggagaagataaacaagctcttgtaaaactcgtagcttgtgagaggtaggcactcattgtacaccttgcttatctctatgcttgtatcctggattgtttctatgcttttgtttaaaactttcttggtctaatatcaaacatttttggcattagatgtgctgagaagttatactacaaaaaaagaaaggagggtgaaagatcagagagtaaagaaaagaaaaaacagaaacgaaaacgggatggagaaagagatcgttatttgataactaagggtcacagttttgttttggattacattaagctaaacacacattaattttcaaattcaggagtaaatcacacagtgaagatgacacagacgaagaggagaaaagaaaagagggtgaaagatcagagagtaatgaaaagaaaaaacagaaacgaaatcggtatggagaaagagattcactcattttacaactaagggtcagagttttgttttggattacattaagctaaacacattaattttgaaattcaggagtcaatctcacagtgaatatgacactgacgaagaggataggagaaaaggtatgatatttgcaaacttcaatatattggtgtctattctatatagaaaaggttatggattattataattctgggaaggagttaatacagtcattcatattgcagggaaaacaagaaagttcaagttggaaggtgctgatagagaaggcaaggatgatgaaaacttcgatgaatacatggaggggatgttcccgggtaatgggtgatattcgagactttcaagtttcaaaaggtgaccatctacatcgcaagaatatcttttatatcataggctagattgagtttgaaccctgaaatgtaaacacttacatagccccttattcactgaaagaaattgaattttaatatcgagaccataacatcaaatacttttattatctcgagtttggtgttgatacctaagtatacacaacaataggacttctcacattgtgtgaaccatccgaccaaatcagagatgccgacacaatattagaaatacccgcaagactctttccagagactgtaacggtgaaagacttcttctcccctggcgccttgaaagagagtgtagctggctcaaccttgatgctgagtttgggattcccagacaattttgccttgtaagtggatcccttttccccaacgttggtgactgttcttgaaaaagtgatatctgaagacgatgaagctgacactttggctgacattgaagggtagtttagatttctcatagtaagctttgattgttcagaacaagtaaaggttccacccgcaatggtactaattccttgagaagagtagtccaaagagcaaagcatgttcaagtaatcctctttggctatttcgtaaacaagccctggatcaactgccactgtagggttaacaaatcctgatccgtatgcaaactcagcttctgcatttttcgaagcgttcattgcccaagctgcattaaaaacaaaaaggattgattcggatctcacttaacttaaactctttcttcagagaatagttcgatttgatgttgataattaccggtagtcatgatagcagatttgatggcagaagcagaccaatcaggacgtagtgtcttgacataagcagctacacctgcgacatgagggcaagccatagatgttcccgtcatgaaatagtaatccgcgctttgtccaggtaacgcggtttgagccagtggtgaatatgctgctaatatattgactcctggagctgttatatcaggctacatatatatacatctcaagacatcagtcaatccaagtaccaacaaatataagttataatcacataggtcggttatttcgttttgagtgttcgttaccttcaaaatgtcactaaagagagtgtttggaccgcgagaagagaaggcaggaacgactggagcaccattgtctttaactgtattggtcttcaatatagttccttgcgggttttttgtatcatttataatgcct

SEQ ID NO: 7405 - DNA, 778 bp, Arabidopsis thaliana landsberg
cagttttccggccatactcaacctccgttctccctccatatccagaattaggtttccggccaaaatcagatccagatccaacgggtccgggtcgtgcatagctactgtactcggttttaagagcttggtcgtcataagcagaagaatcgtggttagaagagaaattaggtcgctgatactcaaaggcgtcgccggagagagaggagagagggtaacaagtctcgtcggacggtggaattgaacggccgtatgtcacggtgatgtcgtagcctccactataaggcatcggatcgtattcggtgaaatcgtcgacgtcattgtcgtcgttggtgtaatacggcatcgtttttggagtcgtcttcttcttctttctgattctttttttggatctctcaagaaatgaagattgtgagcttcctctgtttacatggcgactactacgtacgaaaagtcaaggggtgacacgtggcttttatctttattgtctaagtcaaaagtaatgtttattgaatccaaacttaaaaagagtatattggctgggagatagaattaaaagaaaacaaggtaatagcacagattaaatgatgctatttgatttgattattaataaaatatctactatttgattactttattaagaatttcactatatttgaaagttacatagttattgtggttggttcttgatatatcttaaatagttaaatacaatatcaaactcatcaatactattatttgagaagtacgtttaatgaggtgtgcataaatttagatgaaa

SEQ ID NO: 7406 - DNA, 1813 bp, Arabidopsis thaliana landsberg
ggttgggcttcgatatcgattggttaggcccgccaacattcatttctaaatgggcgtctgtctctttcaagaaaaagacacaagcacttaaagccaagattggcattttgccacatgccactaatttcaccttgtgttagatattatttttggactacacactcagcgaagaccatagatcaactcaaaatatttattacgcaacaattatcagagaagagattgatgtgaaatgtaatgaagacgaaaagaaaataaaaaaagaaacgacgaatttggacgtaattttcagccaaaacatatgctttgggtcccacactttcacatttcaactttatcatcacaccgaaacactaaacaccaaaatccccgacaaatttaaagaaaatttttccatttttttttttactctatctctgtgagagattctcttcaagctcaggcctttaggctttaggtttcttttgggagtcttcttgagctctgtaatcactctctagaagcttattttgcctcctaatgttattaggtacgtctttgtatctgtactcttgcttctgcatttttcgatatttgtttcttttgatgagatttggggactcttccttcagaaggatatgaagattttgacatcttccattaaaagttgaatctttacttaagctagtgttcttagcattctgtttatgttagcttcatgagatctgggatttcgaggctgcttttttttttttgctttgatttcacatttaatggggtttgattacattttcattaggtgaagtgacttgaacttggcttgtggttgtgatgaatttctttctattaaaagttttggtttccctaccaaaaaaatgtcttctttttgttaattaaagtctaaaagtagctaatctctatctgtacttgtgtagggttcatcatttgagtctataactataatgacttttcactgttcatttcctttttaaatctcttgttgtttccctttccttactttgttcatcatttctccttccctttactcaatagacactgctcttcctttggattattgctctgtgagttatttaaaataagccataaggtctcttcttatgattgttgcagggtgttgtactggaatctttaggatgaaccaaggaagatgagtctctcggtctttcaaaaaccaagtcttgtaatgaggagctgtccactgttgtaaagtaagtcattaagatggaatcgtttgcaggttcttgtgaaattgttgaggagaaggatgcggtaaggttagccaaacattctagcagatattgtatgtcacctttgggatcaagtaaagatatggagcagcgtcctgcattgaagtcagggtaccaaggttctatggagtatgacattgatcagcttttccagtctataactataaaaccatcacctagaagagtgatgggctcttctttccatcatcttgagacgagcgcaagtgctggtacgagcaggagcacaagcccttcaaataaaggcgctatgaaaaagccctttcccatgggaacccctcgatcaccaagagttggtccctctgattcaatatctctgaagcaggctctgagagatctttgcatctccaaggcatcagaaatggcttcccagaaacgtttatcaaaatctgcagctgcatctccgagggtttctgaagcagacaggataaagactctttacagacaagttttgaatgaatctgctggcaagcctgggcttcctgtggacaagggtaaaagcttggttgaaatatctttgacgccggtagccgatatacccagctcct

SEQ ID NO: 7407 - DNA, 1933 bp, Arabidopsis thaliana landsberg
gatggccatataaggtgatcttgttgctgcttatctgcagaaacatctcttctctaatatccttaaagatgtaagctttattaaagattgttgcttttttgtgtgtgtgttatgtatgtttagtatgtgtgatgatagtttgatgtttacttctagggagagttcttggttgatcctcgaagagcaattgcgaaagcttatgagaatacagatcaaaagattttagcagataatagaacggatttagagagtggtggttcgactgctgtgactgcgattttgatcaatgggaaagctttgtggatagctaatgttggtgattcacgagctattgtttctagtcgaggtaaagcaaaacagatgagtgttgatcatgatcctgatgatgatactgagaggagtatgattgagagtaaaggtggatttgtgaccaacagaccaggttaagagcagcttttagtgatctttcattatataaggttattagatataaggatgattctgatgtttgtgaattgaacaggtgatgttcctcgagtgaacggtttgttagcggtctctcgtgtctttggagataaaaaccttaaagcatatttgaactcagagcctgagattaaggacgtaaccattgatagtcacacagattttcttattctggctagtgacggtatttcgaaggtaaagttgcgaattgtagtctggatttgagtaaaggataaatggtgtttattgaagtgagtttttggttgaacaggtgatgtcaaaccaagaagcagttgatgtagctaagaagttgaaagatccaaaggaagcggcgaggcaagtagttgctgaagcattgaaaagaaacagcaaggatgacatatcttgcattgttgtccggtttagatgataaccaagaagactcagcttatattggatttggagcttcctttgcttcaccatgattcttttggggtccggtttagtttgattctgggtcttggttacttgtgcatttttaagaacatgagtttgaataggactattatatattactagtttgacaaaccagatattttatcatataaattacatgaaaagaatagtcgatttaaaatggtttcaatttgttcttggaatcgtggataattaatcatctactcattaatcaatgttaacaagaaaataaacaatcattcagtcaactgcattcatatcagacagactcattatttttctgggctttattgaaaaggcccattatagcccataaaacgttagacctaaagggaaattagggtttctgaagctggaggcggacactatatataccaatgctcttctctgttaacataatcgtgttcttgatggttctcaaagccgaatcgtttttctttcatatttgttctcgtttaatcattgatgatagattaagaaaattagggttttttatttttggcttttgataaagagaaagatgcctcttctttcagcagcaagattattcttgttagctttgttctggaggcacagatcaatcgccattatgagagggatttttttataatttgcagagttgttcttccttctttgctgattatccctctttgtggtacataatctcttagtttttcttcgtattaacataatagtgttggagtgagcattctgatgaaagaacatcatggcggttggcgactgaataagaggatttaaacgttgcactacgtgacattgaaactgtctttcaacattccaatatttcaactttcgaatacccaatatttggtttgttcaaagacattttcgatgtctagcagcgccaatgtttaaaatcaactgataattttggaattaatgtgtataaagattcaaccttttattttggtcatctaataaattggtaaacaaagttaggacatgattcataatttcatacagatgatatgtt

SEQ ID NO: 7408 - DNA, 1111 bp, Arabidopsis thaliana landsberg
aggtacaaacaaaaaaaaaggttactgttctactgttcttgggttaatgaacatgtgcatagctttaagtgtattgttttttttatgcagggagagttttgggttgatcctcgaaggtctattgcaaaagcttatgagaagacggaccaagcgattctatcgaatagttctgacttgggtcgtggtggttctactgctgtgactgctatattgattaatgggagaaagttgtggatagctaatgttggtgattcacgagctgttctttctcatggtggcgctataacgcagatgagtacagatcatgagcctcgtactgaaaggtcgagtattgaagatagaggtggatttgtatccaatctaccaggtaaagaacttattttgagtattgaatgtttaatgaagatagaatgattttgttgacaaggaggatgatgtggctgtgatgttttaataacaggtgatgttcctcgggtgaatggtcaattagctgtgtctcgtgcttttggagataagggacttaagacacacttgagttcagagcctgacataaaagaagctactgtagatagccagacagatgttcttctcttggctagtgatggcatctggaaggtaataatggcttgttctctgtatatattattcatctcttgttaaatgagtgttttgagaccatttttgtctgattgttttgttgtaatgatcatgttaataggtgatgacaaatgaagaggcaatggagatagcgagaagagtgaaagatccacagaaagcggcaaaggaattaacagctgaagcattgagaagagagagtaaagacgacatatcttgtgtcgtggtccgattcagatgacaaactctctgaaaggatacttacggggagatgggttccttatataataatttcaatcaaagattcatcaggacaaaaaagcttgttttcactggattcgactctgatgattctggttcggtttaggaccggtctaagtttcaatttgtgattagctgcttcttgctatagcttatgtgcgttcgttgtgtaaattgtgtgttttaaagacgataagaaaatgaacaaaaaaggagtggggaatggagttttgtg

SEQ ID NO: 7409 - DNA, 2105 bp, Arabidopsis thaliana landsberg
ctgcgaccaccgtcatgaaccattctcctgaagcatgggagcacatgcaattcaaagacattgttgccaaggtagcgaatgttgaactgtactacaaggctgtgcacttctacttgcaagagcatccggatataatcaacgatcttctcaacgtacttgcgttgcggttagaccatactcgtgttgttgatataatgcggaaggttagaagctgactgatgactttttttttttctataaaaacaactgagctacattacttaacaattggtttcttctgatctcaggctggtcacttgcgtcttatcaagccatacatgattgcagttcagagcaacaatgtctctgctgttaatgaggctctgaatgagatatacgtggaagaagaagactacgataggttgcgagagtctattgatttacatgacagctttgaccagattggcctcgctcagaaggtaaagttcaaatatactacccctttaatattttctctctttaaaaatggaaaacgaatggccttagagatgatataatcttcctgtgaatggtgcgaacagatcgagaaacacgaacttgttgaaatgagacgtgtggctgcttatatctacaagaaagcgggcagatggaagcaatcaattgcattatcaaagaaagacaacatgtacaaggactgtatggaaacggcttcacaatcaggcgaacatgaacttgcagaacaactactggtgtatttcattgaacaggtatgatgatggttaaacatttacgagatgctagtgctagccattcagtttggttagttgaaaagaattggtccagacgttgaacgtagtatcccgtgtcttctgctgttatacagggcaaaaaggaatgctttgctacatgtctctttgtatgttatgacttaatccgaccagacgtggctctagaacttgcctggatcaacaatatgatggactttgccttcccgtatctcctccaggtgatctatcctaaccctcaaataaactcttttgattctctgctcaatgaggttggaaccattatttgaacgctatgatgaattctcttcttcctgtcgttttttctttgcagtttatccgagaatactctggcaaagtggatgagctaataaaggacaagcttgaggcacaaaaagaggtgaaggccaaagagcaggaagagaaggatgtcatatcccaacaggtactacttatgacacagctacactggatatcatccgactctttatcttgacagatacacttaaaggagtaatatgtttttcttttgtttttaaacagaacatgtatgcccaaatgttgccacttgctttacctgcaccaccgatgccaggaatgggaggtggtggtgggtatggtcctccaccacaaatgggcggtatgccaggaatgcctcccatgccaccatatggaatgccaccgatgggcggctactaaagcagaccagcttatgctttaatatccgcatttggaaaagtatcagtagcgcatagagtcggcccaatttgctagggcggtgttcatctgctagctagcttatatgtctgaccagaatttgtctgggaataatgtggataataacctcctttcgttgtaatattctgttgggtttaggtgagtcattttttttttactttttgtcaaaagccatttttgagtatatatactcaactctcttactcatatgagttttgtagttgtactttccttcagcatttcattccattcgactttcgatttattaaaccgttgatcagtttcaccttgttgttattcatatatgaaacaattaatatcgagaaggactaaataaatccttcatgagaatttggttgacctcagaacaatcatcatcattcatcagcatcagaaagacatagatgcaacgtgaatctcattttcatgaaataataatgaaatcttagggtaggtttatttcacatgtacacataaaaacctaagtaccaatagtcatctgaacatcatgaactaaaaattgcatccctcagtaaacacacatttctgctacattactaagaaaacgttctggatagaaagattcaatcaacccaaacatac

SEQ ID NO: 7410 - DNA, 1361 bp, Arabidopsis thaliana landsberg
agaacttcggaaattattggtcaacccatgttccactcgagatcaattctctagttcagtaggagaaagtgattttatattcattgttaatcgatagtcgtttacagagaaaatgaatgagatttaagtaaaagcaagctagtctttaacaaaggactaataacgaagcccataaggcccataattaaaagccggctaggctcattttacacgaatcagagctactaatcccaaagtatctttatacattacatgtcgcataccactaagaacgaaatattttgggaaactagactgtaaattattattatttggcaagagaactatgttttcaaagtgtggtcaatacttagattatttgatataggaattaggatagaaacattttggttacgagatagcgttttcgaatattatcaagtggtgatgattcatcagacactgtattttcaaatttatcgaagcaagaacaagaggaagtttgtcgtacgaaaaaacataactcaaaaaggtttaaatgaagtgaagataagctgaaagaaagaaggaaagaacaactcatatgaaaaaaggtcaaagagtaaaatgataaagactataaaggagtcttcctctcctccaaaggaaaatatttaaatgacctcaatcaaaaatgactcacctaaaccccctcaaagaatattacagacgaaagctggtttattatccactcaaacctataaaacaaaacaaaacaaggaaacattccgacagaattccgcggtcacagtcttctagtaagcgaataccaccatggcagattgcgctactatgagatttcaattacttatatggatacttgttttcccaaaggtcttagtagcctgccatcggtggcattccatatggaggcattggaggcattcctgacattcctggcattccacccatttgtggtggtggaccatacccgccacctcccattcctggcatcggtggtgcgggtagagccagtggtaataattgggcgtacatgttctatttgagaaagagaaaaaaacgagcataaggttgtatattgatttgttttttttaaacattttaccgtatgatgtctgagtgtagtacctgttgtgacatgacatccttctcttcctgttctttggccttcacctctttttgtgcctccagcttgtccttgattagctcatccactttgccggagtattctcggataaactgtgaagaaaaaatgacgggatcaaagagagttgatcatagcgtcagtatggttcctatctcatcaggtagagggtattttagggattggaggataaattacctggaggagatacgggaaggcaaagtcgatcatattgttg

SEQ ID NO: 7411 - DNA, 1551 bp, Arabidopsis thaliana landsberg
aagccagtccattattaaaaaaaaaacaattagaccgggtgttttgtttttgcaagaaaatgaaacctgtattatagatttataggccatagccatgtgggaaacaaatcgccgactgatgacaaatttttatggtaatgattggtgtaaccatatcataacaatgataagctgataatcataaattcattatcaccatcaattttttttgttttaaatcaccaccatcaagtttcttcttgataaaactacaattataaaagtctaaactgacgtttttttattaacttattaagtaaagagtataacatttgttacttctttttttttccccgggaaacaatcaatatttacaaatatgtccctatctctacgttattttttcaccgtggaaatttcgaaaagaaaaacaaaacctattgggcttttaattgctttttcctcttccgaccaactcttttatcggcccacgagcccatttgaactataacttcatcttccactctccttgcttctctctcccatactaaacgctgcgttttacggtcactgaatttctccaacacccaatccctaagcccaatatcgctcacctcacagaatctctcagcccaatcagacggttcaacgggtcgggtccctaaaccaggtgcccgatctttcgacccgacattctcttcgttttgccaatccgccacataagtcgctactctccttttaaacttctccttaaaaatatcccaaacctgatatttataatggttaattaccatcgtactcttatccacgtcaccaaacgcgaattcttcttttaagtgaaaatgatgcacgacgtttatcagcgtcgtgtttagcgattccggtctaattatgcttttgtgtctctccggtaacgccatacgacatgtgtacgccgttgtgactccgctgcgcggtggatctctaagtcctgacggtccaaaactgtgacacggcgttcgaatttcaccgatctcgccggacgatgatagtgttgtcatgtgatttctgattacgttggttagtgtttgaccagaggggatgtagaagaactcgtcgacgtcaataaacgcgacccaatcgcaatcgctttttgctcgaatcgcgcaatttgcgaatcctgcttcctgagttttgatccacggccaaaaatgtctcgagatgttgtaaccgcgtttttctagattcttgatctcggaaacaacgtcgtcgtcgctgttgttgtcgtagatgaaccaccgttgaacgccgattccggcgtgatacatcacccattctcgtaaaacgtttgctgcgtttcgcgtcatggtgcaaacacacgtttcaaacgttttcgagactttgatccgacccggacgtttaattgggtgagctacagtaggaagcatcccacttcctttgatcctcacagaaactttcaccggttgagattgggcctttattgtgccgtctaatactgtcagtggcgttttacaacgtacgatctcttgggccgcagagatagcttgtgctctaagcacaagtttgggcttt

SEQ ID NO: 7412 - DNA, 862 bp, Arabidopsis thaliana landsberg
aagcggcccgtgggcctgttaaagtctcggttagaatcatttgtggaaccggaatgcttccttctatcgctcagccggttcggatcattaacccgccgcgaaagaaaccctttcaaatgtgcgtttgcaccatgacccgaaacgcagccgcggttttgagagagtgggtgatgtatcacgccggaattggcgttcaacggtggttcatctatgacaacaacagcgacgacgatatcatcgccgagatcgagaatctcgaaagacgtggttacaacatctctagacatttctggccgtggattaaaactcaggaagccggattctctaattgcgcgatccgtgcaaagagcgattgcgattggattgcgtttatcgacgtcgacgagttcttctacatcccatccggtgaaactctaacttccgtcatcagaaattacacaaccaccgactcaatcggtgaaattcgaacaccttgccacagtttcgggccatcgggtttgagatctcggcctcggagtggagtcacgtcgggatacacttgccgtgtggtgttaccggagagacacaagagcataatccggccggaagcgatgaacgcgacgctgataaacgttgttcaccattttcacctcagagatggattcacgtttgctgacatggataaggatataatggtaatcaaccactacaagtatcaggtgtgggaggttttcaaagagaagttttatcggcgagtcgcgacgtacgtagcggattggcaaaacgaagagaatgtcgggtcaagagatcgagcacccggtttaggaacccgacccggttgaaccatctgattgggctgagagattctgtgaggctaatgata

SEQ ID NO: 7413 - DNA, 1506 bp, Arabidopsis thaliana landsberg
aacagtaagcattatgttccatgaatttttcagacaagacaataccaagttcactttctgtcccataagaatcagtcaacatcactagggactggacttcagaatcaagctcatctagactattaaaattctttgaatgtccttgggaaccaatcccattgtccacggagtccataaacttattgaaatcaaaggtataagtgatatctctttccatgaaagataaactatcaaatctatcggtaaagtaatcttcatagcttttacgcacttcagaaagacgcatgatatcaacatgaagtacataaaggaggggtgccaaaagctcgtgcattcctgcaaaaagatgagaaaaagcacatgatacaaaagcaattgaactcttagcagaaagtacttgttaagagaattagcatgtatcagcaagctcatttctatagccatttcactaatcaaatagtatgtaatttcttctttgtgtttgccttcacttgtagttgaaaaagcaagaaacaacaaggatgagacagaccaataaattgcagctaacagtaacaacaaagaaaggtgccaaacatgtaccttgcctatacccatactcaggatgcttaaggcaccacaacaataaaatgcgtcttagcatgccttggtatctcggcgtttgaaaataacaccagtgttctggatataacctcgacaagtcttgatcaagtgttttctccaactcagcgttacgaaagaattgaccccatgtgctatctgcgtagaaatgattactcaaagtctcaagacatcactaaggaagcacaaacatcatagaaagacgttgatcatacatgtaacctcaatacttataactgccttaaactagacaaataagcttaaacacataggaactaacaatttaacttttaagttttcgaactacatgtgttgaacaatgattaagaatttaagacctccaattagccaaacaaacatatctgaccactctagagacaatatatatgctttgcagatgagctcattcaaatagcagttgatattgatgaaattagatatgctatgaacaaaggaaacaaaagcttactcggattttgcgacaaagggttgtcaatgataaaattcggggaactatcttcatgtttgagtacatgtggatccatcaaaagtcttctcctgagaagagcatatctacataacgaaacattgcactacacattattgataaagaaccattgatcattaacaaccatgttttttgatatgaggtttagggttttatgaacacacttccacaaaaagaggaaaatttaccaaaattcagaaatgtttaccttcggcgagaattggctgctgctctgcgaaattcatcgattgaagaagccaaagacggaagaactccgagattcacacgccaacgaactcctcttagattagcgaaacgacgatcttctctactcaaaaccaatgatcccgacggttcttgcaaagctggttcgatcc

SEQ ID NO: 7414 - DNA, 566 bp, Arabidopsis thaliana landsberg
acatcatcactccacattgccacaattgttcatcatctctccttatctctctactgcagcataagaggtaaatggttataacttatagtagctaaaactgtttactttcaaatgattttgaacttttcttctcaagtgggcaatgattcaaatatactatactgactaagaaacaatatctctagattcgaatagctacacgatggccctaatggtgaacgctaaaggtggaaatggagggaaagaatgggatgatgggtttgattatgagggtgtaacaaagatacatgtccgagctggttctgaaggcattcagttcatcaagtttgactatgtcaaggttggaaaaactattgatggaccaatccatggtgtttctggccttggtatgacacaaacggtatgtgatgtgtcttaactttatatatcttaactaggaatgtggtagtgtagtgggtacagcccccgcttagaggcagtgatagagcattggttccacatgtattttccaatttttctaaggggataagatcctaatttttttttttaatatttttgaaataaag

SEQ ID NO: 7415 - DNA, 857 bp, Arabidopsis thaliana landsberg
cgatgtacattatatgtgagaccattataagtttagacattcgaaattaaccacgagaaaagaagaaattactttttatgtttcataaaaaagtcattatacctattttacataaatcttttaaaatatataaaattatgttatacatttcgttaatgcaataaaacagtttttttttctctaattaataagctgaaaattgaataaatgattaaaaaaattgcattaagaaaacaaaatgacgctttatgtaaaacaaaaataaaattttatatttctcctcgcagactaaaagtcgtattaataaattcatttttagataactaaataaatataaaactgtgtataaaagggcaccttaactacctgattatacatcatcactccacattgccacatttgattcttcagctctcattatccctctatcgcagcataataggtattattcgttatagtagttaaaacagtttacttttaacccaagtaacatatgcctactttgatactagaaatgattctgattttttttttcccaagtgagtaacgattcaaactaattaatgactagattcgaatagctactacgtacgagatggcactaatggtgaaagctgaaggtggaaatggagggaagcgatgggatgatggattcgattatgagggtgtaacaaagatatatgtacgaggaggtcttgaaggcattcagttcatcaagtttgactatgtcaaagatggtaaaactattactggaccaattcatggtgtctctggacgtggattgacacacacggtacatatgtaatgtgtcattaataactttatatatctaattttacaatccgttttctataata

SEQ ID NO: 7416 - DNA, 1966 bp, Arabidopsis thaliana landsberg
attccagttccaggtttttaaaacttcaaaacaatacccttggttaatttttttattaatcggtcaatgggacctcaggcaaaaaatcaaaaggcgggattaaaaagcggccataaataatggttgtgtgtgatagtgtaataaatttccccatatgctactatataagaattaatgggattgccttttcgacacgattaaacacgaaggacacgagagtcaacagcagccgtccaagtatatacgatcggcggctcaaaattgatagtaagaatttagataaaaaggggtccaaagccaactagaaaattaaagagagcaagtatacaacgtattgaaacaacactcttggcatcttttaatttatgtgatgttgtccccaacttgacacaatctcttactcttcataattcaatacatatttaatacttcaatcaattacactcctcacgtccaagttttttcttttttgagtttcttggaactgatgataataatagctgttgtcgtctcaataatcctattatcagttttcgttacaacaaattcgttaagaaatttgtacataactttcaatctttagtcatttcatcaaccaacaaaaataaaataacaaatctaacgttctcaatgaagccagcaacctgcagcagactctagtctatacatgatcgcattgcctatacaagaagttagttcccgaagtgcacccactttccaaaacgctcttggtttggcggttttgtaccgcctttttatggggttttattgatgattctgttcctcattggtgtttgctatgccttactctgtcaaaaaaaatacacacaggttcttcatttttggtcaatctggtgaaaacttggtctctcattcagctgtgaaatagctgtcgtagacgcatagattatcaaacgcttcaaagtttgttttcaacccgagaaattggttcccgattcgagcacaacccgcatcaggccatctacacgttccttctcttgtacgcaacggacacactgcttcacacacagtttgttcagtaaccgatgagatagattctgagacatctgttgtgttgtcctcggattgtttttggggaattgagtgtgaacatttctgaggcccgtcttctacttcaactgtgcaatctccgtttcttgtgaatttaactttgcagccgagtgactgcacagctcgtgatatgactgcacgctcttttgtagccctctttgctgattctctagctgcacggcttatatctctctcgttcagtaactcttcgttcaatgactccattgcagaagataactcatctacctttctctctgcttcttctttttcctgttcaaattttttcgacccgacacaagaaacaatcagaggccaagcatgttaattgactagaatgtccagtcaaatataaacttttaagaaaaaaatattttgcaaggataggtcaccttcttcatttctgaatacttaacagtcatggctctacattggtcttcggtttctgtgacgttcggctccacagggcaggcccaccggagatggaactggggccagagagttggggctagagctgctgcaggaggtaataatgggccatcatatcttgaaggatcataaaatgggttacagtggacatgagaagttccactggaggaacgcaaatcagccaagtaggcccaaatgcatccacaggtttcagaaatcccacattgctgcctctctttttcactgcaatttatcaagaaagtgttaatatatatactaaagtgattcatggtcacttcctgcacgacctaggaactttcaattatacaaagttgctccaactcacccagaaacaattatcttacatatgatgaatttttgactatacaaactaaactacagaaaaagaaagttttaactgagagttacctattgcacaaaaagttccaaacgacacgaaagcagcagt

SEQ ID NO: 7417 - DNA, 1374 bp, Arabidopsis thaliana landsberg
cgtaccaacccatttaatctcctgctttttctagcaattttctcatatgtatctttaaatgttaatagcttataacgttaaattcacatttctcttgtgatgtataacgacttgctaaatattattgagtagtcatttgataaaattaccattttggtcactgatttcatcgtcttcgtcatcatcttcatcgtctttaaaagggcattctaagatcgatactggactgagttgttctttctcttcattcacacattcctaaagaatatcgcaattaatcaaatatgagaaatcatatctgtttaacatgtgatcaacaccgcaaagaataactaaactaaaagtggtctcaacaagaacgatatgagaaataatagcgatactaataagttgacaaaagtcaaccaaccccatgacaacatcatttatctatctacctgtttctgcccctatctaattaatgatcgtatcctcacttttgttttgattgagattatgtggggttacttaattaattatttgagaatatttcttatacaaatccaagaataaaaataaccaacgatttcattactttagtacaaatttcatgaacatgggtgataatataaaattaactcttaattataatgttaaaagtactactacgtataaatgtgtgaagatctgcgtatctaataatatatatgtaaattatatttaaatgtgtacgataatttttcatcgtctgtaaaataatttggtacgtgaagtaccatgaactctcgcgggatcatgtgccgtataatacgcattagaagctacgtcgaagaatcttaattataacccattaaactctaaatcccacacctcacgtgactcgcacgctttccccgacaagtttcaaaatctcctcaatttttaatatacgaaaagacaaaaccaaatgctttcaacacttgtgacagttgtaataaagattgaaaacgagcttttaactaactaacctttctgttacacaggctgttgttgcggttgacagatgatccgtcaccgtcatgtgcctttaaactatctccgctctccttcccgtcttccacggcgtcgatctcgctggaaacttcctccgattcaccactcgacgaagaagagaacgatgaggaagaagactgtacaacctccgatgatgagtttgtgaaaaactcgctaccggaactcgatgactcaccggagataaactcctccacgacagtgatcgcagcggctgaggttgaaaatgttattttgtcgtcggtggtggagatttgagaaaacagatcggattgttgatctaacctctcttcgtacgcgacggatctccaccattggatctctccgtctccatctgcccttaga

SEQ ID NO: 7418 - DNA, 1873 bp, Arabidopsis thaliana landsberg
ataaaagattcacaaactgaaactagagactgcaacacgaatttagacaaggtcttttaccctagtaacctagtctaaccaagaattcaaaggacaatctttatttctctagttgtaattagcttcaggaagcaagagagttctaaactcgaatttaatttgtgaacataaagaggagtaacagagattaaaacagagcaactcatttagggaaaaaaaaacttataaaggtgataaaatctaacctcatcttcagctgcgctatgatacttatatacaagcttcaagaactcaaacttccgggagagctccaccgccagatccccactaaaggaatcggcttcagcagcgtcagtagcgaaacgccggagctccaccagctgagcacggaaagccttgtggcagtaaacgaagaaaagaaccggagcatcagaaagcttggtatttccaacggtcaccgcataagatgcagaaacggaagcgttttccggcggaagggaatgaagatttccgcctcccatccaccgcaacaacaataacggtgactgaaatcaaaaatttcgtcgtcgtgaagcgaaaggagaaaagggaaagaagaaggaaccgattaaaggagtagagaaggtttttaaaggcatgatacattttcgtagtcgtcactcttctgcgtaagccagtttgtttaatcaatttgagattttgagttttattatattagaagtgactgagacgttgcagctgaaaaccaactatagcttatatcatatttatggcgggatgtatatttaaatatctgttttgtctctgtttctttggtaactaactaatttgttttcatttatattatttttaaaagaaatttagattgtgaaaatatgaacagagataaattaaattaatctaacaagaatggagataatatattagatcatttacaattgttaaacattatttttttatgagaggaaaaaaagaatcaatattttggttgttgtcaagtattcaagattacttctccaacgtcgttgaccatagtataatgcatgaaaaaacattaattagtgatccgactaactaaataatcacattacatgattttgtagtattgagtttgttaatagttttgtaattgagtaacattgaaaaatctcgtgatttgcgggagattagctgagtcagcctcgtgattataaaaccattggtcgagagagtggcgtgaccttggccggccgtacagttttctcaatactccttgaccagtcaacgttgactccgttagtttaatccgttaattaacctcgttccgtcttctctcttccacaagccgtcttgtggctgtcgtgtgctctccatctgactccacgtgtcattccagttaattgggctcacaaaatcaatactacgagttctataactaatgagcccataccaatttttccagcccattaaggtttaaatagtttttccaaaatcaatctgtttgaataaagaaaaaaagaaaaaaaagttttgtgatcgtgtcgcttcgtcgtccttgagcaggggaaaaagctctggctttctctttttttccggcgaggaaggtggtgataattggcggcgatggagatactaagaacgaaatgggtggctatgacagctagtatatggatacaatgcgcaagcggcgcttcctacaccttcggaatctattccgctgtcctaaaatcgactcaatcgtacgatcaatccaccctcgataccgtctcagtcttcaaggacatcggagcaaacgccggagttttctctgggattttatacacatacgctacgtccaatcgtctccgtggacggggaggaggaattggaggcgctggaggaccttgggtggtgc

SEQ ID NO: 7419 - DNA, 433 bp, Arabidopsis thaliana landsberg
attacgtattttttacaagacgatgtaaatgttgtatcaaaagatttacatctgaaaataacaaaaatacggtaaaccaagtagcgatttaaaatcataaaaagcgataaggtaaagattggtctgaaatcacaatgccactattatgaatgaagatgaagccaccttatttaaatgttggatgtctaagtgttttgaaaaaaaaaacttaatattttcatataatttttttaagtacagttaaacattagatattgcaattataacacaaaaaaaaaagaattatcaaaaaaatatcaaatatacttttttccaaatgaaatacaatagagatattagtcaaattttcaacatttatcttcaactgttatgaatataaaaatttgacctctataaaaacataatatataaatgggggaatgaagatgaggaa

SEQ ID NO: 7420 - DNA, 3565 bp, Arabidopsis thaliana landsberg
tactcagcttaaattctgtatatcgtcatatttttgggtgaaaagatacttcctaaagccagttacgattcttctgctaatagtcaattgcaaatgtattttcactactgctgttctttattgctttaaagcaagcttattgatgaatcatgtgggttgataagtccatttcatagttttggggtaaatttataactttctcaccttaccgaacgatagtgaaaacaaatacatagcacaatgattacaataatcatgtgttgtgattacaatttacaaatttacaagaatcatatcaaataagatttttttaaaatttacaaatgtgagctcaagacttttaagtgttaaagataagttaagggctgaaaactaaaacatgtaggaataagaggactgtttggtaaacgttttaacgtttaaagtcttgccttttgatatcagatttttctcaggttcccacgcgccgccgcgaaacagctagacggagaaatccaaaattcggcgaaggtttgagaagagagaaatctgagagatgcaaggagtgtggagccaactatggaggaaatatgctgattataagtacaataagttcgagagatttgctgtttgggaaatgatcgaaccttaccgtcgaccaaaaaccttcacaactttgattactatctatgtcgccgccttttacaccggcgtcatcggcgctgcagttacagagcagctctacaaggtcagcttcgtattgttatcgattcaggcccggaattgttattagatttgtgggttctaatttgattctcgtgattggtaaatgttagggttcgaaatgtgataaaattggaaatgattcattgttgattactaataaaggattgtgtgatcatgaaaagaactatacttgaattgcttttcatgggaatggttcattaggtctttcaatgaagcttttacgtcttgattagtatctaatctaattcattgttctgtagtatattgtattctttgtcaatgtgtttcttacactgttttgtgttagtatcagttatgtttcttgtttgagtgtgaactttatgttactccactctctgtaaacaggagaagttttgggaagagcacccagggaaaacagtgcctctgatgaagccagtattctatcgaggaccatggagagtttatcgtggtgaggctattgcttcagatgctagcagccagtgaagctaacgattaggctatcagagactatggtgaaggatgtatctccgactttgatacgcagatataaatggatttatactggttcactagtatatgtatatcaaaaaacttcttttggttcagtagaatgtttgtgtctgtatttcgagtctaatgactctcttaagaatctattttctagaaattacatgtaatgacagtctcgttatagtataaggatttgatttgagaagtttaagggtatccattcattcctttgaatatctctgcttgtatctgcctctcttctggtgtcctgaaataaaacattcccaaataagatagatgatctaactacctcagaaacattgagccaacacagatttttctcttcaaattaggttgcttcacattctttagtccatatagattcctctggggacgtactctgtttctttccttcctttttttttttgtttgttgcttgtgaaagaatatgacaacctatggcactataccatcccaagaaaatgcttcgtcgagcctgagcttattaggacgagccaaagaattgatctcgttaggtcttagctctcaaaggccatggcttgaacttgtccaatgtagtgcctttagccttcctatctcctttagcgttgccactgaacgaatcaaatccaacatcatgatctttcgaaccaactacattgttatcttcattgttagtatcttcatcagcatgctttggcaacccgtccacctttccgtctttgttatcttgatagtagcatggctatatgtctactcccgtgataatgaaccatgggtaatatttggcagtgtgatcgatgattctactttggtgctggttttgttggtcctcacgatcggtatatttctactaacagatgtatcccgcggtattgtgatcggggttttggctggtttgcccgttgttctggttcatggcatgtgtaggaggaatacagagatgttgttcgtcttggaagatgatgaagagaaagtggcaatgaacacatcatcttcgtcactttcttcttcctcttaagtcttcacaattgagcacaggattttcagtttttctttcctgaatttgtctacatagttcaaaacaacgcatatccagtgaaggaacgttaacatgctgcaaaaagaacttgagctcttttgcgatcaaaattcaggatgtggatattgatgtactgatgcatgtgtgagaccttggtgacaaataaaaggcaattttgcgtgctgattaaaaacattatcctatgatagaattcctatctaattatctccaacaagccaatacaataacgaagacaagtgtgatcctcttctcagttatcacttattacaaattatccaatcgattctctcattttcaacaattacgaattgaaaggttgtaactttatatgaacaatgatctagtttttaattttatcacaacaattatcaagttcaaatgcaatagggatttggttatatataccattttactttttagacacgacatgaagaagtagttagaccatctccaacaaagagaaccccaaaaaattctcaaataaaaaaaatattaatattttactataatttgattatacaattaaatttttattttagtaaaaaaattagataattgtaaaagagataagtgtttaaaaggaactctcttaaatatctgaggtggtttagacgtctcgctaatatcaaccggcctagtcccagagtgaatacaatatttttacatttggtaaatgttaagcaaaaccaactaagacttattcctaataaatatatttaatttatttatttcaaagagataattacataggtttatattgtctatgaagaattcttttgtttataattttattaatatgttatagtgttctagaattaccaaaatataaagtttgttaatcatgtttaatttaaagcaaaaaaaagaagataaaacataagcaaaacataagaaaaacaaaagcaaactacaagcaaaatatatataaattttcaagatttctccttattcctccaaactctatgcattttaaaatagttggtttgaggatgtattgtttattatttcgttattatcatgctttatatatatttttgaactttttggatcaaaaataacaaatctaactattttgacaataattttaaatatgatcatttaatatcctcaaattttacaaaaaagctgatcgaaaaaagtagtccaatcgatattaccgttatttttctcttaaaagtttttgttttttttagggtttcagattttggtttgacccggtctacagcagagggcaacgaatcaatcatgacaaagtctatgcct

SEQ ID NO: 7421 - DNA, 2010 bp, Arabidopsis thaliana landsberg
  unsure (1)..(2010): unsure at all n locations
tggggggtttatggacgagcattttgtatttttgtggacagtaaataatagcgaagaagttggcgttgattgaggcaggcataaaggaaaagatggaatgaataatgaagttggctttggtccatattgtagaacccaaagcctaataaccgtacactaagcccttacatacatgaaacgctgaattgtcattggtagaaaaggaaatggaagagtagtagtaaggaattatatcagttaataagagttgtaatgtgaatagaacacgtaactggactagtatgcatgtgtatgagaagttcaaatctttaactctcacaatatcgtcgaagacaattgtttaggataagatagaaactaaatgagcatataaaatttaaagaaaaaagggaactgtagagttgccttggcaggaggggaaagcattatcatgaagaatctggtctacaagaatgggaaatggacagatgtatctgttcaccaccaatccatcttcataactcaagtggtccctttctctcgacccatccacgtctccttcatcacaagtaagaccaaattaagccaccatttggtgtctgtcatcttctctttaatgctctcttttgttctttctttataaacacaacaagacatgaaaggtttttgggaacttgtctgagnnnnnnnnnnnnnnnnnnnnnnntctgatccccaacccgaacttacgtctacatgtacctctcatagttgcggctggaagccttactctcattccaatgactttgctgccaacgcgttcctccttctcatcatcctcttctgttctttcatatgcgtcctctctctccacgctgctatccgttgttgcctccgtccagtcctccaacatgtccctaagcccgacccggaccttgaggccacccatccagacgctcccccgacacttgtctactccccgggcctaaacctagcaggcaatgaagcagagtgcatcatttgtttgtctgaattccaagacggtgacaccttacgcgtgttggagagatgcaaacatggattccacgtttattgcatccagaagtggctctcctcatcccattcttcttgtcccacttgccggacaaacatcttctcctccccacctcaacttcactcacaaagcttaccactaacgagtacaccttagtcagatggtagctagttcctggtcttgcccactttttttttatctttattttctttacaacttcacaccactatcatgttttacaagttagtttattttttacctttctccttttatattccatgaaatttgcacagtctaaaattgatatgaagtcacttttgtgaatcatcatttacaacgtataacaaacaaagaccaatgtgtaacgaagcaataacaatacctcataatatagagggaccaaaggctttatttaatgtcggagttcaagatatatgaggtcttgactggtgttaggtacgttcccacttgttggataagataaagaaaagagttgttactagataagataatggataaatatagaggatgagaaaaaaaaatagaagtggaatgacgacgactcacattacgagcattaactccattgcccattggcatggaatgattctagctagcagtaggagaaaattccaagtgcgtgcaaagttcttcaatgaattcctagaccccctaaccagagtcatggatgcaatactggaaaggcaagactatgctcgctgcatattttcaggttgctgacatgttcaagctcaaaaacacaatcaagcgatgaagttagaggagaagatgattgaacaactttgatctggtctcaaaggtcaaagccatgcaatatctcctagtatgtactacattgttctagatagcctaatgatgcacatcgtgagttatgttaaagaggctatttttagaaaaagttaatacagntctggacaaaaagttcagggtaatgataaataagagagaaaaaaggtaggagatgttattattcacaa

SEQ ID NO: 7422 - DNA, 1870 bp, Arabidopsis thaliana landsberg
tgaagacgatgaaagggttgacaacatggtgaagatggcaaaggaaggcaagtcgttttctaatgaaatgttttgtggcggttgtattccgaccgatataattgttgcgtcaaaaaaacaaaagagaggtgggaaaaccaaggtagttcgtggaaggaaagcccaatccaatgcgagactagccactagcatgaggagaaagaatcatgttcccatcagggagaaaggcgaaagctctagcggggtatattttggtgctttgtctcgtatgattgatgaaaaattgaaggcgcaatctgagaagattctcaaaggcgtgattcactggtttactaaaaatttggttgttgatcccgataatccgaaaggtcctccttctggggaacccggttcttaagctgacaaagaagccgcagacggagatcacggtcctcatgctgacaaggaagttgcgtcgggggataacggtcttcaagctgacaaggaaactggcggagaagagcaaaactccaatcctgtttcatctccggagtctgccaacgaatacgaggagtcggattttaaccccatccctccgccgaggcaaccctcacccatgcaaactgattttacccttccatctttccagggtgaccaagcaatatcagcagtagatgatgttgtttctttctacaactcggttgatgttccgactgatccgtctggcggcgcctccaatacgaataagacgaacaaagtgcaggttagcgagtaacgaccttacctcgttattatttgtcttagcgagaataggggaggtaacgaagttgtttaaattgtcttgtttctcttattattcacgatatcagtcgggcgaggaagacgttggtgttcagccggaaaaaaatgggaaccaataggtatatttgttatagactaacgtttatagtgcgctaattatttatgtatctggtactttagtttatagtttattaactttttttatcaatttactgttgctatgtaggccgacgttgatatggtcgatgatcttaacgcaggcagggctcaccaggtaaatgctttttttgtactttaaagttagtcgctaagtcgcttagaacaattgtaataattctattaacgtaaaataaactttttatccgttaacaatttgtttatttaattccattttcgatataattgttacactataacctgtagaccgcgacaattataaatgtatctggtaattaagttattaactacttaacgtttttaacatgttttggctttgtaggccgacgttgagatggtcgatgatattaatgcggcaatggttgaacaagtacatgcttgtcgtgcactatatagttattcccttagttcgattacattgtttgtaactaagttgttgtcgtataatacaataggtatccgataacaatttcagttctttttatgaccttttttcgacattacgcatggctgttcactaatgtatattttgtccaggatctcaacatgccgtctgatggtgtggcccaccccagttcctccacagttagccctccgaagtctgttacaacagaggtttgtttgctaatgctaattgtatccagacttatgtttttaaatatttataattcatcaccagttattgtgtcgtgtttgttttcaattcagaatactgctctcggacccgatgttgcccctgatccattaaaccccgtcgctccgttggatcccctaccatctgtcgttgttgtcgctacatcagttgttgcacccaaccctcctaaggtagatgggggatttttaaatatcttatatttaattgataaattcttccttatccaccaattgtgtatgtatacggtatttttttagg

SEQ ID NO: 7423 - DNA, 717 bp, Arabidopsis thaliana landsberg
  unsure (1)..(717): unsure at all n locations
cgtattttatgataaaagcatgttagtgtattgaattgtttcctctctatctgttcacaggtttattatcatttttacatcatttttattgattgctatatgtttatgggggaaaaagggcgtttttcaacccggacgatttacaaagtgcggtttttataccttaacaaatacatagtgccgttttcaacctcaactttaaaataattcgaataaattaactacctagactattaaatttgagcaaaaacttcattgacttaaacacaatcagtcaaccatttattttcactcactttatacaatgacaacgagaagtaacaccgttttggttatttgagtccataaactcaatacagtgacaatgaagtgtcgttttatctctacaagtgatattttgtcttaattaaatataatcgttttgttgagtttttggactaaaataaccaaaacagcgtcgttcagttcagtttatggattcaaatgaccaaaacgatattatttgattaagataaaaggatgtctcgttgccaacatatcgtttaagtgagtaaaacaaaatagttggcaaattgtttttaagtcaatctagttttctgcccaaatttaatagtttaggtagtttattcaaattgtttcagaagtgagattgaaaacgagactgtatatttattgaggtatanaagcgtactttgtaattaaagtgaaaatgctctt

SEQ ID NO: 7424 - DNA, 993 bp, Arabidopsis thaliana landsberg
tgttataagtttagtcgatgcggcttttaaggtttttaggggaggaggagctcataacggttgccatagaaatgaggtttcttacactcagcttatatatggtctatttgaagcaaagaagatcgatgaagctttgagcttattggtgaaaatgaaagatgacaattgttgtcctaatgttcgaacatacacagtgcttatagatgctttgtgtggatcaggacagaagtcagaagctatgaatttgtttaagcagatgtcagagagtggcattaagcctgatgattgtatgtatactgtgcttattcagagattttgtagtggagatacacttgatgaagcaagtggattgctagaacatatgttggagaatgggttgatgccaaatgttattacatacaatgcatcgatcaaaggtttttgtaagaagaatgtgcacaaagcaatgggactgcttagtaagatgctagagcagaatttggttccagacttgataacttataatacattgatcgctggacagtgtagctctggtaatttagatagtgcatatagattgcttagtttgatggaagaaagtggattggttccaaaccagcgtacagtatgaggaatatcgttaagtgagaagatttgtaatggtcttcttagatgttactacaagctgcaaaagtatgaggaagctgcaaaagttgtggaagatatgatatgtaatggtcattcaccacaactagagttttgcaaaatgttgatttgcaagctgtgtgaagaaggagaaaaagagagagtcaactcggttttcgaaaaactgcttcgatgtggatattgcgatgatgaaatcgcttggaaaatcctcattgatggtgtgcttaaacagggctttgtagaggggttttgtgagttgttccaagtaatggaaacaagtggctgcaaatttagctctcatacacgatcgatgcttagtaaaggtcttcaagggaaagattgattaca

SEQ ID NO: 7425 - DNA, 1777 bp, Arabidopsis thaliana landsberg
  unsure (1)..(1777): unsure at all n locations
tgtaaccgttgtagcaattttgaaaatggtataaatacttcatactaacaaaaaaaaaattactaagaagagacaagttataagatatcggtgttgagatatatcgtttatactaataatggtaatagttgtagtattcttttgaaagatcttaaataccattgtgtttttatcacgctttggcatgtaaatatattttttacggttgtggtacaaagttaccaatcaaaagtcaaaaccaaatttttctttcagttaatctgttgtggatatacagttatccaaattgggtacgcataaactcattacgagttactaattactatattgaaacctaactgaaatctaaccaaaattgaaccgaactaggcaaaaaaaaacgtttcaattgattatgaattttcaaaaactcaagaccgacttaaaagaaactgaaataatcaatccgaataattgaataaataccccaccctactaatgaatcatccttactatacacagcaatctcacacactgaatatgagaatgaatgtaaaaaatgatctttacaaacatagctaccaaatccaaccaccaaactttagcattggaaatgccttcgccgcgcaaatgcgttttacgtataaagcgggcatccttcaacaataataccaggcgcggttggacaagaggccaaaggacaaccatcaagctcatttccccaccaatccaaactcacattctcaagtcccaaacacatataaagcaacacacccataaatgctaatccagcatccaatgctcctgacaaaacataattatacctctgccatagatttggcctgtacctaaacacaacaaatccggataagaatccagcaagaacccatgttgtgtagttcacggctgttgcgggcggcatcgagcttgtcgcgcttataagaaccggcatgtttataagcttgatccactcttgtctaggaaacatccttgaagctaaccatacaagaataggggctatagcgcccacaaggaagaaccaattaacggatttgtataaaccaagatctccaaagattctacgaggtccaataagtccccatatcaccgatgcatcataaaagactttatccgatggacatgtccaaaccgagttagtaaccgaatcacatatgttggggatggtctccattagccaccaagccgttgtgaggtaaacaaaacatgagatgagtgttccaacaatctgaaaccaataaatcatgaacaaattataactaacaataataacattaagagagtcgtataaactagttgacattaaaatagagattgtataacctgtgccatgaacatggttctaggtggtatcttcatgtagtgaccaagcttaaagtcttgaagaaacgtgatggcttgttgcatgcttatgtatccatatactttaaagcacatatttgcaactggatatcctggatagatatatcctatgatatattctgtaataatgttcaatcctggcgcctacaaaaacattaaacatacttttaatatgaatttgcactaaatctccaaataatttgagacaaattatataggtattcaatttagatatggttttttacctgnnnnnnnnnnnnnnnnnnnnnaccgataggaagtgtaaagataatggcgacggtacatgccaatagaacaccccaccatggtaattgaagttggtcattgtaatactcacaagcaaagattgtggctccaacgttggtaacgagtatgcaccaaaaccaccactctggaa

SEQ ID NO: 7426 - DNA, 1606 bp, Arabidopsis thaliana landsberg
atcagcaacagccttggatctctcatactcagtgcagaagaacctctcattatgaactttatctcaagaccagatcaaaatcagaatcaaacattacaaagcaaaattttgaaatttaaaagtatcatacttgattctcattagcaacagatccatcggtagatccaagagcgaagaaggaagaagtgtagataatcttctgcacggtcttcgtctcctttacagcttccaagacattcttcagtccaccaacgttgacgtgagcttcaaatatcaccataacacatgatctctccaattttgaccttaaaactaaagatgtggaaccaaaagaaagcttactgagatgaatcgagatgggtcaggaagccaaggctcaactaaagctgcggcgtggaaaacgatatcgcaaccggagcaagcatccgttagagaacggtaatccgttacgtctccataggcgagctcaacttctggaggtaagtcagagagatcgctggtgcggcggaccaatgcacgtacggagtggccacgacggaggagaacgtggcagagtcgtgcgcctaagtaaccagtagagccggtgactaatattttcatattttctgtttctgtgttgggcatctttgggcccatcgttgcttttctaagccaagaaacctctaactggttgagagggtttaattaattaatatttaatacaaacatcattgtctgaaagctggatcaaccaatagcaagattcttttgtgttttgttttgtcacatactacagataacaaagaactagtaagtttctcatttgagtgaaacaaaatttcaaattacagacagatccacgaaaatacaagatgacataatgagtaaagaaatctcaattcggtgatagctagttcgaaacaagattagagcacgaaccttgaaacaagattacacctctcctctgtatccatcagagccaaaatggtctttcctagaactagatatagctacactcttctgatgttcaaattttggacactgtagaatccgatgcccgagaccaccacaataagcacaacccttgacaccgcttgcattagcaatggtttctgtttcttccattggatcattaagctcagcaaggacaggtggaatcctctgtttagcttcttgcaacaagtgtttcaaatcgagcagcgtgatttcgctttggttcttgtttataaacgtagttgctatcccagttttcccacagcgacctgttcttcctatcctatgcacgtagttctcaatctccccaggcatgtcgtagttgattacatgttgtatatcagggaaatctaaaccctttgaagcaacatcggtcgcgaccaaaacgtcttttttcccagctttgaacaaagatattgcgtaatctctgtcttcttgatcttttcctccatggatagccactgcttccactcctttcagtaacaagtactcgtgaatatcatcaacatcagctttgttctcacagaatattaaaaccggtggagtggttttctgcagacactccagaaggtaaacaatctttgcttcttgcttgacgtattcaaccctctgtatgacatcgagattcgcagct

SEQ ID NO: 7427 - DNA, 1316 bp, Arabidopsis thaliana landsberg
tctcggggacatctgcttattgtgcctgttttgttgtttctggttaacgggatagatcaataggattgtctagtgtctgttagctacttagcgcttcattgctatatatgttctttattgtgtgattctatcggattttttctctctgaataaattttccgcactggtgtttctttctgaatgcatctttcttgtctttggagtcttgagactgtgtcatttaatttcaaaatcttgagaatgttagatggcaatgatgtttaccttcctttttttcctttttttaggtacctgacactagatgaggcagataggttggttgatttgggtttcgaagatgacataagggaagtctttgaccactttaagtctcaacgtcaaacactattgttctctgccacaatgcccacaaagattcaaatctttgccagaagtgctctggtgaaacctgtgacagttaatgtaggaagagctggagctgcgaatctggatgtgatccaggaggtagaatacgtcaaacaagaagcaaagattgtttacctcctcgagtgtctacagaaaacctctccgccggttttgatattctgtgagaacaaagctgatgttgatgatattcacgagtacttgttactgaaaggagtggaagcagtggccatccatggaggaaaagatcaagaagacagagagtacgcaatctcttcgtttaaagatgggaaaaaagatgtgttggttgcgactgatgttgcttcaaagggtctagatttccctgatatacaacacgtaatcaactacgacatgccagcagagattgagaactatgtgcataggataggacgaacaggtcggtgtggtaaaactgggatagcaacgacgtttataaacaagaatcaaagcgaaaccactctgctggatttgaaacacttgttgcaagaagctaaacagaggattccacctgtccttgctgagctgaatgatccaatggaagaagcagagaccattgctaatgcaagtggtgtcaagggttgtgcctattgtggtggtcttggacatcgtatccgagactgtccaaaacttgagcaccagaagagtgtcgccatttctaactcaagaaaagattattttggctcgggtggctacagaggagacatataatcttgttttgttccctttgctagttatctcatcttagctgttaccgaactgtgatgtttgtgatgtttatcttccatatgtcacgctttttacactgagtcgagttctatcatgtcaaaatatttcttagttaatatatatggtcggattcttaactaatttgt

SEQ ID NO: 7428 - DNA, 829 bp, Arabidopsis thaliana landsberg
aagctttgaaatgaaacgccccattttccttttaactgttgatcctgaaaatgtcaagagatccacacaccattaaacaattgaatcactcttcttcttagcagaaacttacaacatttttttcacactgttcgctaaaattgctccttttagcaatgtttacatcaaatgcatctactaacacgacaatcgaaaaatccaacatttcatgatcctttgaatccacataataagagatcaggaaacaaagcaaaatctacaccccaagatacacgatcattcgacgacaatggcgagctgatctaacgaaaaactcagatcacaaaaaaaaactcagatacttgttcggatcagttcatcaagggaattttaatggaattcgaatgcagatccagaatatccgaaagaatgtaagacgatctggaaagttatagagcttacctttggagaattgaaagggatctaaaccgagagagagagaagcttccaatcagcagcacaaagacgattttgtgattgaaatatgaagaaacttcttctactactttgtgatttctgaatgtgaaagtttcactagcaccctcctatttttgtatagtatataaaaagtaccctaaagttatacattttgtttcaaattaacccctcaaatttgtatattgtaattcatgaccatcaatcaaatctttcatttgacttcatatcatcccctccaagctatgtgattttgttggattctgtcattttgcatccatttagtaaacactatcatatatgattctatgcaaattttgatatgaagaaagtcagagaacaagtataaactttt

SEQ ID NO: 7429 - DNA, 1841 bp, Arabidopsis thaliana landsberg
aggtcgcttcaaccgcctcccatctctgaaacactaccttatttgggcctagcctcttttaaattgtgcccatttacgaacattatcatctcctttagtctggctcaagcatgaagttacctcaacagccgtctctgtttcttctttcaaaatctatcaacttctcactttttttttgtcaagggtttcattattattgactttacattaatttatagagataagcattaagcatgatcgtcaaacattgaccaattagttaaatgtaaactgacattgaagatattcaattattcatcatgatcatccatcaaaattgctaaaaagccacatgagttgtttgtcgagaaacaggggaaaaaacagagagacaaaacaaaactaacctgaacttaaacaaaactccacagagaagaggaagactgagtacagaccatacttaaactgttttaactactacaagtgtgctaacggaccaaagaccaaacatatagtgactgggaaaaacaaagctactaaatcactgcatctcaactttgtaactagacccaccaacattatcagaaaaccatagtaatctacaccaattttaagagcagacagatgaaatgaggaaccgggaggataggtttttgtttttgtctttgtccttttagagctgcacttctctgtcgtgtatccaactgaaaggaatcttgggtcctttcttggctcttgcttgagctctctcatccaatctcttgatccttggagccaacccgcataaatagtcttgtgctttgtttccttcacctgaaagcccggttaagtcctggattttccacctaccaaccagaaactcaagaatgtctgcatagtctttggcggtgtaaacaccgagcctctgagccacggaagagaagttgtcaaagaggttgtcgttgcgcccatcatacatcaagtgagcaggcattgagattttctttctcatcatgtctgcaaaagccatgacagtaccatcaggatcaatctcaaagagcttttcaactatcttggtgtatgctgtttcatgacgcttctcgtctgcagctattgtgccacatatttgggctagtttgatgtccccgtgctctttggcttggcgggctgtgtttccgtgagagatgaatgtcgctctttcttggaatgacgtatagatgaagccaaggtaggggttattctctgtccgcggatcctatgaaagataagttaaagcgattaggtagttatattaaccaagaaatcatgataattgcctgaaactatctcaccattccagatccaatcaagtactgaatggtcttttcgatctgcctcatgtcaacacgaccagacaagtaaaggtatttattcagaagatcgccatgtcggttttcttctgcagtccaagctctggtccaaatagcccatgaagtaggactagcacctgtttcatccctaactccatccaaagtgttcaacatagtttgataggtcggaagtgcttcttctgtgatcatgtcccccaccaaaacaacaaagtaatcatcagggagctctctagccctctctcttaactctcttacctgatcttcaaacccatctgatgcagggtcaggcaagaaatcctggggttgccaagacttctccacatccttgaggtgaatcagaaggttctcctcggcccagttttccatagatttgaagatctcgatcttttgaggtggcatggagtgcaagacttgaacatgcacttccctgggtggcgtaaatggtttcttcaaactctcaacctccctgcattaaccagaaaataagtatcattagcatttaattatgctcca

SEQ ID NO: 7430 - DNA, 1259 bp, Arabidopsis thaliana landsberg
  unsure (1)..(1259): unsure at all n locations
gttgaatggtcacattcaaagtagggcatagtgccgttgataaagtgtcgatgcccttggtagccccaactcaatgcacgcaccatcaaaggagcacattaggaaacacacacggttttgcagcaaagagggcggaggtcttgcaaaaattctctcaaatgaagaggaaggttgcaacaagggtttcttaaatggtaagtaggtttatggaaaaagctctaggacactactagtttcatccaccaggatcaatagatggggtttgtctaatctaactattggtgataaaacagagtgagggaggcgtccataaccgatctcagcaaagttgaaacacaatagagtagggtttgacaaaataagaaatagaacagaactgggccacgtcaatttaagggtccaaaacttacagcacttcgtgggctgagggggaaacaataaagagccagcagataatgggcctagcacaaaggaatagcccaacttgaggattagggttttgtcagaagcttgctgccgccgcttcaacggaatgatcggtagctcactgacccgatttaacatcaccggaggcgaatgatcggagatggaggccatcaccggataagtggaaagagtgaatcttggctgagcagttgaaaggacagatctataaaatccggttgcatgggagcaaaggctcaccatttttttctgatgaagcgctaacagaggaccagtggctcgccacccaaaagatagatccgccgtgcggcgtcgacgtctccaccggacatggcgcatctgacggtccaagagtgagttctcctgccatcaacgaggtccgttgtgagtgctcttttgggatgagcagatctgatctagaaacaaaaggcttagcgatgataataggatttttcaagagagcttcattgctgtaaatcggtggtgtcgtgaacaggtggtgaagtgggagggcaaatgccggaccccattgccttccaccatcgcttgtcttgttgtctccagaatggaatgataagcgggctaaggtttgaaaaggttgaaatagggtttgcagaggggagaaggaagctggtagcaaaggagacataggagaaataaaatggaacctaagcaagaaaaatagaaaagctaaatcctgacgccggcgttttgcgccttcgacggcgtcgaaaaccccgcccggaaaatgtctctcgataaatgagtcagnaagctttttaatgtatatgatactatttttgcaaggttggtgg

SEQ ID NO: 7431 - DNA, 1979 bp, Arabidopsis thaliana landsberg
ggtcgactctagcaggatcccctttcgtgaataacacatagaaaaaagtattatataatatagtttttctagtattttttaattataaaaaagttagtgtcaactatctacactcttcaaacacacctcttgcacaacttttacttttgaagtgcggttctacgtgtattggtctatgtttgtcccgcacaagatgtgttgatctttttctctgatttttaatttaaaaaaggaaagaaagaaacagatctgtccctacaactgctcagccacgactcacttttttcacttatccggtgacgacatccatctctgatcattcgcctccggcgatgttaattcgggtcagtgagctaccgatcattccgttgaagcggcggcagcaagcttctcgcaaaatcctaatcctcaagttgggcccttcctctgtgctaggcccattatctgctggcccattattgttttcccctcagcccacaaaacgttttaagttttggacccttacattactgtggcccaggtctgttctatttcttattttgtcaaaccctactctattgtgtttcaactttgctgagattggttatggacgcctcccttactctgttttattaccaatagttagtttagacaaaccccatctattgatcctggtggatgaaacttgtagtgttctagagctttttccagaaacctttttaccatctaaaaaacccttgttgcaaccttccttttcatttgagagaaatttcgcaagacctccgtcctctctgatgcgaaacagtgtatatttcttaatgtgctccattgatggtgcatgcattgatttggggctatccaaggtcatcgacactttttcaacgtcactatgcctcttttggaatgagaccattcaacaatctcccggaatccttgtggatttgctttcgactcaccatactgtatgcacgtgacatgctactaccttgttcttgtctacaacgtatggacttatggtggacatatcttatctatgttattgttcaatctatcacgagaactctccttgttgtatccaaccatgaggatgatgattgtctactctttgtacttcctcttgcttgagtgaataaaagtacttttgacaaaaaaaaaggaaagaaagaaaatacagctatgaatggtgacaaaaatgaaacacaccatgcgtttttttgaaacgcctaaaacattcagtgccttaaactctaaaagttaaataaactacaaaaagataatattatttactaatttactagttttaataaacataattatttaaaatgtaggtattagtttttacagtataatcagtagaaacatgtcttagaaagttttaaatgttaaactggaattagaatgaaaattaattaaaatgcatagttttatgtaagaaaatgatagaaagtaataaggacaatgcaaccaataagaatataaatgtagataggaaaacaataaaagaaagaatatggaccatcacaacaaagaaaaagaaaagaaaaaaaattgcacgaaagggccccaaatcaattgcacaaagcacttatcgtcaaatagctaagataattagaaccgctagtaccaattagaaactattgataataagcatggggcacgtacacagttgttactaatcggtcacaaccttttttataaaaaatttgttagttaccctttttcaatttatatttgctacatggaatagaattcttaataacaagtgacgaataaaaaaaaaacactttgttctctctcatagctagtgttatgttcaaaacaaagccgtctcttttgtggggttaagaacttctctctcaaattgattgttctgagcgacgctaaaattggagatattgcattcttctctccggtgatcgtcaaaattttcaccatcttctgtttatttgttatatcaaaaattagaggaaaaaaacaaaaaatcatcatttcctacttag

SEQ ID NO: 7432 - DNA, 1480 bp, Arabidopsis thaliana landsberg
ctcctccattagcaattgttacacttccaagaagtttactaagctcttcatcgttcctcactgcaagctgaatgtgccgtggtacgatacgtgtcttcttgttatctcttgctgcatttccagctagctccaatacctaatgattatatcaacatcatataagagatcagactctagaagacaccttaacatcaaatcaaaatcaaagattcggtaaacatcgaaaaatctagtgatatatcaattacgagtgattctcatcatagagactaaaagactaaataccaaacagaagattgtttgttacctcagcggcgaggtattcgagaacggcggagagataaacgggagcaccggcaccaacacgttcggcgtatttaccggctttaaggaatctagcgattcttccaacgggaaattgaagaccagctttagaagatcgagagacggactttgtagcttttggctttcctctgccacctttagttgttccactgccggcgccggaactcattttttgtttatcgggaaatttgaagaggcgattgtaaaatgtgattagagatggctgaggattttgtgagtggagtgatttagggtttaggttgtgatttctgaaatatatagcgttgagataatggattttgattggttagttgtgagtcacgcggattgccagcgtggcaccattgtaagttctcgcgggtttttttttccgcctctttttaacaagtcggtgaattttttaagacgattactatttgtgttaaaattcggtttagagaaaatgcaccaaaactataattcggttcggtttgaaaaaaaattaacatccaatgttgacccgaaataagctcaatttgttgggtcatgagataaattccatccgaatggtagtaaaggataagcccaataccaaatagcacaaacagctttaacatgggacaactaaaaagtgactgtcaagcataatggtggtgatgatgatagattgatagtggtgtagtatgacagattgatagttattaaattaattaagataattatatgtatatattctttgtacatttctgcatgtttttataaagtcaaacttaaaaagtcaaaacacttatgtcaaaaaaaaaaaagagtgaacaactaaaactcaaactttgaccacatgttacaactaatgaatttattgacaaataattatagcatacatggaatggttgcgacttatgcaaggtcgatatgttttgtatacaagggtgtttatcttcatcaaaataataacagtacaaagaaaattattctattcttagctagtattgatgaaggagacaagatagggttttgtttactctctacagtcgatgaagaatgcgatgatgcgaaagtatgtgaagaagatcatgaccggtgccgtagtgactgaggtcaatcagcaaaaacttaataaccagattgtgaagaagaatgacgtcattctgaggtt

SEQ ID NO: 7433 - DNA, 1333 bp, Arabidopsis thaliana landsberg
cttgtctggcggtaccaagggacgaatggtctcttgcaaaagggtaaaaagctccaagctgataatctaagatccagagttagatcatgaactcatgaagaaatctacaggttatgtctgagaattaatcactctacctggatccatcgacggcataattcctcggtggtatcatgtgagaaaccgcaaatatcagctccaaccattggaatcccaaacaggccaaagttgaggattccggggattgagtaagccaaatcctcccattttgcagcattatcaccagtccagtgagccgtgtatttccccgagcttacaaacgtggatcttgacaaaataaacggtctctttcccgttatatccaccacagcttggtgagtggctttagcttccaagagcccatacaagttatgcgcatcgtattcactaatgtttccaaaatggatagatgttgcgggtactgtcttattgtttatcggccttttatcccctgaattgttgatcttgtaaggaggatcatcgagtgaagatccagaggatagaggcgaagttatgaaatttgataactcattcatgtcaatccacagaccatccaaagggagaatctcctggaacatcttgatttcgttgctccagaaagttgcagcagctggattcaagaagtcggggaagtatacttttccgggccaaacctcaccaagataaggctcaccatttctttttatgaaaacatcagcttccattcctctattatatgtcccataagagctatccacaccaatacctatagaattaatggcttgaatcaaattgatgaagacactagagactagagatagtatacgaatgtttaccgggatccaagatcagcacgtatttctgaccattcttgtgaagtgtatcgacaaatgattgcatcttgtcctccgggaaatttacaggatccaaagtgaagtctttgtacccatccatgtaatcaatgtcagtccacatcacctcaagaggtattccagcttttgcatatccatcaactacatattcaaggtctgatacattcttgtacccatatctacattggtgaaatccttcacaaaatcaaagcaaaacacacatctcagttcacacaaacaagtatatgatctcataatgctatggactaaactttaagcaaacaaaatgaacagagcaatgtctcttaccaaatgaccagtaaggcataggggcaggtcttccaataagctcagtgtactgattcatgaccatctccggcgatggtcccgcgaacacatagagatcaatgacgcctccaatcacattgtaagttatccgatgt

SEQ ID NO: 7434 - DNA, 483 bp, Arabidopsis thaliana landsberg
ggctagtcgtgaaacagcatatccttcgaagatccaacatggaagctgcatgcatgatgtttattaattaacatatattcatggcatagtcacagatgaattaattaaccaatgtatatatgaattaataattaagtttatgacagacctctatttgtatctctaatacaaatggagtgattttgactatgctccttgtgaggctgcttcccaagtctgaacttctgtagttgaaacacacatacagtatatgttttaaatcctaattactacggcaagattataaaagaagctaataacaaaaaaattaaagaagaggaaactgaggaagaaggtatatacacctggagatggctcttgagatgataaagagtgagacccttcacacccataactctcattattgtctttggtgtagcctctgctcatatatagcgcaattaatatagctttaaaggtttatctatatagggagaatgttat

SEQ ID NO: 7435 - DNA, 393 bp, Arabidopsis thaliana landsberg
  unsure (1)..(393): unsure at all n locations
aaaaactgggccttttggggagtttctaatgcccactgacacttttcgcggtttcaaaccaaacccaatgcagcacggggtgttggggtacgatcaccttgcctcgcatgataagaaaaacatatcgtgtagcgcgtctagaatgcgcactgaacaagaccatatccttatctattgacaagtgcctaccttaatacacactactgtggaaatcgacagtaggcgtgctgtctgggttgannnnnnnnnnnnnnnnnnnnnnnnnnnaagagctatctgtccgaaccacacaattatggccgagccacaacgtggtgaacagctctatgtatataccactggcctggacagcatggagactggcgtgacgatgcatgtagatcggcgagacaa

SEQ ID NO: 7436 - DNA, 1876 bp, Arabidopsis thaliana landsberg
ttgtaaaaagagaaagaacccaagacacagggtacgacggtttcttaatttacctttctggaaccacggttttcgaattagcttgcggatgttgcgttcatggcgttccaatagttcatcaactccataagattgagacaacaaagggcccgagaattcgatcttgtccccatcaccctgtcatgtcaaggcttaagtcatcagtatcattgagcatgcttgtcactaaacacaaaaagtagacaaactaaatcatgcctacttttttcctctctcctctgaactttaggtgaaagcgtggagagagagagagagagagagagaagattaaaacaaaaattaaacagctgaggaaacatgatctgactaccaacggtaatctggtccaatctttctactttttgagctgtatatcacatttacaccgtatcttatatgtatgttgcatatataactattacaacactactacaatcatatctttagaattactttcattttatttcacagaatcaaatttgacactcgcattacagcataagaaagaatgaagccaaatcctaagtttcaaatgtaagaacgtctggcacaaagcatacttggtctctactatgtctatcagtagcactaacaatgcaaataacaatctgctatatggaatttggatattaaataaactataaggctgcttttagagcttctataatctatggacgtaccaaattattacccatcttttttgccatttcatctctctgatagagtcccaatgacagttcctgcgagtgatactcgtcagatgcaccaaaagaatctggacgttcaagttgtctccactgctttagcatagaacgcttcaccatctcatatgactcctcgcctcgagaatctgtcttgtcctccttttcattcttatttatcttggattcaacatcacttttcccattgaatgcgggggaatgtcctgacaagctaggaatgtaacctcttgagagagatcgattatgcaccctaacacatacgtcatctttttctcgtttcgcccaagcaaaactgtttgatttagagacttgtaacggccctgagaaaggcacatctccttgtgatgcatgcttcacatgggaagcttcgtctttcttgtgatctaacgggttttgcagtttaccacataacctggcatcactttcaatcgaattatgaactaaatgaccaattcgtttctgaaaagtttcagtttggtgccgcacatcctgcaaacagaaaaagagggcccatttcagtttcttgaacgatgaactatactctcaagatacagctaacatgtagaaaagtgagcaagtagaaagtacctcaactggtgccaatctattgaatgaatgggccttccttgatggcttcctcggatctataccacgtctcccattcccgctaatttttttcctgaaagtcagacatgaaatatacggatgttacaaatgctttcaagacctgacatataaggccaaccaaaatggtacactatgtaatttcccagagctgtggaacagtagattctgtgtatcaagcttttttttattctgattaaagagatgatataagcataactagaaacttctctatcaggtaatgaaagaaattactgaccttgctgcttcgtcccgatgctttgtatctatctccttgctaggtgggtatattggcaagcttgagggatcacaagcaaaaggctttgtagtcaaatactgaaaacacaaaaggcaatgtcttcatttgtaaaagatgaacaaaatacagcaatatgctgtgtttccacggatatcaaattcttagctttttaaacttgatatattaaaccaaggataaaaaggttacctga

SEQ ID NO: 7437 - DNA, 322 bp, Arabidopsis thaliana landsberg
cataagaataacatattgtgggagatacatatagttgcattttttataaaactaccaaaaaataaaaatttttgggaaccttttttaatggtattaattgcctggaccctaatttttatatattaagttaaataatgtatacgtatacaatgctctagttgttaatcagacaagaggagattcatgcgatgaaagcctaggcctttgcgaaaaatgttacgaaagatgcaaggccaaacacgggccatcgtgcatagcaaatgtgacggtacagttgcgatgttgtctgcacgtgcacttacgagtgtgcaccacctttacc

SEQ ID NO: 7438 - DNA, 1007 bp, Arabidopsis thaliana landsberg
aagccttttaacaagaagactaataatcagaatttaagcgtttttgtcttataagcattaaagaaattaaaggtcttcgtaataaccaatgagataccttaaaaaccttcgtgaggagaaaacacaaaacagaggaaaaagtcatgtgaagtaatgtcaatccaagtggataagggaagtttatttccttagatgacaatacccactgcatcagattgagtcagaaataaaaattagtgctggaaaaaagaaactgaaagaagctaaagagaaatggaatgaaccaaaatttacaaaagtttgaacagtaaaaaagttgtttaagcgaataatcatttgtgtaatggaagtacataactcaccattgaaccatacatttgaacctactgttgtattaacaagaattttattattattatatttcttgtccaaaaccaaatcgcattgtaacagaactttaccaagattgtcaaagttaaaagctttaaaatctactaatgtccaccagatctaataaaatcaaatcttgagcaaaaagactgcaaatagaaaacatagatccaataacatatgaatgtgagatttgacttaaaaccttattgaagaagatttgaccgctagagagagtgatgtagagaagaatggaagcatacgtcacatgttcttctctaagaaagcctctgatccgacttcgatccgccattagagtcaacaatcgttttggtctcaaatcagcaaaagatattgcgattctcatttggtatgtcttcttcttgaatattcaatagtacctcacttttccatcttctaagcaaactctttaaagttgactaaaagtaacgaagaaattagcggatcccactttaaataacttcttttctacgaaatccgttttaatttataaagatgggtcgcgtatacgggtcataaacacataatgagaaactatgggcttttgttgaccagtaaaattaaagcccagtataatgtcatttccttttatttta

SEQ ID NO: 7439 - DNA, 3487 bp, Arabidopsis thaliana landsberg
  unsure (1)..(3487): unsure at all n locations
tatggatcagccaaagggattcaacaaaaatgtttagttcctccaactaacatatttcttgcggccaaagctcccttcttcatcatcaccgattccagaacggttcgtacgctgctcatcatcatcatcgtcattgccacggccatagctaggctgcttcctgtaactcccctcttcctgttcctcagacctcccataactaggcttcctgtaacttccctcctcctgttcctcagatcttccatagctaggcttaatgtaactctccacctgatcatcagacctcccataactaggtttcctgtaacttccttcctcttgttcctcagatcttccatagctaggcttcctataaccttcctcttgttcctcctcagatcttccatagctaggctttctatatccttcttcctgctcctcagatcttccataacttggcttcctgtaaccttcctcttgttcttcagatcttccatagctaggcttcctataaccttcttcttgttcctcagaccttccatagctaggcttacgctcatactcagactccgatctcccaccataaccagatccaagccctgattcaggtctcctaccatactcaacctcagttcttccaccaccaccagatccatactccgattcagtctccgtccttccaccataaccagatccataactctgctcaggtctccgaccatactccacctccgtttgtccaccatagccagatccgtactcagattccggtttcctcccataaccggattcagatccataaccaggatttggtctttcaccttgaacatgaccaccaccacctgaatcgggtcgaaatgcgggtcgtggcttgggtcgagaatagctactgtactctgtgttaagagcttcatcaccgtaagcagaaggctcatggatctgagtaaattcaggtctctcgtattcgaaatcatcatcgacaccagatgagagaggataacaagtctcatcggaaggtggaatcggacggccgtagatcaccgtgatgtcgtaaccaccactgtacggcgttggatcaaactcatcgaaatcgtcgacgtcgttgtcatctctggtatagtacggcatcgcttaagaagaagcttctctgtgtttgttttactcttttggtttcttggatctgatcaaaatgacagaaatgagaatttatacgcgggggaagaagaagacgaagagtttaaaaacgttgcgttttgaatgaataattgtggatcccatcttcctgctgtttacatggagaccactacgattcgggcaagctatgccacgtgggtttatcttaattggtaataaccaatttgattgtaccaattgccgactgatttaaccgggaaccaaaccatgggagaaagtatgatttaataatacattaagggactatattacaaaaacgaatataatttatgaattattgtgtcttgaatttttggtttatgattttggaaaagaaagaaaatgtgcctcatattttttggtttatggtttttaaatttaggtttattttgtagattttaatttccttttgatatgaggctttttaaggttttgtgtatatcttatatttttaaggtcctttatttccaattttaattatttataaccattgtttacctttacaaaaagaaattaatatattaaaaataaggataaaatttatgaattaatgcaattgaattagtgtatcttgattttttttgttttatggtttttacatttaggtttattttgtagattttaatttccttttgaatttttatttttaagccttgtagatctttatattttaattatttataaactataaccattatttacctttagaaaaaaaaatcttataagctatgatttatgtctataaacaaatctttggacaatgaatgactacaactaatttttttttttttttttttggaacaccacaactaattatgtccacaatatttagatatgtaatctatatataaccctaatttctcatctatcttcttcactgcatgcttctaccatttccggcgaccatgatctccgaagttgaacaaccaaaagagaagagaagtttgagttctgagccaccgtcgttgatgtcactcccatacgaaatcatagagaacattcttgcacgtatctctaaatggagttatcctaatctctctctcgtctccaaaagtttcctttctcttctctcttccccgcaactatacaagacgcgatctgaaatcggaaccaccgagccatgcctctatttctgcttggaatcagctaaccattcatctccacagtggtacactctttggatgaaacctgatgaaaccctcaccggtaccggtactatacatgactattcgttgattccgctaccttcgtcttcaccagtacttcgtacatccacggtagcggttggttcggaaatctacgtaatcggtggacacttcaaccgctcttcctcagtgcggatatttgattgtcggagtaacacgtggcgtgacggtcctaacatgacggtagctcgatcggatccagtcgcggttctcatcgaccagagaatatacgtcttgggaggtcgcgagatggacgagtctgacgattggtttgaggtgttcgacatcaagactcagacttggagagccttgcctagttttagggctggccttgagttacgccgctacattgtgtggcccaacagatactttccgcgtcttggtgatagtcaaactgcagtcagattaattaacgtcaaccccaatgctttggaaggaaagctttacgtagcggcacagataaatgactacacttacgagcccaaagatgatacatggaaagttgtaagcaaatcaagtataagaagagtaaaggtttggtgtgtgatagagaatgtaatgtacgcttgccatgacgtctttctgaggtggtatgattacgaggatagacggtggagagagatccagggtttggaagaattgtgttaccaccctacgaggggtttcagtggggcggaaagaatagttaactatggtgggaaacttgtagttatgtggcgtccggtgcaaagcgacggaaaagataaaattgaaatttggtgtgctcagattgcgttagagaagcgtagtaaagatgagatctggggtaagatagagtggattaattctgtgcttacggtccccaagttgtgtgacttgtgctacagttgtgtggttgtttcgatttgatgatttgtaaaatattgtataaacaatattgtgaaatcatccagtctttgttattttttatgtttttgtttttaatggtcttttacttgttttggtgtaacccgtacaagttaatcttggtgtcgctgatatttggtccagtataaccaatttttaacctggtgtatagtattttcttaattaaaattttgggaaaataaacttgtcccaaataatgttctaacatgtcacatnatttaggt

SEQ ID NO: 7440 - DNA, 1832 bp, Arabidopsis thaliana landsberg
ctaatcctgctttttctcgagcttcttcgcatgtttccatacccgagttgcacttatctgcttccttttggtatgaagaagttaccttcttggcctccaatagccccatgtctgctcgtttgtgtttctctaaagattctgcttcacgcagcttcagttcctcggtaagaagttcagcatagttcttctcagtgtcttcgttcacctctggatcgtgctttgcacaatctacacattcaaaactagagaagtttagtacaaagactcgattgctaaaagacttttaaactgatacagttaacgaaataccattcacaattaactcaccagcaaaagaagcattactgagctctgcaagaagaaaggaaacaagtaaaaaaggatcaatcttttggaattggtaacatctgaagaagaatataaattcagcttagcgagaaacatatagtaacttaagaaatctgttacaacaagcattacaaataatgatgttgagttcatactacagtcttctttgggttcactaaacaaattctatcaatcaaatcggtctaaaagcaatcacaatgcatacaatccaaacaaactgcattgtttgttgattggctattatcagaacagtcgccagtaaacttcaacttccacaatccgagaagttaacaaatcataacttgaaccattaatgcaactcaaacaataggagcatcaacactgtggacaaataactgagataatctttttaagatggagaacacctaaacgaatgaaacataattcaagtagatctacacttacttactacactaatcattctcagactcaaactcaagcacgaatcaagctcaaagcttacaaattcagtaacctcggaaccagattaaaaaaagccaaacttgaaaatccaactgatactactaatccttacttccaccaacagctacaacaccaaaatttgatataaagttgctaaattcctacatcactctacaaaaaggagtaaactttaaccacagatctgttgaaatcatgggcacagatcaagctaacttctgtttacctttgggaatggtgacagcggaataggtagagcattcacaggggcaagaaggacaagaggaggcggaaacggcggccaaagcctcagtgagatgccagtagagaggcggaccaagaatgtaaccagccatgctcagccccagtaaagctagcccgatcttcagcgccgccgtgtgtctcgccatttcaactctagatccgccgatctgggtcttcgtaaagattagatttttcggcgagtttgaagaaaaacctcgtagagggattttagagctgtgtgtgtgtgactgtgagacgacgttatttagaaaaatcggtgctagagattttgacacacacacacttttgagtggctcttttgctctctaatttcgtcgacagttaaatagtaagcgtgtagttttaagataatcttaaaagtcaatgtctctccttcaaatgctcgacatgatcggtttcgtctgatttgaattggttcggttcaggagattaccttttgattacaatcattatgtgaaattattctgtgtttgggcctttttggttatagcgtaactccagccgaaacctattgaatggggttttagttgctcttggtccaacatgctttttcctctttaggcctagctggaaccggttggccgtcgacgtagaataagactgactatacaagttaataattaatgctgttttgacaagaaaaaaaactaaaccctagtattattttggttgctttcgatggcggaagccaaaattgaagagatcggttgtgaaga

SEQ ID NO: 7441 - DNA, 2255 bp, Arabidopsis thaliana landsberg
gcaaaagtagcggtggtggtggtggtggcggaggaggaggaggtgggggtagcggaaatggctcaggccgtggtcggggtggaggaggtggtggtggcggtggtggaggaggaggcggtggaggaggaggaggaggcggcggaggaggaggaggaggaggaggaagtgatgggaaaggcggaggatggggatttggatttggatggggaggtgatggacccggcggaaactttggtcgttgttggtatcccggttgtactaaaaagtcaacggaaagtcataattaaaacatagcaatgatatgtcttaaagccatgctttttcaccacaacataaacacacaataattcctttgtttttttcctttttcaatggccttattaagacaacaacgatttctttctgttttgtaatgtcttgggggattgtgcttccaatgaaaaactaaatggtaatgtttccgaatttgtttgttcttttctcactgatctttccacattttgctacttagttataaatgattttcccaattctttcacagtttcacttccggaccaaaatttttgataaggatccaaaagttgtgttttaatcaaattttaaccaacctgatatcataattttaaccaaattgttactactaatctttatgtgagggtttgctttagtattttacatgtacaaaaaaaataaaaaaaatggagtcaccaatatttgtgtatgcaaacagaaagtataccagtttgtattcttaaatatataaacactgtgtcaactatcaatgatacaataacataatttagaaaataaccaatgcattggtatttgtagccgcacaagtattagatcgatatggattgattttcagtttttttaacataagagtgtgaatgaggggctcgtacgtcgtaaatttttagggttgtgtaattgaaaaattaaattgatttttggtcaaattttatcttttatcttgtctcaatgttaacaacttctatactggtttaataaaaatatacaaaattctactttaaccttaaggggcaacgacgatattttgaaaaaacagttataaaggcaaaatttcaaaatgacgttttaacaactttttttttttttgcattagcagttttttaaaaaaactctaaatgaaaagagtgtgagctaataggaagtaacagtagttaattatggttgtggtcacaaaaatttgggtaacggttggactgtatttaacaaaacttttaatgatcatgatttctaatcatgcatactctatcaaataaaattgtctctaattatagcttaacttcatgaatgtgaaaacagtctacggatctctctctgattctctgtttacaagattacacaatgcacatggcattgataaaatttcaagatagaaaaaaatggcttaaacccgagccggatccgccactttcatgagccgtagctccaacactttccggtgagagttagagtgaatctcgttggtgaatgttgggctacaagcgggtctatattcgggtaaaagtcgacccgacttaaaccggaccccacaagcattacacagtgtcttcgcacctaatggacccattctccattgaggcgtcttctggactccacaatggctgcagcaccgcctcagctgctgctgctggactacgccaccgtacgatgcatccaccttctgtctccctctcttcttccttctggcaacagcggtggatagcagaggagatggagactccatagaccagatacggccgttggtgcggcggcgtttgcttctaggtttaacaggaacgcactgtctccgaacctccaccgacgcgactggattcaccgggaaatcactggaaatatacgattctgagaaagaatcctccacgaagttggataaccactctaagtcttccaaatcaccaaccttgacaaacaaaacaaaaatgagattaaaaacagagcaaaaacagggtacagagaaacagagtaaaaacaggggagagagaaacagagtgtgtaagagggctcaccggagcgtcgccgggaaaagataagagatcctctggcggtgaaagacgggtactttggtcagaaaagctcttaaatttctcacgttcttgttcgtcttcttttctttgtgacgaagacgactctaaagaagtgtcggcgttagagaggtcgagaagatcgtcgacggaaaaatcaccgagaaatgcttctacacactccatttttgtctctagccgtat

SEQ ID NO: 7442 - DNA, 557 bp, Arabidopsis thaliana landsberg
taacccgttaacatactaactggtgataaatctgaacctgggtcggatcctaattctgctcctttaaaaaccttccacaatttcttcaaaaactcgagacaacctgaaccgtctgaaccggctggttcaaaccggtttcttcagcaccgtcagaagtctctttcttcctacgcatctcaatgactttactgtggtggtttgagtgaagctcactcgaaaatgttgggctacaagcgggtctatattcgggtagtaaccgacccgatttgtaacgcacaccacacgcattacacaacgtcttcgctcctaatggtcctgctctccactgcggcgttttctgaactccacaatgaccacactgccgcgtctgcgtctgcgtttgcgtttgcgtctgaccagcgtttttccaaactttcttcttcttttgtgttttagtcattggctcatcaagaaactgaccgctggcgagccatagagggcttgaaggacgaggagaggacgacgaagatgttgtagagcttgaagatgagtcggttaacgactgcgaacctgagacc

SEQ ID NO: 7443 - DNA, 2167 bp, Arabidopsis thaliana landsberg
aatgcaaactataacaatcataacttttttggagaaagaatatgaaaactgtgacaatcatatttcttcttgcatgtttcacgaacgatgccataaacttaaagaaaatattcttcttccattttatttaaggaaattctgaatctgaaatattttcggtagaaatatcacggaaacaaaatcagaatgattggaaatccactcatattatcacagttttcatttaccaaaaagagtataatgtcacgactcacgtataatattactatagtaataacgaaacaaggacaaaattggaaacaaaaaaaggagataactgcgcacgaagaacgggtctcaagctttccgacaagacatgcgcaccacaaatttatttagtctccgtatataaatcctccatttccaaaaccttcccaatcttcttcttcttctttctccttcaaacaaatcatgagacctgcacaagataatcaaggctcgttccttggtcggattagtattcgtcgcaaccaattcgtcgacgtcaacaacgaacaagaacaagaagatctcgagcttttccaaaaacacatcgccgatcgtttcaccgagcttctttctcctcctcaagcagcagcgtcagatgaaacgaacacggtagcttccgtagccgcgacggagcagattatgtccgtgacttggctacgtaagctaatggatgtttcctctgttgcgaagctgaattcaaagcgattttgttaatgggtcgtgacccgacccagatttctaaaccgccttttgaccggttagttcctgaaatgttagaccggtcgattaaagcgcttgacatttgtaccgccgttgttaacggaatcgattccgttagacattaccagcgtttagctgagatcgctgtaacggctttggagcaacgtccgttaggtgacgggaacgtgaggcgagcgaaacgcgcgttggcgaatctcgtcgtcgcgttgagtctcgaggataaagagaatgtaagcggcggaggtggtggcggcggcggagggaataagacgacggagagatcgtggtcgtttggtcgtcgaagcggtggatcatcggcggcgagtaaaggaggagcaacgattggtcagctcaaatcgtcgtcgtgggcggttgggagaaattggtcggcggcgaagcagatccacgcaatgacagcgaatcttacgccgccacgtggtaacgaagcggcgggattgcctcaaccaatgtttataatgagtacggtgatggttttcgtaatgtgggtgctaacggcggcggttccgtgtcaggagagatcaggattagcgaatcatttaccagtgccgccgaaacatttgaattgggctcagagtttgatcggaatccatgagaagatcggagatgaatggaagaagaaagagaagaaaggatctgctggattaatggaagagatgacgaggatggagaagctaggtcactcgttgatggaattcgcagatggatttcattatccggcggagaaagatgctgctgaatctgcggcggcgcaagtggcggagatggcggagatatgcaggagaatggaggaggagcttgtgccgttacagcaacagatcagagaagtttttcataggatcgtgaggagtcgtgcggagattctcgaggtgttggagcaagccgggaaagtttcggcgccagttgtgtaaaagttttgaattattgggaatcaatttcgaagttttgtaattctttgggggctaataggatattttattttcttggtttcgtctattgttgtttttctatttatggttgggcttttagaactctggacaggcccatgtcatatgttttcccttctccttatatttttcatttttcattttgttaaattaatgcataatatccaaaaacaatttaaatttttgaaggaaccctttagttacggctccgaagctttcacaagtgagaatgtgagatcaaagaaggcaaatggaggattttaaaagttaaaatcatcttttatctgcaaaagttgacaatttttttgtatcaaatctaaatcatcaaactctcttaaactacaagagcataacaacctttatgtaatccatgaaataatctgcttgaaggacataacataaatcattatggctagagtgactaacttcaatca

SEQ ID NO: 7444 - DNA, 1363 bp, Arabidopsis thaliana landsberg
tcaaaaatctccttgcaacttcccaaactcaagtgaaattgcattctttgcttcaaatcatctaaactacacacatctcttaaagattctctcaacgtagaatacttagaaccagtcaaggaagagtcaatctctgaacgttttttctcaccacaccaacctaaattcctcaaccttttagggcttctccacattgtatcaactccaacagatttactatttcctaaagcctcaccactatctctcttccccttacctaaattcccaacaccagactcgttctcgaacggatcgcaaccgcaattttccgggttttcaaacaagaaattgagccacacagtaagtgatttagcaagagatctaagattcttctctttcgtcaactcagccttgcgtgaagattgagattgctgaagttcaaatgctttgagccgcctcgacgatgttgataccttagaccgagatgtataagaaggaaccattgaaggacgacggaaattagaagacgaagattttggggtttgctttgatgcagtgaagaaatgcggatacggagatttactaatattcgaattcacaacggaagtacgccgcggcgttttgaaattggatatgtcactgagtaacgatgacgtcggattacgtggcggcaccggtgaagcgcacggcggttcgttttcatccatcggagatttgttagagagaaagagtcgtttgttcaaattcaaaattcgaaagacagtaaacactaaaaggagtgaacactaaaaggagtgaacactaaaactctaaaaggagtttattgatattctaacggttccagaaataaggttgcaaatctcgccgccttactttattcgatatgaacatcgtgacgttttagtaagttgaaaacgccgaacgtttttaagattttttttcactgcaaagaaacgctggcgtcagatgcttattataattggttcgtgtaaaacacgcgctttcttattcgttgagctactgtcacaacagataaacatgcgaaaaaaaagagcgaacctttaaccagtcgctttcgttaattcaaagctttaacgtagaagaagctgatttaaatcccaaatccatttcaacgtagaagcttctacagattcgatttgggtgtctttggttttggatttggtaaagcttctcggtcacttgcttggtgattgaaattgaatcgattgtgattgtgattgtgattgtgagggaattatggctcaagccgtagaagaatggtacaagcagatgccgattataacccggtcgtatctcacggcggctgtagtcaccaccgtcgggtgttcgctcgaggtttgaagttttctgactcatgaaagcc

SEQ ID NO: 7445 - DNA, 487 bp, Arabidopsis thaliana landsberg
  unsure (1)..(487): unsure at all n locations
aatctaatgtaatggatggagaatgaaactttatttttttgttgttgttgtttgtttagctgggggggggtgagcagcatgttttgcggnnnnnnnnnnnnnnnnnnnnnnnnnagaccttagccattggtttcacttagcacttgtagtgttagtaagtggttgtccctgtggtcttatcctatccacacctgttgctaccttttgtgctctcactaaggcagccacgtcagggtttctgatcaaaactggtgattgtctagagacattagcaaagatcaagattgttgcttttgacaaaacaggaactattacaaaggctgagttcatggtctcggattttaggtctctttctcccagtatcaacctgcacaagttgctttactggtaagtttgtatgtatatataagtccacaggagttaaaccttttntgggtgtatgtgatgaaaaattgatgcttagaggactttgagatgttttcttagg

SEQ ID NO: 7446 - DNA, 920 bp, Arabidopsis thaliana landsberg
  unsure (1)..(920): unsure at all n locations
gtgtctgtcatttgctctctcatctctcctttcctgcccttaacataatttgatgttttacataaaacagtttgtccattttttgttcttatatattatccttttttttctaatatcaaacttgttatcaatgtgaaaatcggagatatatcatatatttcaataaccaatgcttcttaatgatttattgttattttcgttttatgtttttgaccgttatgaatacaaatcaaactatggagaaaaaccaaactcgaataaactttttggttgcaccaataaacagcataagcaatgaaagcttgaaacaaatctaattatgagattctcggtgaaaataaaacaccacaaaacaagaatctccaaagcaaatctgataacattacatacaaagctgagtttttgacttattcgcaagcaagttttgtgtcgaaactgctcaaacagatagcgaaagcctgaaacgcagagagcggataccggaaatccatcgtgaacatgtcttttcccactttcccaaactgcaatatgatcttgtcgggaccatcggtctgaccagacggttgcggctgagttaggggttgaggttgcggttgaggctgaggctgaggctgtggttggtttgctgcaatgagctgaaagttcttaactgatgcgactgttacacgtcccctgaagtttaaacaccaacactgaagctgttcatgccacctcggcggcttgttcttaagcacaagtggtggcgaattccgctctttcccttcttctaataccacttcttggtcttcgcttaacgggccaagaatgtcggaaaaccgtgcactgctaaaatcattcgagtaatcgtaagtgattnttctcgatgacgaagaggtaatgctgcgtgacgattcgtcgagaatagagcgcgggacaatgat

SEQ ID NO: 7447 - DNA, 815 bp, Arabidopsis thaliana landsberg
agagcattgtattcatcttctgctttctcaaacatagccataaccttcttgttcactcttttttccaagcttcatgagggaaataaataaccaggaaaagaagaagaatgcatgtcatattgatatttcacttcaatgatgtgaagacaatataatataggtttcataaagataaaacgttaattctcatacacataccctgattgatctgattggagcttttcaagtttttctctggccacatacggatcacaagattcaaaatcataatctgtccctcctttcccaaaaagttgcttttcagatgctatccatgtatgcttctcaacaagtttgtctactttcacggaacagtccttgtgatccgtttccatccttacgacctataaataaattggaagagacagttgtcacgaaaagtatattccttgacatgcagaaatttcagaaactactgaacttttccaattttatatcaaaatcacgttacaagaaagtcttaattttctatgcaattactaattcactcaccatccccaacagctgtatgttacccattgagacgtttgaactttaacgcaattactgaactttcaaaattttaaagaaatccaaggcagaaactcttaataggcaagattagtgaatacgaaagatttttatacgaagtgcaagaacagcataaatcagattggtagtgaggaagaaacaagcatggcttgtagctttgcaaaacctagaaacaggaatagaacagatacagaaagtacctcattttccaatttctttctctcaagcttcatgtcactaagctt

SEQ ID NO: 7448 - DNA, 486 bp, Arabidopsis thaliana landsberg
  unsure (1)..(486): unsure at all n locations
aaccacggaagaaaggactcactgagccaagatcannnnnnnnnnnnnnnnnnnnnnnnnnnnnnnnnnnnnnnnnnnnnnnnnnnnnnnnnnnnnnnnnnnnnnnnnnnnnnnnnnnnnnnnnnnnnnnnnnnnnnnnnnnnnnnnnnnnnnnnnnnnnnnnnnnnnnnnnnnnnnnnnnnnnnnnnnnnnnnnnnnnnnnnnnnnnnnnnnnnnnnnnnnnnnnnnnnnnnnnnnnnnnnnnnnnnnnnnnnnnnnnnnnnnnnnnnnnnnnnnnnnnnnnnnnnnnnnnnnnnnnnnnnnnnnnnnnnnnnnnnnnnnnnnnnnnnnnnnnnnnnnnnnnnnnnnnnnnnnnnnnnnnnnnnnnnnnnnnnnnnnnnnnnnnnnnnnnnnnnnnnnataaaaggttctatatcaacataacaaatgctgtacttattggaaagcgatgagaaagacaaaaaacaaaacgaagatctcacatag

SEQ ID NO: 7449 - DNA, 857 bp, Arabidopsis thaliana landsberg
  unsure (1)..(857): unsure at all n locations
cgaggttagttacagaggacagagcggcctttagcaatgtatcttcaatagcgttcgtgtgctatcataacacaattttttcggtttttttcctagaatgacaaatcaaaaatcacgaaagtgatcgaggagcttgatgagaagaaaaaagaaaccctgaaagttacttgggttaaagttaaccagtgagtgtctttctaatatccaacaaagagtttgtctttgctcttaggctcatgatctcattcctcaatgtctgaaaagataatatgatattagcctttgttaaatccttcttttttattagggatttcggatcaatcttttcaactctactacctggcaccatggcaaaactagaacctcctgaagacggtcacttccttgatggtcttgaggtgcgtgttgcctttggaaaagtctggaagcagtctttatcagaactcagtggagggcaaagatctcttcttgcgctatcactaatattggcattgcttctcttcaaaccggctcctctttatatattagatgaggtacatctctgcttttcaatttcagatttctcagtttccaattgatatttcaaattatcatagaagatctatagggttggtttatgtttccgatgtggaacactgattttgcattacaatcagcgagtgaagagagaaaatactcatgattttgaattatacaggttgatgcagctcttgatctcagtcacacacagaacataggaagaatgataagagctcatttccctcactcgcaggtctaaatctctatttcaagccttactaatatactctnctatgtatntacttaattcaattctggtctctaaacattntctgctt

SEQ ID NO: 7450 - DNA, 1184 bp, Arabidopsis thaliana landsberg
taaagcttatttaagtcaaaaacatatactttccatttcaataacacatccagctaagtaaaaataaatgtaacgtatctttgtttacagaaagaaaaaacgaaatttcgatatttgaaatttaaaacaaaggatgagtaaatgcaacttgcttaatcttggtttactacagatacagaaacaactaagagtggacctgtgttttcctaactaatatacatcatcatattagtaatatataaagaaagtacaaatcgaaactgacagaaagttaagaaaatattaccaaataaggagattaattgataatctacgagtagatagaaaaggaaataaggaattgttaggattgcaaatgggaaagaagaaaagtgatgagaggcataaatcttgaggatgatatattaagaatcaaagacttaaggcaaaaaatagtgtcaataagccgtttccttgaatgttactttctgaacttgggattctctaccataattgtcaagattttctagacattaacgattagcaccctattgaacaataaatacaagcactcttgttcctttctcatctcatattcacacaaacacaaacccccaaaatcacttttgttccttggactatggaactaaacctctctacacccacatcatgttcctccagcagcatctcatcatcttcgcatgaggccatccctaggaccaagggtaaaacgaaagaggaggtcacggctgagccgtcgaaggagaatcagcagcggctagagttccgcttcctgttcaacgagagtagtacaagaaacgaggctaaagcgagggtgtttgcttgcaccttctgcaaaaaagagttctctacgtctcaagccttaggaggacatcagaacgctcacaagcaagagcgatcattggctaaaagacgtaaagagatcgaaatcaactatcctgaactctccatctacagccagtacccgccaagtggactttccttcagcagcagctcctcgcagtatgatctcggggttcgttacaatcctaacattgctaaaactactaagccctatccgttcaacatcttcgcatgtcgatttggatacagagggggactaaatttccctcccatgtctcacctctcggttccaaagacagacgatttgtccataaacttgatttcaaatctagagggcagca

SEQ ID NO: 7451 - DNA, 2260 bp, Arabidopsis thaliana landsberg
tgattgagaaataggatttctttttaatacttgcataaccaaatctgtttctaggaaatttcatgtctccttgttctggggaagtttgtatttattttcacttttgaagtggccatagtatgctattgcttgtcactgacctgatagaaccacctcacttaaagtattaaagcgtaaagctagacccatattctactatatataggttaagctgaatagagtttttcatgcatgtagaagtggattgttaaactgatctgctgctttgtttgaaaatatttccagttaccgagtcggtttcgcattccttggttatcgtttcttagcttccatgattatgacgacgaattatttggtaatggtatggatattggtattgatgggaacgagggggaagatgaatcaattgatgatgatgctgaggataatgatgatgattcagattatagcagtggagtagatctagatgataatgattctgatgatgacatggatagtgatgatgatgatgttgatgacatggatagtgatgatgaatgttttattgaaattgataacaacattatggataataatggtgatggaggtagtgagacgaatgttgatagtattagtggcagtcatcaagatgatgatgttgatgatgatgattaataaatgcttggaatttgtgtgtaccagcgcaagcgaacgcctaggggatagattgtatcgtgtctctttaccggatgaactattgtcgcaacttttttcgctgtaaaaccgaagcagtagtagtccaaagagagaaggagaatcttcttcagccactgaaagagaacttcttgatcttatcctcaccttcaatgatcagagcgacgatgaaaatgcaactgatgatgatgatggtaatagccatgaagacttcttctcttaagagaaaacactcatctggaagaatttgtaaatatttttcagtccctttaaaaccttttttgtattttgatttaccacatggtttttcattgttcaataaagtctcaacattatatgttcttgtaattatacatacacgttcatcatcataattcgttgcataaatcatatacttttaaggttcatagacattaaaaatggcgaatttgtagtaattcggaatttatcttcttctaagaacacagagaaaaataatagggttaattacgtcattgtagacaattttccgcgggaaaatgaagatgcaaaagacgacgacgaaagacaaatttgcttgaattctttcagttttccggtgaaaattcgccggaatccatggctgcgactctgctgtctcaatgctaccgtatctacaattccgatgcgtgcaagtgtgtttcttctgagaatcaccagacgacggggaagcgaaatgggaatcgaaatctcgaattcgactcggaaatttggaatccagcacggctagtacttcgagtccgattcaaggtaactaagcaggtcaatgatcctgcgctgactagggctttacgtggtttcgctgattcccgtcttatggaggatgcactccaactgttcgatgaaatgaacaaagctgatgcttttctgtggaatgtgatgattaaaggtttcactagctgtgggttgtacattgaagcagttcaattttatagcagaatggtgtttgcaggggtcaaagctgatacctttacttatcctttcgtgattaaatcggttgcgggaatttcctcattggaagaagggaagaagattcatgcgatggtgattaagcttgggtttgtttcagatgtttacgtctgtaattctcttatatctttatacatgaagcttgggtgtgcttgggatgcagagaaagtgttcgaagaaatgcctgagagagacattgtttcgtggaattccatgatttctggatatcttgcgcttggagatggctttagctcgttgatgctgtttaaagaaatgctgaaatgtgggtttaaaccggacaggttcagtaccatgagtgctcttggtgcttgttctcatgtgtatagtccaaaaatgggaaaagagatacattgccacgctgttcgaagtaggattgaaactggtgatgttatggtaatgacatcaattcttgacatgtacagtaaatatggtgaagtgagttatgcggagaggatatttaacggtatgatccagaggaacatcgtagcttggaacgttatgatagggtgttatgctagaaatggccgagtcactgatgctttcctctgctttcagaaaa

SEQ ID NO: 7452 - DNA, 1680 bp, Arabidopsis thaliana landsberg
cgcgcctgatgcataagaacaaacctgcgagtagaagaatggccaaacccgatacagaagcaaccgcaatgcctagagaggaaaacaaaaaacagttttcataataagtatatgctgttgtcaatggtaatcaaatcaggtgttgcgaaagaacggggaaaggggaaacacctgcttttgctccaatagagaggcttgtatctatggaatggcaacagaaaaaaggttagttcgaactaaacacataactgtgaatcttactggaaatgaataacttaaaactcgagggagtttctgtatatagttatcagaaactaaaaggatttttttttttggtcaactaaactaaaaggattttctgtggtgattcttgtggaagagccattaggaaattagaacatgtaggaaatattacccttgtttctagtagggtttggtggagtaggggtttgtggctcttctatagaatagcagacgaatctacttgaggtttgactatatccacaagcacccttagagtctatgcacgtccgacaatcttggttaagttcaagctcgaaaccgtattcgagagccttctttagattatcgttactcggagtgctctgcagtatgttaagcgtcgatccagatgcgggaatactgacgtttctatcgcaagattgactgaagtcgtataaaaggtcattaatctcactgagtggaggaaacgagaggtttctcgtcacatagtaacttctatcatcatcactatcatccccacaagcaaagtctccaaaattagtaacttgctgtggaaagtctcggctgcagttgtaaaaaatagtcagcagctcggtgttaggagcaaatggaaggacactttcgctgaatggtgcatttataggatcttggggacagagatcgcctatatattcggatctgccgagtcttatgatattagagccataaaccgacgctagaattctaaatttcacagaggaaatgctaagctctgcgaatcttccgctacagtcgtcgagcttgaagtcagggtggccacagtcttctctaccagatgtccagaaagggtaaaagagttctctctgatcgccgcagctaaacgtgccattgcagcgtctgtgaagctcaagctcagtagctgataaaacacaagatatatggatcacaaagagcatccatatgaagctataggacatgtatttggtcagggaaagagacaaattgatcatcgtgttacaggtgaataataaaaaaatggtgaagaagaagaagatgaaaacgaagagatgaagcaaatggaaaatgtctttggttttgtaagagttgaactaaaggaacatgtttggtctttctggaccaacctccactttaatatctatttaatgtttctttctggaatttaatatttttctgaatcgaagtttctttggaattaggtggcttacaacgacgactttgaatggtactaatatattggtaaacgataatgggaatagtgattttaaacgagtttttatctttgttgtttatagaatataaacgacttctcaccttggactatacaaagttggattcttccttaactttttatttttctattcttttgttttttttctgaaaaacgacttcaaagtctggtggttggaaatttcttagaatggaccttggggaaaaaga

SEQ ID NO: 7453 - DNA, 1262 bp, Arabidopsis thaliana landsberg
  unsure (1)..(1262): unsure at all n locations
tccttgactttgggtcaactaactttccttgacttgattcttttcgaccttcaccatggccacttgcttggtatcgatttatctcttcttcaccatcttttttttatcattcacctgcaacacgatgatcaatttttctctttctctgaccaaatctatgtcctatagcttcatatggatgctctttgtgatccatatatcttgtgttttatcagccgatgggaatcacatactctgcagtccctcgtttacttgtggtaatcagagaggtctcttgtaccctttctggattgctggcagaaaagaatgcggtcaccctgacttcgagcttgactgtaacgcaggagtcccagagcttagcatttcttctgtcaaatttagaatcctaggtgcggattatgactctggtatcataacactcgccagatccgataatatcgacgatccgtgtctcccaaattccttcactacgtcattcaacgaaaccgtccttccacttgcttctaccaccgacctgctaaccatttattacgactgcaaccgaaacgtttcatcgtttgtttctacttttgttaaagagcttgattgtccagatgatgggactgatgatagaagaaattattatctgacgagaaacctcacgttccttccgccgtcccttaaacttgaagggaatagtttccttttaaacgactttgggggatcttgcagtagaaacgtcagtaatcccgcttctagaaccgcgctgaacacactggagagtactccaagtacagataatctaaagattgcacttgaagatggtttcgcgcttgaagttaactcagattgccggacgtgcatagactctaagggtgcttgtggatttagtcaaacctcaagtagattcgtctgctattataggcaagagccacaaaaccctactagaaacaagggtattatttcctacatgttctaatttcctaatggttcttccacaagaatcaccactagtcccttccctaaatcgactttttgattggatcatctacagaaaattctcttagtttctgataactatatacagaaactccttcgagtttcaagtttttcatttccagtaagattcacaggtatgtatttagttcgaatactaacctttttttctggtgccattccacagatacaagcctctctactggagcaaaagcaggtgcttaacctatttctaatttgaatacctcgttgaangggttcgtgaagtaatattaaaactatttttt

SEQ ID NO: 7454 - DNA, 524 bp, Arabidopsis thaliana landsberg
ccttttttaagattcttcttccattggccttcttcatcgacgtttccttcggctaagacttcattcagttcggaaatgagctgttggacctgccaatggatcataatagatgaacgttgaagaacacaaatatagggactagactcgaattgaccattatagatttgagagtaaccatatacctcagggataaaatcaattagaccttcaggaacaagaatgacaccgtagttataaccattttctgctcgtttatagatcacatcaacaatgttatcggtaacatttttcaacgtaagcttcttctcaaaaacctgcatatatgttggtgctttctagttctcaaaccatatttgaaatatagcaaaccgaaaaccacgaatgaagaagcttgagtgactcaaaggtacctcttctccaataatggtaatgtttggatgggtttgcaaagcgcattcaagtgtaatgtgagaagcagcacgacccattagatcgcacactatagagataatcacagatgaaat

SEQ ID NO: 7455 - DNA, 1134 bp, Arabidopsis thaliana landsberg
attcatcaccttttgtcatggaatgtcacggtttcaacagctttaatgaccactgcggtccccgtgcaaaaaacttcttctgcctctaatagttcatccacagaaacatcacgttcttgaacctgtgatacattgtgaaacacatagaatcttgaaaacattcatgaaatgtctatatacaaaagggtatcattagatagagttggaacctcatagccaatgtcacgggctagctcacatatgctcttccttgtgattcctggtaaaatggttcctgaagttgggggagtggatacaatgtttccctagaaaatgaaggatatatatactaatgagttcttgcaaatgcaatcttaaggatgaaactttatattatatttttttctatgttctttacctttagaatgaagatgttacaagtagaaacctcttcgatgtttttaccagttgccgcatccaggaacaagacatcagagaaacccgaagactttgcttcgatcaacgattttacaaccttccaaattttatacaataaaaaaccatgatttagatatgatcattaacctggccatctatatatctctggtgtctctttattaattacttactggagaataatttgtgcagctcttcacaccccctgttccaccgaagtgggctcggcgatggttatgatcaactttgaggttcaagcctgagcttgcctacaagaaattaagacaaaccagtaaagagtcttaaattttaaggaatctttaggcagcatatggccatattttagcaagtgtcagaagtgctagtgaacatggtctacaaaaaggataccatgcattatttaaaaagttttagagcccatattttttttcctttcacatagagatttgatcactatttaaaacattagaaccgagtttacttgatcaccaagtatttgaataacaaacaagctcaccttgggataatttcccacgggagatgtgtaaatgaggaacgtatattcaggagctgaagctacttcaaggacagcaccagtacctatgagtggaggcctaatatacaaagcttcttttccccgaggaggttccttacaaacaggagagaaaaatctttagcttcttttaataagattaaaag

SEQ ID NO: 7456 - DNA, 1668 bp, Arabidopsis thaliana landsberg
  unsure (1)..(1668): unsure at all n locations
attatggctacttatttctaagttccgctgattggagtttcttttactgtaatcaactttgcatttgactggatggtacttttcctccaatataggaagatattgggacaaagctggttgagtttttggagaaacctcatgcaacaactgatgttctagtcaatgagaaagagaaggtaagtttggtgctggaaaggccttctgttcagcaattaagcctgaaaatttattgtgcatattacaactttctattttttctattgaatagggagtgaagcgcaaaagaactcctaagaaaagttcacctgcagctggaagttcatcttcaaaacgatcagcaaaggtattactcaatagcttagaactggaggtttaaatccttgtgctagaaatttcgtctttgtgtctggtccaagtacctgaattctgattcgtttctttgggttctttacagagccaaaaaaagaccgaggaagcaacaaggactaacaaaaagagtgtagctcattctgatgatgagtctgaggaagagaaagaggacgacgaagaagaagagaaagagcaggaggttgaggaggaagaggaggagaatgaaaatgggattcctgataaatctgaggacgaggctcctcagctttctgaaagtgaggagaatgttgaatccgaggaggagtcagaggaagaaactaaaaagaagaaacgtggttctaggacatcatctgataagaaagaatcagcagggaaatccagaagcaagaaaactgcagtccctacgaaatccagtccaccaaagaaagctactcaaaagcgctcagcaggtaaacggaagaagagtgatgacgacagtgatacaagtccaaaggcatcttctaagaggaagaagactgaaaaaccggccaaggagcaggccgcagcccctttaaaatctgtatcaaaagaaaagccaggtttggtcataccattcctttccaaaaaatcttccatttaagaatgaagtatatatgagtacatgctttgtcagaagcttgagcaatcttaacctttgatcttatactgcagaagtttatccaatattgcagccattttttctttcttttttctgacactatgtttaccctgtgtttgttattcttgttttagtaataggaaagagaggcggaaaagggaaagacaaaaacaaggagcctagcgatgaagaattgaaaactgcaattattgatatcttgaaaggggtggacttcaacacggtgaggatttgaaccatgaacatctgtgtcattaaattacagtaattgagcacagaagatagatatctaacaaatgctttatcattttctgacaggccactttcactgacatcctcaagcgactaggtacagaggagatattttcctagcagttattttcttgtttgatggtctttgcattggtttctgttttgtttgattaacagatgcattgtttttgcccgtctttcagatgctaagttcaacatcagtctcnnnnnnnnnnnnnnnnnnnnnnnncggatgatccaagatgagctaactaagctagcagatgaagccgaggatgaggaaggagaagaagacgatgctgagcatgaggaagaagaagagaaaaagaaagctaaaggatcgggtggtggagaggaggctaaagcttagt

SEQ ID NO: 7457 - DNA, 906 bp, Arabidopsis thaliana landsberg
  unsure (1)..(906): unsure at all n locations
ctggaagaaaaatacaggataacgttcaaattttgctgttgtcaaccgcacacccagaaggagccgggggggccttgttagggctttcagacttctttcctcttagaggacgcctttggacttgtatcactgtcatcatcagtcttctttcgtttggctgatgaccgcttctgtgtaatcttctctggtggactggattttgcagcgaccactgctttcttgtttctggctctccctgctgattctttcttcccagctgacaatctagaaccacgtttcttctttgtagtttcttcttcagaatgctcctcagattcatctttctcctcgctttcagaaggctgaggcgcctcatcctcagatttatcaggaatgccattttcattctcctcctcttttttctcttctttctcttctgccttctcctcctcttgtttttcttcttcttctttctcttcttcagattcatcatcagaatgagctaaactctttttgacaacttttgttgcttcttcagactttttttggctctgcaaaggaagtgcagaataatataatcagattaaaatacttagccagaaacattgacgggttgaccagtgatggacagttgcaaataagctacattgagattacacgttcttttcagagttaataacaagattaatgaacaagcaagccctcagctctaagctatgcattacctttgctgatcgtttggaggatgaactcccagctgtaggtgaagttttcttgggagttctcttgcgttttgctcccttacttgactgtttcaacagaatgtttttaaagaatgtaagatgcacaatagttattaaagcanacaaaactttcccaacaccacattaccttctcttctcagaaactgtagtgtcaccggtcaca

SEQ ID NO: 7458 - DNA, 1939 bp, Arabidopsis thaliana landsberg
ccaaatgacattttttttcttcaagctgccatttaacaactatataattacttcaccgagacaacagatccatgataaacatcgcataccagattttctgcacctgggaggtttcctcttttagcaagattgacagcaagctccaaattgttcaactgtgatacaaaagcatagatttcttagcatgacatgatgaaaagggtaggttataacgggaaaatagcataaaagattagcatacttggccactaataaaaggtataatggtagcctcgtttactgtagccaaaagaacttgtcctcgcctattaatggcatagaaacccccaactgaggaagcttcagaagtcaagaaaattgggtctggactaatccgatttctgtagatagcagaagcagtctctagatcgtacacaaacaacaggccaagtttggtgataacatatatcaagttaaatttgtgagagacctgtcaggaaaatgagaaattagtgccagaaattgtcactaactacttacacatataactgaaattctaatgcaatagcaaacctgcatggcaacaggaaaatcatcagcaaaatcagggggaaaaaagagatctgcttgtttttttgtaaatgatggttttcctgcaaaaaaatcgccaacctttaaagatcagatgaatacaacctagaaaacgtaaccaattatattaaataacagtgaagatatagttttgcgtcgggaagctaaccaggttgggcaccaagctcaatgacatgcaactttgatgttatctgcccagcattaaagctcttgcttgcaaatgatataagaatagaaggattctcattcccaggaacctaatattaatagtgttgcaagtcaaactacagttcaagattagaccatagatgaactcaccaaagaacaaagacgttaccttaaactgcgcaaacgatgcagcatgtgcctcaagggcctgactccgctgttgatccacagagaaaagctgcatatttcctttcaccaattgtggtctctacagaggataataatgacaagattccgtcaaaaatatacaacatgactgccgttatgatgtcttaattcaacctaatacgtggtgcaggaaccctacctcaggagagccaggggcaattccaatcaagaccaaccacttctcattaggagagcacttatagtttataatttgattgtttgccaaattagccgttctatcaaacatcttaactggctcagaatcacctggaaatatcgaagcaaaaatgagaaacaacatatacatgatatgaagaagctgacagtaagttaaagatataaaaccttcaattgaccaatgatacacagaagtttgtgtgaccagtcccagcatcttaggtgtgatccacttccaaaaagcaacctataatatccaaaaaattcagaccagtaaaatcagagtctgtctgaagtgtacaacatgaaagataatcgggttacaatttgtttgcttcaaaattcacctgctcaggcatctgatgtgacttcaactttgcctttgcttcaatgttaaatatctgtagatgatcctgagtagttcctggaacttgagctatatacgatacgaatttaagaaaaagttaacaacaaattaaggaagaaataagtaatagcttatacaaggaaacatccagtacaaaccaaaatttctagtttaactacactaagcttgagacacaacactgccacgagaaatataacacgtgttggaaaacagagagcgctatactgatgttttctacagcattaaacatgctatcaccccaaatccagaaaaagagtataggactacaacataaactcgaagagtgtagttacacttccatactacaattaataaaaataggttttctatcaagtgacgcatcacaacatggacagagtcatttaa

SEQ ID NO: 7459 - DNA, 609 bp, Arabidopsis thaliana landsberg
agaactactacggtgaaaccatgtgacaattttccctctcaagctccagataaatattttaaggaatttaatgaaattttgtctgggagattagacaggcagatactgattggtttgtattagaattccatatttttactatgattagtaaagtaaaggttattttctaatgttttctttttttatgttggtagatgtccttggacaaatcgttgatgtgggaagtctcgatagcattaaagcgaaaggcaaagataccgttaagttgagtttcgaaatataggatttggggtaattttcttttttgtgcattcatgttcgctttattattttattaaatattattcttttaatgttagtttgtttgtatttgaataaaaagtggccatcgtttcgcgtgtactatatgggtgatcttgctataaatttctcttcatattttaagaataacaatgagccggttattgtgtgtgtcgttagatttgcgtgcatcaaagagtggaaaggtaacatcttcgatattataatgtatgtagagttaagttggaaatattgacatctttttttttttcgtaggtgtatcagtatatctaattcattcaattcacg

SEQ ID NO: 7460 - DNA, 1967 bp, Arabidopsis thaliana landsberg
aaatccaagaccgtgaagaccaaatccgccgcagatcggagtaacaggcgagatatcgatgcagagatcgaagaagtagagaaggagatcggacgattatcgacgaaattggagtcgctccgattagagaaggcggagcaaaccgcaagaagcattgctatacgtggaagaatcgttccggcgaagttcatggaatcatctcagaaacaagtgaaattcgacgattcgtgttttacaggatcgaaatcaagagccactcgtagaggcgttagtcttggaccagcggagatattcaattccgcgaagaaatctgaaactgtgactcctcttcaatcagctcagaatcgacgcaagtcttgtttctttaagcttcctggaatcgaagaaggtaaagtgacgacacgaggtaaaggaagaacgagtttgagtctgagtccgagatctcgcaaagcgaaaatgacggcagctcagaagcaagcagctacgacggtggggtcaaagagagctgtgaagaaagaagaaggagttctcttaacaatccagcctaagaggctattcaaagaagatgaaaagaatgtttctttaaggaaaccattgaaaccaggaagagttgtggctagtaggtacagtcaaatgggtaaaacgcagactggagagaaagatgttaggaaaaggtcgttgcctgaggatgaagagaaagagaatcataagaggtcggagaagagaagagcttctgatgaaagtaacaagagtgaagggagagtgaagaagagatgggagattccaagtgaagttgatctgtatagcagtggtgagaatggtgacgagtctcctatagttaaggagctacctaagatcagaacgcttcgtcgtgtgggagggagccctcgtgattcaggtgctgctaagagagttgcagaattacaagccaaggatcgtaacttcactttttgccagcttctgaagtttgaagaatgaatgatccgcttatcaatttgagtaaaatccacaactcttgttgtggttacttgattgtgaatttgtttggttttgattttgtttttcggctcgcagagcaagaatctttgttggaatgcttaatgtcttttctaaatacacattaagattgtgagtttttgttatcttttgtaaatgtcagcttcatgaagaaagattctttcaaaaggtttttgctttgccactcacaaacaagaagtttggccacagctttgtgaaatttacaccaaaaacaaacgaaaaagagagagactgtatcttggtttcctcttaaacacattacaaaatgcagtattgagtcagatgcggcttgaatccctcccgaatatgtacctccttgtccagtccgacaccaccagagccctcgttcgccagctaacttgcttgctgcatcattcatgtttcatgtttcaaattctgtgcatttactataatgaataaaagagtttctcagcgtttacctggcataaacagaataccagagccactgggcgctttttccagctgaaacccagtctccaggtagttcagctgctgcttggtcccctcctagtggagcaaattgtccaaagtgcttgtacctgtaatcaagcgaagagctttcatctctatatcttggaagtttatgaggatgcaaggtcctgagttcattagattaggcatactggaaggggcgaaactgatgatgcccgccagttctgaagcgcttaggaccttcaggtagctctttacactgctccatcctgttgaagcattttgcaagataagcaccttgctgggcagcgacctatgcaaacaaacaagcagaccattgaccctgacatcctagataaaacccacgattctacgcataggtgaattcccaagtacctgagcagttgcaggcagggttttcatctgtgaatcagcctccgagagagccaatttgaatgcctcaatgtctacttctt

SEQ ID NO: 7461 - DNA, 1264 bp, Arabidopsis thaliana landsberg
agaatatgtcgccgtcaattaataaaaaccgatatatttgtgattctagaacattacctttccggggatcaatttatacatgttcaacacatcaacaacagttgtgtcaaagtgtgttgtagcatcataactctgttcaggacatgaacaaaaaaggttattagaaaccagccaactttaagatgctcactaaaaaaggggtagagaaactaaccgttgatatgaagcagttgtccaaagtgggttcgttgacaggctcatatctatcatagatgtcgaagaacagctcatcaacaggaccaagaaggtcgattccaggctggagctcggtttgagggttatcagtttcagcgtctgttgacacaaatgctatgaactttcccttgggagcaacgttgtgtgaatatgaacaacagaagacatacctgtcagttacaataaagatgtaatcatgagccgagaaacaaatatatcaatcgactcaatgttacacactgccaagttttatagagtgtatgtgttgtaatcaagaaataatatagttgagaagagtgtgtagcaaggaaggtatctcagcaagctcaagagaataattcagacaaagattagctaacacattattcaaacacatttacataagtgaaaccaaaggatgaataagagaactcacatgtctgatttgcggcccaattgtttttggggtagaatgacttgcaccgactgagaatcattggtgtttggaatagggtggctcataatggcaatcgcccgagcaaccctgccaatcttcctgacctgtttgaattggattataaaacattttaaaataatgttaacatacaggctcacattgttaaaattgcctaaaaggctcacattcataacaacagaccataaaacagagatgagagatatatgcatgcaacaaagctaatgttactgtaggatatccggtcacagccattaccttgttggttaggtaagaaggatcgcagacaactttcttgcatttggcagtctctccctcaaatgtaacaccagaaaccttaccctcctcgtcaaactctacctgttataaaagcaatattaggttatcagttctagcatccatatagttaacgacagagaaagttgcagaatcgtccgaaacaaaaaagccacaaagataaggaagtcaaagacgcaccttgcaatcaggtttgttcaacatatacgtcccaccatagacagcactaagtcgtgccaatgcctgagccaaggaaga

SEQ ID NO: 7462 - DNA, 1238 bp, Arabidopsis thaliana landsberg
tcaacacttcagtccagttgctgcaacataagtaagaaacaaaacttgttgtgaaaaatgtcgaggaaacctgagatgtctttccatcgcatcacaaatatccgtagcgaatttcacaaactttacctttccggtgattagagtatacatgttcaacacatccgcaacagttgtctcaaagtgtgttgtagcatcatagctctgtaaagaccaaggacagggttagacacttaaaacccatcaaacttaatgtaggcagccataaaatcaaaagagatctcgctcaccgttgatataaagcagttgtccaactctggctcgttgacaggctcgtatctatcatacatgtcgaagaatatctcatcaacaggacccaaaagatcagttccaggctttagttcggtttgagggttatcagtctctgcatctgtagacacaaatgcaatgaattttcccttgggagcaacgttgtgggagtacgaacaacagaagacatacctgtcagagtgtagaagtttcacaacatcagatccaacaaaaaagagagagagtagtgattacatatgacaaaacaaacatcactatggcgaaattattctgtgtatgtgcaattcaagctatggactaaagagggttcctgaataatattactttcattttccggctacatgtaccaaggaaaatcttatagcacgcttaaaaacgtatctcacaatgattgagatggagcttatgtaacacagaaaaagaaaaagaaaaatgcactaggtatttcaacttttcaagttctttcagccactggcttatcaaagttaaagtttaagaacttacatatccgatttgcgggccaactgtttctggggtatgatgacctgcactgagtgagaatcattggtgtttggaatcgggtggctcataatggcgatggcccgagcaaccctgccaatcttcctaacctgtttgaatgtgattaatcatcatataaataacaacaaaaaggaatagattttccaaaaatcctgaacaagaccacagtctagtcaatacacgaagagaagaactaagtgtgtgaatgaatataaaaactatggaaatcaaccaacataatgaacaggccaacggcaaaagtcacaagtttcatgaacagcaactttataacgatcctcctgacgtggataagtatggacacagtaattgaaaatttaaacatgctcagaactgcaatattaccttgttcg

SEQ ID NO: 7463 - DNA, 2148 bp, Arabidopsis thaliana landsberg
tcactcacgtcgtatggcacagagctcaaatccggttgataccctaataccgttaattgttcttcaagctcttctaacttgtcttgaatcttatatgacattggatggttcaggtttcccgggaaaaacttatgcatctgaccgttcttatctacaacccaactaaaagcaggtgccttcttcaaacccttttctttaatcagtttcctcactcttaaaacgccgccccagtctccagctgacgcgtagacgttagagagcaagatatagtttccgataatgtctggttccaattcaaacaactgttcagcggcaatctctgctatgtctggattgttgtgaatcctgcaggcaccgagcaacgcaccccagacacctccgtgtggctcaacagacatagttctaatcagctcaagggcttcttgtaaccgccctgtacggccaagaagatcgaccatacaagtatagtgatcctgcgttggttgaacaccaaatgtttgatacatagaatcaaatacttgacgtccttggtcaacaagtcccgagtggctgcaagccgtaagcgcaccaacaaatgtaaccgtatttggttttatctctgtctgtgttaccatgtaatgaaaaagatgtaaagcctcttgagcacgcccgtgcgtagcaagacctaggatcatcgaactataagtgaaaacgtttttgttgttcatcgacataaacacattaactgcctcttctacgtttccacatttcgagtacatatctatcaaagcagacccgataacaacgtgatcactaggagaatacccagatttctgagcaatttgaacagcccgatcagcgtatttacttgctccaagctgcgcacaagccgatatatatccggcgacagtaacctcatcagctcgaattcccgatatctccatcctatcaaaatactctaaagcttcctgaggtttagcattctgcgcaaatcccgtaaccatagcagtccaagccaccatatccttcgtaggcaaactttcaaacagttccgctgcacattccatatttccaactctcgcatacgcagcaataagctcagtccacgatatcacatctcgttcaggcatttcatcaaacaccttacgcgcacaatcaatagattcacatttcgcatacatatcaatcattgtattcccaacgtatacaaaacaaaaccctctaagtctaaacgtctgtgcatgaaactgacgacccaaattcaaatctttcattgatccacaagctttcaaaagagcagagaaagtgaaagaaacaggcgtaatctcttctttcctcatacatccatacatagcaatagcttcatcaattttaccttctatcgcatacccacgaatcactgcggtccatagaaacgggttccggaattgaacaggctcgattacacggcgagggtatggatccattggaacaccgagcttcgttaacgtgcgaattagcttcgtgagaatgtaacagctttgatcgagacctttccggagaacatggccatgaatttgcttgatttgattgagattgatgcaatcatcgagctttgagatgagtgaagacactagaagttctttttgattactgatctctgagaaggtaccggaattgttacttgttcttccaagctgaagtaattgttttgaaagcaagctaatgttaatggggtttaccgccgtcgagaaccggtgagaatgagccaccgtcatcgccggcaaggtcccggagctcgcgccgtgcccgcctttaattacccgtttccgattttcacatcctaaatcctaaaatgcacctatgtatgatattgacttaattacgaaaaatgcacctttgaagagttttgtcataaccttaactagcctttttggttaaggcccggcccattaaagtaaggtgggcaagctaagtttcataaagactttactaccctgagcggtggatcacacacacgttgaagacactagaagtcaatttgagactttgagttgtgccagttaaaagtcaagtatgaaatgctttaaaattgtttttaaatgttgtaaagcttattgttaaatttttaattcattattttttattttctgtccatgcattgttgaagaagaccaaaaaaaaactttg

SEQ ID NO: 7464 - DNA, 1195 bp, Arabidopsis thaliana landsberg
catagctattctcacctgaaagagaacacaccatcgagaatgaacaatggttttgattatatagacacaatggcatcaaaaacataattagaaaaagctgactaacagggtcttgcagtgtgtcataaattttagtccttgcagtccattctgtcaagtcaggctttatagcattactgcagaataagcaaatgtcaaacgactagagaaaaagccatcacagacaatcttatagtgtggagccaagagcaaaataaaacttacactcaagagagagaaaaaagaaaagatggttcagaaacaaacctaagatttaactctcttaggatcgcttcatgagctttttgatcctattgaagagaagttaacaccaaaagaatgataagagaaaaaatccagcataggaacaagctcattagattttagtaagaaactattcaactgaaatgtacttacccttaaaagcagaggaacgtgccaaatatttggaacatcatagagcgttactatattcacttcctgggaaaccataggaaagcagacagaaatgtttactcggacaggggtcttttgatgagaaatctgaccttcctaggctaagaagcgcaaataagaaccaaaaatttaacaagatataccggcacatggcaaaattgagatagttttgtcttgacattttcttcaagtgcctgttacaaaacaagaactgataagattaaaaaccaaaaaccatagctaacatcaacacttaaaggacatgacaatattggagcgcccattaccttcgtgctgcgacatgctaggatatttggtgtcaaaccaaggctcctgaggcctcgcacactatgctgggttggcttcgtcttctgcaatataggctcatatctccgtcgttacaaactaataaaatagaatctcaatggaagatatcaactatatagacgattacctgttcaccaacaacactgagaacaggcacaaggctgacatgaaccaagcagaaattaccaggtcctaagaacaaaagacagatgcggtgatgaagccgataagcaatagcctaagaaaattactgaatcttcaaaagttaatataaattagagcaccgctcaccaactttatacgagaattgaccaagggcctcaataaagggcatagattcaatatcacctgtacagaaaatagaataataaaa

SEQ ID NO: 7465 - DNA, 2497 bp, Arabidopsis thaliana landsberg
gccaagcattcttcacctctagtttcactaacttactacctgcaagatacaaatagacttattctagttactatcatatatcatcatcatcatcatcatcatcgtcttccaataaaaaacttctatttcaaacgaatccgaaacgaaactagaggaaatgatgatggagaaaaaaaacttacagtttgaagaaatgagcgccaaaatatccgattttctccagcaagattgaatccagaaatccgaaattgacaaattctccaggtcttcacgaaccctaggcaaccactccttcacaaattcgacatcggtcaggtacaaatccttggaatcttcttcattgaagtcgtcaaacgacattcccttaagcgccttatcgactccgactgagattgagcgaattttgctagagttctcgattaggcttctgaagatcgtcttgaacggtgtgacaacgacgatggaccgcgattttaagtaccgagaccaggtacagatgagattcacggcgcgaacctctcgagaaagcgagttcaatgtcttggaagcgactctacatcgtgctagggattcggaatcgttgattcgactcagaattttgatccagagctctggtggtaactcgtccatggtgtttcttgatttgggaaattgaaggaaaggaagaagacgaaggagagaaggagttatagaaatttggaggtacgtgtggttaaaatcccgcacgtgttaaaattgtaaacgactaaactacccttatgaattctggaaaataacaaacgtgtcatagagtgaagaaaaacccttattgttttctagatttctccgatttgtgtagtatcgtcgggattttttgaccggagaaatggggaggaggattttgaacgatgcgttgaggacgattgtgaatgctgagagacgaggaaaagcttcggtggagctcaaaccaatctccaccgttatgtcttcgttcttgagaatcatgaaggagaaaggtgaaatttttctcccttttgttttctaattggttcttgatgcttacccatttatcatttttgggatcggaagctcatcaattctcatggacactagatttagtagtattttagaagctgcaattagttcgtgagattgttgggcttacttacttgtgaagctacaacatttgaaagtttgaaacttgaaacaaagtttaatgttttttgcttccaagtttatgtttttgcttttatgatgctatcagtggtctgagttgctttgttctacttatgtatatatatacctgttgattcatattaaggatggttagataattcttctgctaaatggatttttttttgggtaatgttgctagatagcgatttcaaatggttattatagttgtaaatagctttacatgttacagattgtttgatggaatcagcttttccttagtgtgttttaactttacaaaatggtaatgttaaatgtaggttatatcaagaactttcaagtgtatgatccacatagagttgggagaataacagttgatctgcaagggagggttaatgactgcaaagctcttacctacaggcaagacgttagggcaaaagagattgagaaatacactgaacgcacacttccaacacgtcaggtttgttcattgtctctctctctccatatccagaaatgcagctaaatagcttagcctttttgatttgttccatgtagtggggttatgttgtaatcacaactccggatgggattttggaccatgaagaagcaatcaaacggaatgtgggtggtcaggttcttggcttcttttactgaatagcttgagctagcacatggcaagaaccttctagtgtcaaaggattcaacaaaagattgaagtttcggtccttctcctgttgctttttgttttttgtaacttgcattgtctttgaacagattggcaattattagataacacatttgttgctaaattcaaagatcttgttgttagtttatattttggacgagaaatttgttcttccatagctatctgaataatcgatatttcttctatacacagacgggttaacagttttcttattatcatggtaaacataacattcctgtttcgtccaccaaaatagtacatcaatcaagatattttcttctctcgatttgtcaatcgtatcctcaatcattacaaatctgactgtatatatgacaagaaacccaaacatgtaatacaaaacagatgagatatctcacggcaaaaaagctatgctcaggatgcgaaattcaagttcaaatctacaagcaaaccaatcaaagaaaagaattgagggctaattgaacaatgaatatgtatgtatgtatatataaacaaacgggaagaattcagcgacgaagagccccgagcttggcaaatatgtcatcgtaatctgggagtttgggatgtacatggctagctttctcctttgccggagtttctgggtcaagtgatgtcacaggtttggggaagcgagct

SEQ ID NO: 7466 - DNA, 1254 bp, Arabidopsis thaliana landsberg
  unsure (1)..(1254): unsure at all n locations
aggatgatactgtttttggtagtcataatatattcttaatgcagaggaacccttgaaggagatgttttaatacttgaatcgacaagaatgcaaactatccaagtcgtcaagaaagcgcatcttggtttggtcacagcactgactttctctcctgattcaaggtttttctctactcattggggctcaagtatttactctagaactattgattcaatggttccaaacaagcaaatagacatatacaaattctgaagcaaagaaaatgaaatcattgaatggttccaaacaagcagatagattgaatttgggtttggttttgcaggggattagtgtcggtatcttttgactcaagggcaaggctgaccatgattgaacaaaagggggacaaacgtacgtatatatttatggtttcccctcttgcttctccattttaacaaaagggtttccaatagaaaactaaactaaaatgtggtttttcgatgatgcaattgcagctggagtaaggtggtggctactggttttattgatagtgttgctatacgtggttgcatactattatatgaaggcaaagggtatcataccttagaaaggcctttaagtgaccacacaggacgatacagcggaatggcttgtaaccaacatatcatacgattacgctttgagttagctttttatgtttgacatctaccagaaacttgcttgctttatatcaataaaacatgtaaactaacactaaaacagcaaaagttacaatttgtttcctctttttttttttgtagacatagtaaactagaaaactattatcatatgagggatcagtaagactctttcaacacttcatcaatcttaaagaacagaaaataaacatatggtttcaactttcattgcagcttttttcatattaaaacaatgatagttacaatgtctggagactatatattgaatattcccacaggttagtaaccttttttcttttctgcgattagattatttggtaaaactaagaaatgaagattaccagagaaaagattttaattattgacgcttcctttggtagagagagtaaccaacgagcgcagacatcaaaaatgtccatagtacctgatttcaccatattggttacttttaatcattgatataaacataatgtgattagtttttttaaagcaccatgatgttgatatgatnccgtattgatggtatgccaacattcgagtcgtttaattcttgattgcatatcatctaaagcgttgt

SEQ ID NO: 7467 - DNA, 2100 bp, Arabidopsis thaliana landsberg
  unsure (1)..(2100): unsure at all n locations
gtgttttatttattgattttaacaccacaatatcggccctttatgtcctttgcttttaaagcgtctacatatgggttggtgggccatattcacaccgttatagcaaatacaataatagaaatctcgatgagattaaacaatattcttacatatttaccaaaatgtaagaaaaaaaatatagcttgatgagctcacaagcacacattgatgacttctactcatggtttcaagtttgttattgtaccaaattacctttttccttctcttaagtgcatggcttcactccaagaggacttaaatgtttatgagattctgacattaccatctctaaaggttgacacagatttggattctttgaagctttaaatcttcttcccatcttctcatagaactttgtagagaatctaagctcacctgttaggttgtttccattgatgtataaagcaccaaggcaaggcaaagcttcannnnnnnnnnnnnnnnnaaaaccggttagattgttgttgttcagaccaagaaaccttaacctcttcaggttggttagacttgtaggaatctcacctctcaaacccattttggataagtccaaaactaccaaattgctcatcttcccccaatttgttcccaccatatcctcttcacccattggattgttagataaaactaattccgttagagattggatattttcaatattcttggacagcccaccagagaatctgttgttcctcaggtccaaaagtgtcaaattcttcaaaaatcctagttcttgaggtaagttcccttctaagaggttattgcttaggtcaagcttgagcaatgaaaccaaatctccaaaagatgtaggcaatgtccctgagaaagagttgcggctcaaatccaagatcaagagctcttttaaccctttgaaacagtttgggatcattcccgcaaacgagttccctgcgaaaaccagcctctttagtctctttaagttgcagatactcgcgggtagctctccactaaatccattttcgagaaccactaaagacttcagctttgtgagatttccaattgtttcaggaagttccccaatgagaccgggattggatctaaactcgagagattctaagttagatgcaaagtttgtccacaactcctctttagctatcaccatgggagagataaagcagttgaagaaggagagagatcttaaatgctcgagctcaaataactctggtcttatctgaagacttgaggagcaaggaagcgagttttataaataagccctaaactcaaatccgtgacataccacaggtcattgtagatgtcacaagaaacaccctgaaaccaaaaacaaaaaagttttatttttcaatgtttggattttctggagagcacttagctgcaagataaaggaatgattggtgggccaatgagcatataattgtaacaaccattgaaacatttaaagaaacccccaaaaagagatgttatatgaaaataggattcactttgttgctttgaagctttaaacttcactatccgattatggaaattttcaaagaggacaaagcattttgaagaattatttgagacagctagaaaacaaaaaagtctttacacatcatttcaaaggctttttcgaagttaagtttgattgattcaacaacatctaaagctcaaaagtttctacatcattataagctcaagctcttcactatcttcaagagtctatgacaattaaggacttacttgaccgtacaaaacataactctagagaaactataaagcaagtttttaaggaaagagagacttgtaagaaaaacctgaattggagtccaaccacaaggatcaggatagagagcagatccgttccaagaatcaccaacaaatccttgaatcgcagagtacaaggcttcacgttctcttttgtccattggagcttcttcagaatcagttacttcaggtaaagattcatctccgttacatccgaaaagcagagatagtaagagaagagaggaaaaaaacgtttgccacaacattgttcagacagagaacaagaacaggagaaacagagcgtgtgatgtattttggccttcttctatttgggttatgagt

SEQ ID NO: 7468 - DNA, 1463 bp, Arabidopsis thaliana landsberg
  unsure (1)..(1463): unsure at all n locations
aaaataattggcgtttcccaaattcgtttgtttctctcgatccgaaatatgttaagtttagttataagaggaaattacattacaaacatatacaaatttttagattaagacagatggagaagaaaccagacttgttacatccaaaaggatttgatttttcttctctttaagcaaacaccgacatcaaaatctatcaaccaacacatcaatactatttaaccatcaaacaaaaagttaacaaactaacaaattcaataataatataagagaaagctccaaaagcaaatcccacatgaacccatttgacaacaacacatgtctagtaaccatcacacccatcgatgaacttgactcatcctccttcttaaggttgctccaagtttgtttaattaccaaactatcctctgccttctccatcatgcaagacttcaatccaacaacatattgccgagattctgacacaacatcctgacaaagatttggattctttgaagccttaaaccttgttcccatcttctcatagaactttcttgagaatcttagctctcctgatagattgtttccattgatgtatagagcaccaagacaaggcaatgtctcgagctcttttgatgggacagtgccggtcaagttgttgtcgttgagaccaagaaacctcaatcttctcaaacttgttaaacctaaaggaacctcacctcttaaacccatctttgacagatccaaaatgaccaaattgcccatattctcccactttattcccatcatgtcatcactgcccattgggttccctgataaaacaagatccgttagagatggaatcttttcgatgttttcgaacaaccctccagagattctgttgttccttagatccaaaagtgtcagattcttcaaaaacccgatttcttgaggcaacctcccttctaattggttattgcttaggtcaagcttaagcaatgaaaccatctctccaacagacaaaggcaatatccctgagaatgagttccgactcatatccaagatcagtagatccttaaacccgttgaaacaatccggaatcgtcccagtgaacaagtttcccgccagaaccaaccgctttaacctagttaaattgcagattctcgtcggtaacttcccgttaaacccgttttcaagaaccaccaaagacttcagctttgtgagacttccaattgtttcaggaagttcaccaatcaaaccaggattggatctaaactcgagtgattctaagttacttgccaagtttatccaatcctctttaggtattcttatcggcgacgtgaagcagttgaagaacgtgagtgatttcaagtgcttgagcttgaataactgtggctttatctccaaacttgtggcgcaagaaagtgagttttcatgaacaggacctagggttagatccgtgacataccacaagtcaccataaagatcancagaaacaccctgaaaat

SEQ ID NO: 7469 - DNA, 2221 bp, Arabidopsis thaliana landsberg
catgataatgcttcttcgagaaggaacgtccataaaatatgatgatttgattggtagtcatgcaacttcttcattttttaaattcttgtgtacgtaaaagagagagagaggggaaggacaagaaagcaggaggaccaaccaaaaatgggatattccattccagagagagccaaaaatagtttgggacagaatttgaaagaacacaaaacccaaaaacttcaaccagagagcgagagatagaaagatgatcaccgggcttgctttgtcacgtgttgctttcggtttaaccgccttcctcctcctcgccgtcgttagcagccaggagaagtgcagcaacacctgcattgcacagaactgcaacagtaagattgtttttttcttatcatcttagttcttatgccttcctttgattttggagaaaaaaacttgtgcatgcattatatgttttgatccaatctttgttttcaggtcttggtattcgctatgggaagtattgtgggataggttactttggatgtcctggagagccaccttgtgatgatcttgatgcttgttgtatgactcatgtcaattgtgttgatttaaaaggtaaaccaatcaacaacataatctatgcatgaaaaccattcttgagttaatatttggtttttattaggtatgacttacgttaactgccacaagcagttcaaacgttgcgtaaacaagctaagcaaatcgattaaacactctaacggagaaaagattggattctccacacaatgcccttattcgatagtgataccaaccgtgttcaatggaatggattacggcattttcttcagtgggataggtaattattgagctctgattttgtgacattcaatataagctagtactagtgatgaaaccacatgactctttttctgttacattgtgacatttcttatgataagatatatgtgaataatctctgcgcagggaatatatttaatcccccggtgctgggaagcgtgcccgtcgtggaggtggatctcgctcggagtaaagtggacacaaaggatggccttggaacaaaactagaccttcaaacaaaagaaggctccaaagtctctgcttctttaaatatatgagcccttctagtactatttcttgatcatcttctaaagtgactactctctgtaacttcgttgttatagaaaattcataaaacaaaaaaagactttgaattctgtcccagatcaaaatcaactggcaatcaatgactcagtctatgtattttatctattattttggatgttaatcacatctttaataacttcactaaagtcaaaacgtgacattgtcactaattccatcttataaaatccaggttgtcttcctgtccttagtgggaagtatatatagttactgagccaatgatgaaagaaaagtctacaaacacctggctaataccataaagagtagactttgcactttttggtttttaattaagcttatcttactcgcacgtagtctgtttttttcctgaagatggtaagctgaagaacttctgaaaaaagagagaagaaaatgagggctaatctcgttttcggcatattttgtgcccttgttaccaccattttagttcacggccaagaccaatcaggttccctcttctcctctctgttttgatttgaaattgaggcgaggttcagactgaagaaagcttgagttttattatgaaaagtttttgtcttttaaacatgtcttggatttttagtcaaacccttatacaatgtcttgtgttacaagtaatcatacaattctcccttttctctgttttctaatttgaaattgaccgatgttcttgaaggttcttgaaagttgtgatctacgtttttgtcaatatagagaaacgaagttaggcagatttttaaacctatccatgaatttggcttaaaacgttctcagacgtcataaacaattttacttgtgttggaagtaactcccctttcttctcctctgatccaggttacatcagcatcgattgtggcatacctccttacgatacccctgaagacactatgactaacattaattacgtctccgatgaagctttcataaccaccggcgtaaacttcaaagtctctgaagaatacggctatccaaaaaacccggttttgctgtcaactcttgctgaagtaagagctttccctcaaggaaacagaaactgttacaccttaaaactttcacaaggaaaaga

SEQ ID NO: 7470 - DNA, 621 bp, Arabidopsis thaliana landsberg
  unsure (1)..(621): unsure at all n locations
acggggggtatcactgttgaataagggcattccttggaatttccttccttttggttgttagattcttggatggagtgtttaagctcgtttacgcaacgctggaactgcttgtggcagtcaacataagtcatacctgtaaaaaaagcaccaaatgcagcattctcagatccaagatgcagagtgcaattagatttgtagtggacaaagtagttaaaagatgttaacttcactttgtgtttctctgtttatagaatagttttacgtagatattcttgattggtttaccttttaaatcaacacaattatcatgagtcatacaacaatcatcaagatcatcacaaggtggctctccaggacatccaaagtaacctatcccacaatacttcccatagcgaataccgagaactgaaacagagataggttttgcttcagaaatgttctccatgttcaaaggaatgcataagaaaaatgaaaatctcaccattgcatttctgtgcaatgcaagttttgctgcacttttcctgacantttgatccaacccatcagaaagaactagcaataaccatcatttggaataaaccacaacgcacaaacatgaacaaagaacagtaagtgatatgt

SEQ ID NO: 7471 - DNA, 1833 bp, Arabidopsis thaliana landsberg
tgaaaatgtttctcggtgtggtgaaaattatttcttggtttatggattggtacttgtccttaagaacatccttcttctggtatatcaaactcagcaaccatttcatcgtttgataagttttctgatgatgtatctcctgagagcatggctaagacttcatcgctcggtctcatctatgtgatgcatcaaaaaatatatcaatcaaatagggataagtatatgatcatgataaacattaggtgcaggaaatcgacaaacaaatgtaaatatatagaaatatacttggatttggtgattttggagtttagggtgttgtagcgaaggttgtttgtagatatcaacgcattcgtattcaggttcttgaggctacaagatatgagaattttttttaactttatttgtattaaatatttaagtttatatcaaagtgcttacaaaatggtgacagaccttagtattttgtgaccttccatggaagcaaagtaatgaaagagagaatatgatcaacaaccaatgagaagccatttgcttaatctgcatattttctatgttcagcagttggtgataacagaggggagccaatatatagggaggaggagggggtgggtcaattatgacatatgaaagttcttaattatatggtaatttactttataataattaaatgttttggtataaaatcttcatgttgatgccatatgatcatttcctacctttgaccccattcataatatttttttggggaaaaaactatattgacccaatataataatatttttaagggtttaattagtaaactaactcataaaatataaaagttaattgagttattttcatacctaaaataccttttattgctttgttaggcttataacagcttcaacaattccggttgagcttgggctgaacaagaactccacggcccatcttcacacatagaaacccaatcagctccaaaccagctcaattcttaaaccaaattggaatcctgaaccacacatacgttctacgttaaccgaccgattaagctgatcgaacgtgtgaccagccaaactgatcttcatttttcaccaaccacacttaaaacaaaaacgttttttcttaaaagaaaatttaaagagacaaaacaaacaaacaaaacttcagtctctctgcaaagctccatcctttgtggttgtgtcgtagatagccattcgagtggttaaaagttgaaacttttatgtccacttgaatccttcttttttttttggattttatctgatcactcgttttgtgtctctgaatctctatcccgtggattcgcatctcgattgttttttttttccatttttattcgagcggcttatctttctcggatccatctgatatcgatttgattctctctggtcaatcgttggtaagctaatatttaatcacttttgattgaattttccttctgggtttttgatctgatttcacctcattgtcttatgaatccaccatttgagttctagggattaaaagattcaaactttctcagagacaactgaggaaaaatgacatgtttttagagtttgagtttggttacattttcaggttttgttaagatttatctcattgtcttctgaatcctttgatttggtaatgattggaaatgatcataagattcctactttcttggaagcaaaataaaaatatccactttttatgagaaaaactctttgaaacgtctttgttatattcaaacttggtttgtttatacgttttgattggctaagtggttcaggtcacaagtgaccaaagtattgattttggatgatgatatagatggtttaagtggttaggttataagtt

SEQ ID NO: 7472 - DNA, 1021 bp, Arabidopsis thaliana landsberg
attggaagctgcatagcttctttgcttggacaaggtggaacagacaaccaccgtatcaagtggcggtggcttcgttacttcaacaacgatagagaccgcagggatctgattacatgtggctcagctgcaggagtgtgtgcagccttcaggtcacctgttggaggtgtacttttcgccctcgaggaagttgctacttggtggagaagtgccttattgtggcggactttcttcagcacagcggttgttgtggttgttctaagagagttcatagagatctgcaattcagggaagtgtgggttgtttggaaaaggagggctaatcatgtttgatgtgagtcatgtaacttatacttaccatgtaactgatataatccctgtcatgttgattggtgtaatcggtggaattcttgggagcctgtacaatcatcttctgcataaagttctcaggctttacaatctcatcaatgagtaagtgttagctattcaatgagtcaaaacccgttaagctagttacttactttgtttggtcattttgcaggaagggtaagatccataaggtgcttctcagtcttacagtatcactctttacatctgtttgcctttatggccttcctttcttagcgaaatgcaagccttgtgacccctcgatagatgagatatgcccgacgaatggaagatcgggtaacttcaaacagttccattgccctaaaggttactacaatgatctagctactctgcttctcaccaccaacgatgatgctgtcagaaaccttttctcttccaacactcccaatgagttaggtatgggttccctttgcatattctttgtgctatactgcatcttggggcttttcacatttggtattgcaacaccgtctggtctcttcctccccatcatcctcatgggtgctgcatatggccgaatgcttggcgctggaatgggatcatacacaagttttgacccaaggctttatgctgaccattgagcaactgcactcatggctggatcgatgagaatgact

SEQ ID NO: 7473 - DNA, 2710 bp, Arabidopsis thaliana landsberg
tttctatatatactacatggtacatttattgtgtagctctagtaacattgatgagaattgaaaacaactacgtgttaccggactgcaatgacagatcatattctggtaattaaacaaatgttatgatttacatgtgggatttggctcagtagatacctcctcaatataaacctatccattatccatacattttcatttccttcaatgccgaataaaatacaacttagaaaattatattcttaaaacaaataaaaagaaaacatagttggacttttcttagacctttcaaaattcggcgtcaagaataaagaacaaaaaaaactttcaaaattcaaagtctcatcaaactcattcttcaagaaagactctctctcttttctctctctatgaagaagctttgccggaaaggaaccgttcatccatcgccgccgccggcgataaataccgacgaccagtttctatctcttctccccgtagctatcctctctctcgtggcggcgctctcggtggaggatcgtgaagttcttgcttacctcatctcaaactccggcgactcaaatcgtatctctcgtctcaagaaaaacaagcccaataaagaagataatcatcactctcctctctttctttgtgattgttttagttgctacacgagttactgggtcagatgggacacgtcaccgaggcgccaactcattcacgagatcatcgatgcttacgaagatagtttggagatgaagaagaaaaagaaagatcggagaaagcgatcgggaaaagcctctggacgagttaatttggtaagaacgagtcgactcagtgagttgggttcgagttcagccgagtttgctggtggtgactcggtgaaagatggaaattgcggtggtgaagaggcggagaaggagaaaggctccgttggaaaggttatgagtttcattggtcagagatttttgggagtttggggataaggaaatttccaaacattttggtggaaaaaatgatgaaatttactaaaaagacaaataaataaactaaaaagtttatttttgtaaaatttatttctggctcaagcttttttccagagattttattttttcttttcttttgcatttccgttaattttaatttttccttttaaagggtttagttcatgtaatatagatgtttaactacgcaccctgtaatttttcaagtttaagtcaatgtattataacatctaaaatgaaatatatgtgtatcatagcaaataactacactttttaaagtacctctgctttaaactttctgattggctctggtcgatgatatcatggaatcgtaaacatgaaaaaataaagaattaaaaaaatatacatttatcttacaacttataatttgtaaagacgaaataagtgaattctttacacttgtaaaaccggttagctagcaacttccaaaatcatggaatatttttttttggtgtaaatgttaaattatattcacctaaaacaccattttacaaataatgcatcgtaatatcgaagaagtttgaaagtttttgaaaaaaaattaaaattggctataggtatggaaccagtagcgtaaaccactttcatagtctgatggatccgacagagctaaagtattcagccaatttctaacacttttctcgatcaagcgggtgaggttagaggctggcggagtggcgggtgagtttggaggctggtgttggagtatctttgtgccttcgtccattcctctctcaccaaatactgtaggttgtaagctgaaacacatatcgcaacacgaacaagtgaagacttggagtagctgagacggagagtaagggaagaagtgactcccatcttgccgtgaaacagttgtttagcatgtcacaagcaagtgctgaccaaaacttgggaggaagagtttaattttattgttccatcttcacgagttaccataatttttactttaggacatacgataaaaattgcatattactacaagtaaagtcactacgagtataatttttgtgattaaatggtttaaaatgtgtcggaaagtattttcaaaaatccatttgacagttgattcgttgtcgaatgctatttggaaaacatcgttgttgctgattttaccaaccaaaaacattaaataatataaagctatatgaagtagtatgagttaggctatatatataatataaaaccatatgaattatgaattaggcgatacatataatcacgtagatacatacaaaaatagtttaaagcatgtccacaatatctggtgtgccggccaccaccaccaacaagcacttttatgcttcccatgaacataaatgggattggtacacctacgttaaaaaatacatcacctgactgtttggaattttatatcctaattccctattctcatgtatataattcctgaatcaagatatagttgaaattacttttgctcgaaagtacaaaggcataattttatttttattttaggttaatacttcaaagtatatgaaaacaccttgaccaaattgacaaatagattatgaattatatatcatgatagatcaggggaatctcagggacaaggatcgattcagataaatgctaggttattaagcttacaattactaatcaatcatcccttgttaaatcgcattttgaatgttttgatggacgagttcaagattgttcgttacatggtatcatacaattatagatagacttag

SEQ ID NO: 7474 - DNA, 1031 bp, Arabidopsis thaliana landsberg
caacatttcacgggaatcttctctattctttgccaggggcggaaatgaggactttgcgggattgttttaaatacctccattgattcgagtatcttccaaactggtaacttcttctcaaagagtaaaaccgttgtagtatccttgactttgttttcctcaacactagaacaaaggttctcttctcttttcctctttcgattgttattttcctgcatagaagtaagaaataaaaaaacacaaaggtgaactatcattcaatagatagataacagtcaaaaggattaagataataagccaccagctaacaaactacatagaaagtgagtattataatgttaaagtgaagaagtaactttacattctctagtgttgaatcgtttcctgaaccattctgattctttggaagtgtcttcttggggaatgtctttctttgagtttcagcctctgattgttttaacggtgtcatagttattatgcccggaggtggagttacaggtggatcagactttgctggaaaacattatgagatcaacattcatgatacagaaactgaaattggatttggagaatccgttagaggagagtgttaccaacttaccattcatcacagaatcacctgtgttatctcctgatccctgagttaaagatgattcccttgtctgcaaatctaacacagatcagaaaccacaacaggatgataataataatacagagactttcaaatgcaaaccatcattacacatcaaagaaatgcagtcaatggagcatgttttttgctgaagattcttgcaaacctagtgttaactgaaagtagtgaaaagaaaacgtgaagtaccttccaaacgccatcttcccacaccctcaaaggcctaagatccgattgtttgaacattaattgcttctttgtagcctctaaaagcaatattttccaattctgaaagagagatcccatcactcctccttcactttccacaactcgtccttgacgccatcaaataccatcatgatacacctcaatgtactcatccaat

SEQ ID NO: 7475 - DNA, 2396 bp, Arabidopsis thaliana landsberg
tgaaatgaaccaaactaccatgaaatggaatgggatacatagaatttataagctttttagttttattccattcacacctacaaattatgtgttagatatagtacattatcgagtttttatggttaaatagttgtcatgaaatattgtgtaatttaaatctaaccaaagtaagaaatttttctttattaaaacaagagactgtatgtacattttcttgaagagagtaattttaaatataattgatagtattaattcatatagctttaatttccgtgtcactagtatttcggacctaattttttctaactaacattgacaatcaacaaactccaataattaaatacatgtcattccaaagaagaaagtaaacatcgcattcataaaaataaatttacaatgtcataaaaagaaatttctttcaaacgcttacatgcactatacaaactaataaatgaatcaaacttaaaaacaaaaactcaaatatacaaaggcgaaagtatttgtcgccttgaataataaatcaaataatttattgattatgttgaaagagtgtttaagcccacacggcgacgaccgacattacggcgcagccaagcaaagccgccgtgaagcacttgatctgaagtttgatgctaccttggagcattgaccccatgaactcggtagctagaaggtcgacgagggccatgtagatgagcattccggccgagcaagcatttaacagtccaatcgtaatcaacgcggttggactgttatctctatagatactcgacaatgcgattccaagaaagataccacaaggtgttgttccagtgaaaaagaatgccatcaagaacttcttcacatttgtaaaatctgcctgttaacataaattatatacatatgaacgtaaatttctaattgatataagagacataaactatatagtatgaatgtatattcgtacctggaggatgcagccaccaagacctatgccttcgaacaagtgatggaagcaaagagctatgatgagtcctttaatggtacatgaatcattagttgctcctagagatagtccaatgaccacagaatgaaataaaatgccaacctccaatacctattcatggtattcaaaaatagcttgagtatggttatacatattaatttatgatttgaactcaagaccgttttgtagtattttcatatgtactaaccatggcaatgacttggtagcgcaaaagctgtccatcatctttagttgctagcactacaccatgaccgtgactatgattgtggcctaccatgtgaatcgctttctcttgatcaatgccatactcttcatcaggcactggtccgactgagttcttaccggtataaaggctggtggtaatggagtcaatggctagagtgactagaccggacatcatagcgacaaaacccgcaaaagggaacttatgccacggattatcactaagacatttcgatgacaacatctcgaaagagtcaggcaagacgtgcatgaaaccggttccaaggatgattccagaagaaaaacatttgacgatcatgaaaccattgccatcgggacggaggaacgaaatgtaacggctgaaaagaggagaggtcacgcctatcaagcttgttgtaagtatggcaacaatggctacgattttgagtggtaaagccttagctttgttgatgcacgggttatcaaagccgctatcacaatgttccggggccgttgagatcgccggagatacggtgaaggtgaataggatgaggagaatgtagacgagcttggtagtagccattagtattgagattgttttataatatatgatgtttgaatttttgatgagataaattgttttgtctttggttgtcttatatagaagatttgccggcttgttctcggtgctgctgatttggaaagtcaagttatgactaaatcaatagaaaaaagattacactagagaatcggaatcctgattttattgattgtgtatgtacattatcagatagaaaaaggttttaaattgtattttatattatcctatacttttgtttaatcgtagagaagcctcgaaggtgtggatcatgccaaacgatacatgtaatgtcgtattattttactgtcaaaatgtattgctaaattggtttaatgttgaaataaaattgaactaccgacatcgctgaattgaatatgttgcaatttacaaactgttaaaaaacaacaaaatttgtcgttttctttgtcatatccattggtaatatgtcgttatttcctacttcaaaatttgtttatgttttcattattagcaaattaggaatcactaattagttgtgatcaaaggaaaaatctgagtaggccatctattgatattgggccacattgatatgtctaagtaggcccatat

SEQ ID NO: 7476 - DNA, 844 bp, Arabidopsis thaliana landsberg
tagataaccaaaatctataatagcgtgtgattatgagtgggaggaaaacggaagggtacctgtgaaaaggagagacgcgaaggcccaagacgtaagcgagtttagtgtaaagaggcttaacgacatcgttttgagatttgtgatttaaatcgagtttttggccacatgtaacggttttgatacatcctctaatcatgcccactatctccttcttctccgtacccatctcagccacctgttacagtcccataatttaaattttccgttattatatgtttttaaccttttataataaagaggaaactttattagttatagttactcgggtatcatttggttgcaaaaaataatataaatgatgagtcttttgatcttatcaagaatcggaaaaaaatagaaatgataccaaaaaaagaaccgaactttaattgtttatggaaaatgggttttttggattaaccaaaggttgagaagttggtgttctatgttttctacttctaggttcaaaaaacaaacagagtttttgaagagacatacaagtaaaagaagataaaagattgtgaaacatgttattaccagcatgagataggaaggtgaatgtcggattctacaaatcgggtcacccaaaaggtcggtgaaaagagaaagcttgccgcttggtccgacttcacaccgtcgttccacgtcctccacgccggctaagtctcgggtcgggtcgtactctctaaccaccgtcatgttttggttctttcagagtgagaacagaagcagagtaaatagagagagagattagagttagaagaagagttaagtagatagggtttaatatatagagagggaggta

SEQ ID NO: 7477 - DNA, 3446 bp, Arabidopsis thaliana landsberg
tcctgttttaaaatcgtgtttggttagattgacccatgaaatgttgacatattttaacattcctaaatatgactaaaaatgattaaagatatttaataatatatttgctctattaaaaatgattaaataaataataataaaaagtatttccaaataattttttaaaaaacatgtatttataatatctccaaataaaacataatcatgatcagaaaatccaattaaacacatatatccataaaaattaaaatagtttcgtcaattcaatgttaaatcattttcatctaagttaggaatgaatgttttaagtttgacaaagagacgaaaaaactttagaaatctcctcccgtttaatgaatcaaaattatagtctttgtactttttggatgatctcctaggcgatgctccagatccggatcggtccacaacagtccatcgtctcacctgataagtttgacaagatctcattcattctcctggagttggttagcattccaaactaccatttaccatctatacattttcttatacattttgttacttaacctgcacaattatagtagttacgtcactttttagtacttgtaagattttgccactagtttatagtatatacattacatataagtacaatataacattccttactcataagattttgcttatcaactacagacatacatagaagttggaacatttttagagcccaaaggaatgggcctagtatgccgaagcattaatttattttattttcatcaaaaaaaaaaagaaaaaagagaaggcggtttataatgccagcaaactctgcaagggcaaaaacgaaactcatcgaacaaatttcgaggctttgcttcttgaatctcacaagaagccgtacagcttctcagctttctagtgttttctcgggtagaagagagatagagagacagagcaaagcctaataagcgatggggaacaagagattcaggtctgataataatgcagggaaaccaacttccgtcgaagctactaggatttgggcgactaaggtcatcgaagactttcgagcctctgggaacgaaggtgaatttagctccgggaaaccaagtcttctcctttggattctaattgtttccttctctgaccgattctttccagaaatgattttatgagtctgagattgattacataaagctctaatctttgggaattttattgaattttggttgcattgtgttctgtagtttacacgtttgagcataatctatcaaataacgaacgtggagtgattcatcagatgtgcaggaaaatgggtattcaatcgaaaagttctgggtgagttagtgtttttgggtttgagaaagtattcatttttattgtttctgattctgggggatgcttttaataggcgtggggaacaaaggcgtctttcgatattcaaaagtaggcataagaatggaaacaagaatgaagctaatgagaaatcaaataaagagaagctcaaatgtgtgtcatttccgccgggagcagatgttattctgcaggagttatttactcattacccaccttgtgatggagatacggctgcaacatcgtttaccaagtactctggtaacaagggtaaacacggacaatggaaagatgattttttccggaaaccacagattagcagtgaggagattctagaaaaagtggcatctttgagttctagacttaagaaggataaagctcttaaggaggttaggattaataccctgttgctgagatgtgtgtcttttgtttgaaaggactgtaatttatgattctttatccggaatacagattgagaagttataaatcatgtcaagtatcagcaagtgaaaggaaattgttttttgttgatttatgttacagatcactaagctgcggtcaaagcttcccatcacatcctttaaagacgcaattacatctgcagtggaatccaatcaggttctgtgaaatttttgatatgttctctcttagaatttactaattgtatggttatgcttgctgtggtgatttccactgcttgaaaaagaattcatcatacattcttattgtaaacgcaggttattctcatttctggtgaaactggttgcgggaaaactactcaggtgtttgttatcccttgtttttcggtagtctagtagaatgatctccttagaaattttgcttactgtgagctgcgattgtgatattagccatgtaaagagtgttcagttgaatttgcgttcaatattttcattctcgaggtttctcaagtgcctccattgtttaatgttttaggtgcctcaatatcttttagaccatatgtggtcaagcaaaagagaaacttgcaaaattgtttgcacccaacctcgtcgaatatccgccatgtcaggttgacatttttttattcagctatgtatttgtgttgatcttttgaaatttcaagtttatccacatgtacgctgtataatgcttaccccttactgtctttttatccctcttttgaagtttctgaaagaatatcttgtgaaagaggtgaaagcattggagaaaacattggttacaaggttagtaatctttgtaggtagacatatttgcgtttgtacatgaaaggtgattgtgtttcaatattgtagacaagtgcaccattgactttatatgtaaatctcaggttcgactccaaagcaaaggtggaaggcactcatcagttgttttctgcacgaatggtattctcctgagggtgcttgtaggaaaaggctctgttagcagtgtttccgacataactcacatcattgtggtactttacatatttcttatctgctctgctatcatgtgcctattacgtgtgtgtttcatatgtatgatgagtattatcggaaaattaaatcgcttgtcaactgtcactatgaaaagccttcttgttgctgtttgtcatcccagatcctctacctttcactttggctttaaatttaattctgtagctttctacattgatcagtgcgttcatgtctttgtaggatgaaatccatgaaagagattgctattctgatttcatgttggcaattataaggtagacatccttgctctcaaacgttgaggttctcaacttgtcaattgtctattaatcaaatcaagtgtatgtgacctaagaaactgattttaaggctattgtttaatgccgcaccataatttatgtgctaaataataaactggtacacatgtatttatcttctcttaagccgcaaaccatgaaagaagataattaatttactttctttgaatgtatgatataactcatatgaatttctgatgcttttgttgatttgcagggatttgcttccatcaaatccccatctccgtctggttagttaagctttatgttcttcttgcttttcactgcaatggtacacttataacaagagaacaaaatgaagaaggattggctttgtttatgtttcttt

SEQ ID NO: 7478 - DNA, 1565 bp, Arabidopsis thaliana landsberg
  unsure (1)..(1565): unsure at all n locations
atatagtaagaaagataaatgatttagtgaattcactaatgggcctgaatacaaattttgggcccaaagatctctagtaacagaaaatgcgtgatcgaccaaagcgtcaacaaaatcctgatttctgagctttaaaccctaacccctctcttctctcttctccacgccatttccagaattttcaggtacttcctctcgccattttcattatagatcgaattcttagtttaagcgagtaaagcttcagattcttcggcttcaattttgtgatctaagtttttgtttcgtttcagctaatttgcagattatctttgtctctttttcgtcgatccaagttttccttgggtctaatctacaaacgcatttcgtttctctatttatctgtttctgccttggattttgattgggtttcaaatttgcaggtgttcgtgaaaagatgaattttaagaatgtcaaagttcccaaaggtcctggtggtggtgttatagctgcggtggttattggggggctcagtctttacggtgctacgcacactctctacaatgtcgatggaggtcatcgagccattgtctttaaccggcttgttggtatcaaagacaaggttagtccctgcaaaaattggtttcttctgaatctgtatattgacaatgaatcttgtggttgtgacatctagctgaagttaggttaggcttagcattactagtgaatcttatgtttgcggcatatagctcacgttaggttaggcttaccgttagtagtgaatcttgtgtttgccgcatctagcttaagtaaacaaggttgatttcttagtctagttttgatagtcgtttacaaaagtcatcttgatgcgccattaatagtatatctttgcttgcttgattatgtaggtctaccctgagggtactcaccttatgattccatggttcgaaaggccaatcatctatgacgttcgtgcaaagccttatctagttgagagcacatctgggagccgtgatctccagatggtattccgcttcatttcatcacttctaatactaatgggataatcaggtcgtgtggttttgtcgtgtgaactacatgataagcttatgttgtgtggtatttaaacattcaggttaagattgggcttcgggttctcacccgtcctatggctgaccaattaccagaggtataccggtcccttggtgagaattaccgcgagagagtcttgccttctatcatccnnnnnnnnnnnnnnnnnntggttgctcagtacaacgcaagccaacttattactcagagagaggttagccaactggctgtaaatacattttattgattcctcttcaatggtaaattgatgtcccttttaatggatatatgtttttttggtgtttttcaagtcggtgagtagagaaatcaggaaaatcctaactctaagagccgcaaacttccacattgcactggatgatgtgtccatcacaggcttgacattcggaaaggagttcacggcagccatagaaggaaagcaggtcgctgctcaaaaggcaaaacgggctaagttcattgtcgagaaagctgaacag

SEQ ID NO: 7479 - DNA, 1984 bp, Arabidopsis thaliana landsberg
ccacctaactacaagcaaggaaagagatcgaagaacaagaataagagcttcatgattaattttacctctacgagatctttcaattcgtctccttcttcttcttcttctaaacgagaagaggaggttctagacttgtttagttttagtaatcagctacaacgagaagacgctattaatccttgcaggacaagtggtgaaaaacgcatcgttttattataataatgttaacaatatgggcctttcacgatggcccaataaaaacattattacaacgtctattaggatagcggcccacgtctcaaagaaagttgagtcataaaaagccgccaatttcaccaaccacgtctcaacttttgactaaaaagtaaacgtaagtgtagactacagagggtattattgtcagattctccataagcctcttctctctctcagagtgtggtttcatactatttatgtaaaaggaagcaacgggtgagaagaattaaaaagccgcaattttgggatcataagagttctcttcttcatctgtgattcattccgttgttacccgccccaccagccaccgtactttttctctctctccggcaaaatccgagtctaaaaatgacgagtaagagcaaaatcctgttcatcggaggaacgggttatatcgggaaatatatagtggaagcgagcgcaagatctggccacccaaccttagttctcgttcgaaattcgacgctcacaagcccttcacgatccatcaccatcgagaatttcaagaatctcggcgttcagtttctcctcgtacgtatctatctctttacgctcttctctttcctttgatcctccgtacaaatgtttacttcaatggtttagtgattttctgattctgattataatactaaaactggatagggagatcttgacgaccatacgagtctcgtgaattcgatcaagcaagcggatgtggtcatctctactgttggacactccctcttgggacatcaatacaagatcatctccgccattaaagaagccggtaatgttaaggtaatcaactttagtctaaatcttagtctcatatgacatttggaacccctacaaatgaattttgttacttcttgtattgacaatgtagtttgcaatgcattggttttggtgtcttctgtgatactttttagaatcaatgaacttggatgttgtactaagcatagagttgagtaacaattttatagactctgatatcaaattgaccctccaactgatgcactaccgtcacacctgtcttaccagagattctttccctccgagtttggaaatgacgtagaccgtgttttcactgtcgaaccggccaagtcagcctatgctacaaaggccaaaatccggcgaacaattgaggccgaaggaatcccatacacttatgtctcatgcaacttcttcgctggctacttcctcccaactctagcttaacctggtgctacttctgctccacgggataaggtcattgttttaagggatgggaaccccaaaggtaagactactcttagttttcttataatacaaatcgagatccaaattctcttagagtaatatgattatgtttggtttaaaaaacaccaaagtgaagctgaaaggtctttgtcagaaccttataacatggatcaaaggatactatgtttcaattatctgaaacatccgcagtttcttgtccagctactcccttcttattgaggtgatattttgcagctgtgttcaacaaggaagaagacatcggaacttacacaatcaatgccgtagatgatccaagaactttgaacaagatcttatatattaggccaccaatgaacacttactcattcaatgatcttgtctcgctttgggagaacaagattggcaaaacacttgaaagaatctacgttccagaagaacaactcctcaaacagatcataggttttgatcctaaacctttcttcttcttcttccaattatgactagatattat

SEQ ID NO: 7480 - DNA, 1060 bp, Arabidopsis thaliana landsberg
caaacatccatatttctctctgtaaacctcaaattcatcttcattctccttcatttcctcttccctcttcgccaattcactactcatagactgcaaagcttcttggtcatactctgcttgttcatccatcattctttggtactgcaaagcctccatttggacagcagctttctcggcttgaagcctcgtgatcatagccatcgcttcgttggctgcaacagctgaagcacttctctcttcatctaactccatatataaatcaatgagtgacttcttgtccaagcgaacctctttcttgagctgattaagaatggattcaccggttggatctgtcgtgtccgaagcattctctgtcttattcaaaacggatttcttaagagatcgaacggaccatcgtggactgttttgcgccgaatcagacagagggatcccaaaaaacttgttacctcctcttacaaaacttggtgttctgtccacatccatatccttaaactcagattcgttttcagacagtttgttgtgcgataccctaggagaaggagcaggagcaaggaaagaattgttgttcttcggtaacttctcagattttatcttcaataattctccacaacacgaacaatgttgcttcaagctatcatttttaatgttgttagtcttgtaatccaccagattttttgttgtctggactaaattgtcgtctttcttgaacgccaagggaaggtctcgttcatcgtcaatgagaagctcgagatctttatgtaagatgccaatgagagacttataagtatcacagtcagaatctttctcggtggcgaaagagagaagacatccttcacacatatgtttaatctcagagagcttcttatggacatggcaataagcaagagaagatactttcttcttgtgagagtggcagattgactcgttgtaatagaattgagggtctctagggacgagaatgtggtcgattctggtgcagagaagacaaggaatgttgaggtcgaagaatttgcaaattgtttgacagaaggcgatacgccgtgatgaagagaaacaatga

SEQ ID NO: 7481 - DNA, 2106 bp, Arabidopsis thaliana landsberg
aaatcctagccttttaggtgcattaagcatttttcaaactaatgttgggttcgtggaaacgagtttgtaaatacatgggcttacgggctttaagaaccttttaacggcccatatttggtcacattcgaaacaaggctaccttgaaaccctaatcatcgaacattaaaacctgattttactgaaactgtgctgcgaaggagaagccgcaaaccattttttgtcaatctagggttcttcttcgtacttgcagatttcgcctccgttttcactacggttagtcgcaaatagttgatattccttatactctcttgtccgtagttttatgttgagtggaaatgctgatgttttgtctgaaatcttgtagctcactttaggtgtaagattttagctcttgtgattggtctaattctgggttttggtctttaagagaaggatactctagttcagtttaagccactattaagtaatgtagcaatgtcgatttaagaactcgaaacttgctccagagtattattgcatagaactagaaagctgtgttttttttttcttgatccaaaaagccttaactttggttatgaaacttactggaaactgttactcgtcggtttgtgataataatttttcttaatgttaatcctggattttaatggtagcaagttcttatgcctaatgttatcactgattccttttttttgtttcctttaagatctgtgaagatgttctccgctcagaacaagatcaagaaggacaagaatgctgagccaacagaatgcgaggagcaagttgctcaggtactaacatcaactttgatgtctttgtctttaaattattcttcatcatgaataacttggaattttctttctcaggctttgtttgatttggagaacactaaccaggagttgaaaagcgagttgaaagatctctacatcaaccaagctgtgtatgttgctgcgttttgttttttcccccgttcactccatggttgcattacctttctcgaagggaaactaatttgattttgtcattgcagtcacatggatatctctggaaaccgcaaagctgttgtgatttacgttccattcagattgaggaaagctttccgcaagattcatccccgtctcgtcagagagcttgagaagaagttcagtggaaaggtaattttataacattgctctgtctttagtaaatgcctaaacaaatagttgtactatctctcttacacactctgcctttctttttcattttcttcacaggatgttatctttgttaccacaagaaggatcatgcgtccccccaagaagggtgctgctgttcagaggccacgtaacagaactcttacctcagttcatgaagctatgcttgaagatgttgctttccccgctgagattgttggaaagcgtactcgctaccgtcttgatggttccaagatcatgaaggtatcgtatcatttactatgagaatatactcagatattgatacgaatgatattgagcttacctttacattctgttttgactaccatgtcacaggtctttttggatgccaaggaaaagaacaacacagagtacaagctcgagactatggtcggtgtgtaccgtaaacttactggcaaagatgttgtttttgagtacccagtcgaagcttgaaagaagatgatgaagaaccatcaggatagtgaaagagagcttttgtttatgttttgtggtatttaggatgaaggaaactctcttgattcagttccttgttcacaatctttaatgttctatttacaatgactactttttgtgtttttcaattttgaaacctctatgatttcagattcgttctcaaatttcaactgcaacacattgagaagaatctataggtcgatgatgaagccccttcttagtgaaactgagtattattgggatagtttctcgagactgaattatattaatctaagaaacttcatacacttcgtaacgaaagagtgtctcttgagacgataaaatgatagtgctaaaccaatctccacatgattgcttttgttgcaaatcggagtctatactttatggaatttatatttctgcacaagattaaatctcgaaagtccttgagtaaaaccat

SEQ ID NO: 7482 - DNA, 2944 bp, Arabidopsis thaliana landsberg
atcggttgcatataatgcccatcattactcctgcttatccttgtatgaactctagttacaatgtctctgaaagtacattgcggattatgaaaggagagtttcagagaggaaacgaaatatgtgaggtaagatttcgataagtccaaatagttggcttctatgcagattcatggacttattacaacggcttgatgtcttgcaggctatggaatcaaacaaagctgactgggataccctttttgagccatttgcattctttgaagcgtataaaaactatctacagatagacatttctgctgcaaatgtcgatgatctaagaaaatggaaaggctgggttgagtcacgcctccgccagctcacactgaaggtgaaaagccatgtttactttaacttgaatagtttctcttgattttgctttgctaatgatttgtcttggatgtttgcattgtaatcttagatcgagagacattttaaaatgcttcattggcaccctcatccccatgattttcaagacacatcccggccactccattgctcttacttcatgggtctgcaacgtaaacaaggagtttcatgcagcagaaggcgagcaatttgatatcataagaaccgttgaggagtttaaacacactgtcaacgcttacacattgtggattccaaggatggagattattgttggccatataaaacggagaagcttacctaattttgtgttctctggcggagttaaaccttcacatacctctaaaggaacatgggacagcaatcgccgttcagagcacagaaattcttctacatcaagtgcaccagctgctactaccactactaccgaaatgagttctgaaagtaaagctggttctaacagtccagttgatgggaagaagagaaaatggggagatagtgaaacactcaccgatcagccaaggaactctaaacacattgctgtttcagtgcctgtagagaattgtgaaggcgggagtccaaatccatctgttggatcaatttgttcaagtcctatgaaagattattgtacaaacggtaaatctgagcctattagtaaggatccaccagaaaatgttgttgctttcagtaaggatccaccagagagtcttccgatagaaaagatagccactcctcaagctcatgaaactgaggagcttgaagaaagttttgattttggaaaccaagtgattgagcagatatctcataaagttgcagtcctgtctgctactgcaactatacctccattcgaagctacttcaaatggctctcctttcccttatgaagcagtggaagaacttgaggtttcttatttttcttatcaattttcgatacataaattgttctcttgatcttattcctcctgtctgatttctcttttgttgaaaggttcttcccacgcgacagcccgatgcggcacatagaccttcagtacaacagcgaaaaccgataatcaagtaagtgattttgtgtctatgtttactcttaacgtttgaatatacatttttggattttgacaaagattgtttgtttttgtttgtctgattattcgcagattgagcttcacgtctctaggcaaaaccaatggcaagtaataatggcttttccctacattgccaagaatctcagagcacttacggaaattcgagatgttaagttgaggggttcttgttactttatgtcttatatttatatgcttttcttagatgttgcatgatctcatgtaaaactcgtttggataagattaatgtaatgtgttcttgtctatggatcccaaacactttttctgtcataaataaaagtctgggttgagtttacttcacatatatatataaatgcagactcaaacgttaaaacattgattcttagttacgtgcgtgtatgctatatgctaaattactctctacctgtcttaaatctacctaggcaacagaaaacatagatttcaaactcttgatttcaatcacataaatagacccaacaaagaatataagatcttaaaaaaaaaaaattgtgattgctaaatgcaaaaacaacaaatatgaatcaagtatcagatgatacagatctctatacagcaaggtggcttgaaagatcttgagctatcagaaacccgacgagatacaaaagtcttttaaggcttgccatatgctgccttcttacagaccggacaagcattcttcctcgaaagccattgtttcacgcaatggacatgaaagctgtgtccacagttcaattccccaacctcatcctctctctcatactcatcctgtcaccatcaaacaataaggaatagcattatgaaactcatgatctgtctgaagtttcgagaagccattgactcaatctggagtttacctgacagatgctacattttctatcaacaagagtatgtgatacggatggtttgattttcccaagacaacgatgtatctcgctttcttttagtccagtattcacataaccaattctatcaccaagctcaagaagttgctgcgtagaccaaagcaaacacactcgataaagttgagaagatgagattgcaagtgtttttctcatgagattttgagaaacatacctcgtatgacatgctatcaacatcgagcctcaattcgtggtagttatcacgggaatctgttattcttcccattacaaaaccattctggagcatcctcatctgcagtgaacagcaggaacatgactacactagctgcatggtttagttctttaacttgctcacttgctattagccatccaaaacagttttacagcaccatacagcaccaaaaagaacgattacattatttgtcttccactctcatcagtcactagaatatgtaagagacaagtcagaataatgtcttagaagatataaagccaagtgaccagtcaaaccttaacatagtgttgagtgtgagcagttaataaactcaaaagtcacatg

SEQ ID NO: 7483 - DNA, 2353 bp, Arabidopsis thaliana landsberg
tacaattccgccaggtttatattccttgttttatgaaatcacagacgtttacttctcagtggtttgaatgaaaattaatccttcatcttttgaatttcattaacagctcgaggtgcaatacttccacgaccacgcaacagttaccgctgctgcagctttgaaacaaaacccactaattgacataacagctactcttggttcgccagtcatctcatttggtgctgaagctggatatgacacaacctccaaagctttcaccaagtacaatgccgggatcagtgtgacaaaaccagatgcttgcctctccataatattgtaagaatacaaatttcaaaataaagcaatcactagctctagatgtggcttgtgtgggtctcatctgagttttttttttgttccaggggagacaaaggagactcactcaaagcatcataccttcatcactttgatgaatttaagagaaccgcagcagttggtgaggtttacaggaagttttcgacaaatgaaaacacgataacggttggtgggttgtatgcgattgatcattcgactgcagtgaaagctaagctcaacaaccatggcacacttggtgctcttctgcagcacgaggtcctgcccagatcactagtgactgtttccagtgagattgacactaaggctttagaaaagcatccaaggtttggtctctctcttgctctcaaaccttgagaacacacactcacatcagacctgctcgagtcgtcctacttttctcgaatgctctcattgttgatttcttctacggcaggacctgagagttagcgtctttatcctccttttttccaaacgtttaatgggaatcaataaatagttccgcagtgaaattgacggataattctttttttggatatgctcggttttgtttttttttacctttcttttataattaagcactcttcttgaatatacactcagtgatttttttcttttctcttagtacaatccagttaaaaaaacaaagaaacatataaacaagttgatatgatgtaaatctcttagacaatagcaaatcttaaataaacaagttaatggttccttcttccgctgtgagactgatagtgggtttcataatttaggaacaatgataggaggatacaaataaaaaccgtttctacaacgagccagtttggtttagttgatcagctgcttgtcatcgaggtacattcgcaaaggagattctcccaatattgttgagcctaacttcaaatgttaccattttttctacgattggtggagagatcatgtagagctttacaattcacaacttgcaattaccagtctatatgtccgacaccaagaagaattaacgtatacaacggttgattgaaatgaatgatgaattatcaataaggatttaaatctcaatccaatttcaatagctagaaatataagcataactgaggtacattgataagaaaaccacaaaattcaacttcgaattctgaatcatatcatcatcaatgaaatcaaaatagaaaactagaaaagaagaagaaaaaaacatacgttaagatcaatctacgttctccatgacatcttcggctgaaaacttggttcccttctccttatcggcggcggcgcgtccattagccttacgctccaaaagcgacttcctatccttatcgagacggagcttagtgatcatcacattcgaagcattgactccgacgttgaccgtggttccgttgactttctcccttgtgattctctcgatgtgaatcacccacttgcggcgatacacctgcatcaccttcccttctcttcccttgaacgtcccacgaacaacttgcacttcgtcgtctttacgaatcggcatggatctgacgttgtatttgttacggaggtccttggataacggcgagctcatgagaacgcgcctcacgcttgaaggagctgtgaagtgagccttcctgttcttccggcgagaagaggtcacacgcggattgaacttcatcgccgccgaatttgtgaagaaattagggtttttttgtgctgaagaggtggagcgttgtgtgcatgagtttatatatgagatattaaaagttacttaaacgctgccgtttctcacagtgagaattagggttttgaaggtttctgggtcagatgggctttgataagttttatatgggctttcaaaccattaaaatggaccaatctaaccttgagaaatataatgggcttattagattgttgtcaacttctaagttaagtgttgtactcaattctaaaaccaaacgcattaaagagtttgtattctttttaattttgttctctccaaaacaatgtgttgggttcttgagaagactgactgtta

SEQ ID NO: 7484 - DNA, 2225 bp, Arabidopsis thaliana landsberg
tttggatcacagggtcacgaacacaagaaccaacctcttatattcggtccagcaagcatcgtgggtggaccactctctaccgagagagaaagaatgatagctcaggtcttccaaccaggtcacaggtaaacacaaaataatactcattacaaaatcttaatcctttttgcgatttaaaaatagtgattaaacttgggttttgtaggatgccaacaatgtgcatagaggatgctgggttagcagagatgaacataatgaatgattggcaagagcagacgaaaaaagccattgaagaagcaaccacctcatggtacaatgataaacctctaagaagaaaagaagaagacgaggaagatgatgatgaagacgaagaagctgtgatgaaagctagagctttcgatgattggaaggatgataatcctcgcggtgcaggtaacaagaaactcacaccttgtggctgagactagagaccgagacacacattatttaacactttctccctctcttttgtttcttatttccaaaacctcttcgttcacttataatgtctgtaatgtaatcatctttctactcttaagccttagactgttacagattttggattcactttcattttcgttggaaatattatttttaaatacgccgactactaaagatacaatgtatatatctagtaaaatactaacgtgtgactggatctgataccatctttcgttgtcctctattattgtgtaagtgtgtaacccacgttcaatcacagcaccatttatggaatcaaacagcaaaagagaagcgagaaaaaagagagagagataataacaacacacattttgcttgtgaatgatttaacttccaaagtacaatgaacaacatcactaacaatgtaaaccaggattcaacctataccctagtttcctcctggaaacaacactttttgtgacttttaaaaatcaaagaagatgaaaaaaaaagttgacaagaacagagagataacaaaagggatcagatttgatccaaaaaaacggatacccagaaaaaagaagatgtcaaatgatcaaattttgatgcggattcaaagaatatgaatttggagatgtacacagatgatgataacttttacccttgaatgcattgaaaaccttcacaaatccaaagccagattccaaacaaaacagcacagatgcagaaatcaaacatcaacacaacccaaacatgtttcttccaaatctgtttcgccttttgtttatgatgatgatcactcaacaaaccatttctcagttccttgcgtaagactccattattaccattcccacataaatcaacattcttctctgatatctcctgaatcgaaccaacctcacaagaatctcccccttttgcttcattatgcaatctcttcttcacctacaacgcctccaatgggttccccaaaagtggcatcaaagcagctcttcttcctttagatgaatcaatactcggatttcgactctctctcgctacactcctcggtgatccaaccaaatccatatccaataattccaaatcaacaacaccaacaatctcagcgaaaactggatcaagcttcaattgaagacaatgagaaacaggattaatcagcgtctcaacatcagatccaccgtctttaattagatcttcaatagctgatctcaaacgattcaaaacccagaatgattcaggtttctccatggattcatcagaaatcgagaaataaacaaaggaatcatcgtcgattgcgaatgtatacgtcttcttgtgaactgtatgagaaaacattgaatgatgaggaggcgtgttctcgatgcatcgtaaagctatagcttcgattcctggctcttgccttgaaacgaactccgcgagaactacggttcctttcgcaatgcaagtgtacgataataaagttggatttgaaatcatccttttcaatggagatcgaagcgaaaaaaaagaagagatcgctttaggtttctgaaatcattagggaaatgatgcgatctcgatcgaatcacagaggagatcagaggatttctctctctttatagaaatacatgatctctttctctggctcaatccaatctgtgacaatggagaacattatgcatctctctctttacagggcttgcgaaaatttctagggaaaaaaacagaaatggagaaccattattggagaagacgaaacgaaaaaaaaaatagatacaccccaaaag

SEQ ID NO: 7485 - DNA, 1906 bp, Arabidopsis thaliana landsberg
ttaatcatattctaattaactgttcgcattttattaacccttggtagtttctcgacgcgctaagtttacaaaatatggatttcttctattggcgaactccgtctccgctaaaaaataaagaaggatactacagttttcaacgaattacatagtttctatggaaaagtttttaaaaataaaataaataaacaaattttaccaaagaattatactggaaccctcagattttttaaatcatgttattagcgatcatttagtttgggtggcagctcaaatcagcccaactaaggatgtcaaggaattattgttctttaagatgtcaaggtgatggttcgtggaaattataatgcctcggccgtaatcgtctgcggccccacgttttattttggcaagtagattcgaccccgtccgagactattttgggaggctcgaaagaattggttattgtccttacttatcgccactaaatatttggtgtgttttttcttcattaacacggtacccaaaattaatttcaggcaggtcgaaccatcatgaaatatatatagttcaaacacgtttcactctaccaaatcaattttaagtctctttgtatgcatcaccatattgttttttagaaaagagttgtgttaaaacctcctcactagctcacagatcacattattgtgtatcaagacggttactccaacagtgaattagtgtacgtgtctccacactcgtccggttcggctctaatactagttgttacgctttccatgccctctctcaccatgtggattccattcttgtccaacagatggtatgtatatctgggagacattgaaagacatgtttaatgttcctccttactcatatggtatttattatttaacattgttttcatttggtcacatatcctaaatatcgcaatagttccattacgcttaactataaaattttatcgaaacgattaatggaaaatatgcgtatatttttgtgacatagataatcaatcaattattttaaacttctttgaatgtatcttaatatttttaaattcgagggattacattaatcttcttaccccaaatctggttttggatggatggagaactataaaactttgaacagtgtgagaaatcatagtttgcatttcaaataaatggactgattaagttatatacttgtcccttgtcattttcgttttgagatttgatataagtatttaaggaacatgtttgaattatttattttttgtcaattaattttgaattgaaattctgggtacagtatagagtctaattgaaaattcatgattcttgatacggtattagagtcttaacaagccatatagataaaattggtccgaacagatgattaagttcggtattagatgaatgtgccaaagagccatcttctcaaaatcatacgttaaaaatcacactagtagataaagattaatattagtaatttaatctattaccgattagttcttatttggatcttcaggtatctcacattgtctatttttatgtatcaaaaaaaattcttatattttttccatcatttgagtattgttaaatattataaaagaattccagggttatttcaatggatagatcaggtagaaagcgattcttgctctttcaaccgttagaataatataagtaatattaatttcggagaaaaagtcgaaagaagaagtaaattatgattattttaacattcttatgtctgagcaatttaatttaaaatgtaaacaatacaagaagtaagtaacactagtcattgctatataattttgaggaattattaatggaatttattttttagtaacaatagtcgatgggatctttgtattattaagtggttaagatatactcatatttaaataaaattgttcaatcatggtgttatagaagaattt

SEQ ID NO: 7486 - DNA, 1302 bp, Arabidopsis thaliana landsberg
taaagactatcttagaatttaactattaccgatttgtttttatttagatcttcaggtatttctcattgtctatttttatgtaggaaatacaattcttatattttttccatcatttgagtattgttaattattataaaataattccagggctacacttttctagtatgtatatttcaatcgatagatcaggtagacaaagattcttgctctttcaaccgttttaaaataatataagtaaaattaatgttagaagaaaagtcgaaagaagaagcagattatgatcactttaacaatcttatttctgagcaatttaatttaaaatgtaaacagtacaagaagtagaaacaacactgaaaatgggaaaattcaaagaatattaatcaaagaaaaacatggaaagaaaatttaaaacattataaccaatcgaagagtggatagatatatcaagcacatacgaagccagaaggaaccttcttgccacaaacattgagaagaaggctgagagagacgggaacattaagattaatgcctaaaactttagcctttagggcggtgcagagacaagcggcagcctcaagatcaactaaaccattgaggagcgaacaacaaggcttcactggtggtgttcccaactgaattttgagaagatccttgagaacattggcgcaaacgccgagcttgagagtgtctttagggcagcttccggtggacttgggcttaggtttgggtttaggggtggaactgcagccaccgccacatgcggtggttaaagtgaaaaaaagaatgttgaatgtgaggaaaatgacaagagaggctgaaatttttgaagccatttctcaaaaaatcaaatttctattttaggtaagaagttttaagatagaagtattgccaaaagagagtggtgaagataaatgaagagagggtgtacgtatatatattagggcttcaaggggttggacagttaattaaagctgtcattactgtataattttgaagaattattagacaaatttatattttagtaagtggatctttgtattattaagtggttaagatatactttatttttttttattgcattatgaaacaaatgttaaatcatggatagatgaccctgttgggcagtcatcgtttttttcttttcaaaacttttattagtttagtagttagaaagtttttcgttagtcatctatacaaaaagaagaaacaatacatgtttttttttcctggctaaatataatagatggtttttaactttaaccaatgcatcttttatttatgagctatatatatatatatata

SEQ ID NO: 7487 - DNA, 769 bp, Arabidopsis thaliana landsberg
aaatagaagaattcaaagaatcttaatcaaggaaaaacatcaaaagataacttaaacattataatcaatcgaagggtggatagatatatcaagcacatacgaaaccagaaggaaccttcttgccacaaacattgagaagaaggctgagagagacgggaacattaagattaatgcctaaaactttagcctttagggcggtgcagagacaagcggcagcctcaagatcaactaaaccattgaggagcgaacaacaaggcttcactggtggtgttcccaactgaattttgagaagatccttgagaacattggcgcaaacaccgagcttgagagtgtctttggggcagcttccggtggacttgggcttaggtttgggtttaggggtggaactgcagccaccgccacatgcggtggttaaagtgaaaaaaagaatgttgaatgtgaggaaaatgacaagagaggctgaaatttttgaagccatttctcaaaaaatcaaatttctattttaggtaagaagttttaagatagaagtattgccaaaagagagtggtgaagataaatgaagagagggtgtacgtatatatattagggcttcaaggggttggacagttaattaaagctgtcattactgtataattttgaggaattattagacaaatttatattttagtaagtggatctttgtattattaagtggttaagatatacttcatttttttttattgcattatgaaacaaatgttaaatcatggatagatgaccctgttggcag

SEQ ID NO: 7488 - DNA, 2721 bp, Arabidopsis thaliana landsberg
ctgtaattaaatgatatatatatttatcttgcatgctttaaataaatattaaaaattgtatgttatcgaatagacgatatatttgataaaatcatcacaaaaaccatgttattctataatttaagatatatatttcttccaacttagtaaacatatgtatacgtatgaggaatgaaaatctattgaaaacaaaaatactttaatgtcaaaaattaaataagaagtaaatatacaatagacagttgttggatattattatttcaaatgggccaactcttcaagacgtgaagaagactagaagatagctttgtcagattcacatctccccaaaaaaaaaacagagcaagaagaagaagaagaagacaaccatggaaaaatcagaacaagttcttcctctatgtaacaacaattctcaaacttataatattttttcttataatttcaattgtactaacaaacatttttcgaaacagttacgtcaaacccaaaagatctgacaaacccatcctctgcatcatcatcttcatcatcatcagaaccaagagatgaaacagaggatcttcttttaccaatctctggcgagaacgaggaagaagaagaagagaactcaccaatccgacaagtagcactcactgttccgacaacagatgacccttcattacctgtcttaacatttcgcatgtgggtcttaggaactctttcttgcatcctcttgtcgtttctcaatcagttcttctggtatagaacagaacctctcactatctccgccatctccgctcaaatcgccgtcgtaccacttggtcgtctcatggctgctaaaatcaccgatagagtcttcttccaaggatcaaagtggcagttcacgttgaatccaggtcatccaaaattattggctttttgtttttgtttctttcaaccattgaaaaatcgaatttgaaccattcttggttttgtttaaattatgaaaaattagttttaaatattttgtttgattggtttcaggtccgtttaatgtgaaggaacatgtgttgatcactattttcgctaacgctggagctggatctgtttacgcaatacacgttgttaccgtggtcaaagcgttttacatgaagaacataacgttctttgtgtctttcatcgttatcgttaccacccaagttggtattcttaacccttttgattagattttttttcttggaaagtttggagtttgatcgagtttatggtttatgattagtttaagtgtgattgatgttttaggtgttaggttttggttgggctggaatatttaggaaataccttgttgaaccggcggcgatgtggtggccggcgaatcttgttcaagtctcactatttaggtaaataattaatacagtcaataatcactagagtgtgtttcacgttttagctcaagttttcgatattttctatatacaatacaaacaaaagaaggggaaaaaattgtgttttggccaaatgtcataaaaattgaagatgccatacaataataaatattagataaaatattccattctcacatatttttaaataataattattttttataaataatacaaaaattaatctttgaatataatatggagacaaatattttttattgtaatatggtgggcatatactgtttttgtaaattgtaaagtaagagaaacaaattgaaaattttctttttcaatttgcattagctttagaatgtgatgtgttttttttttgttgaacatgtaaaataaaaaaaatgtcatgggaccaagttttatcatgtcttcgaaaataaacatcatgttatatttttctgataaagacattttcgtacgtaactactagaaatatattcaattttcttatttatgtggtgtaggttgtacaaatggattatattttcgtataactggcttgttgaatctaaccaaattgaacataaccacatttagaagcaagagacataaatatgtctctattctttaacaaacaaaaatcgacatataattctatctaacatattgatgttgtcgttggctaaattgtcagagctttgcacgagaaagaagaacggaccaaaggagggctgacacgtacacagttcttcgtgatagcattcgtttgcagtttcgcttattatgtctttccgggctacttatttcagatcatgacgtcgttgtcgtgggtttgttggttctttccatcatcagttatggcccaacagatcgggtccggtcttcacggcttaggtgttggagccataggactcgactggtcaaccatttcctcttacttgggtagtccactcgctagtccatggtcagtccaaactcattccggtttactcatttcactaagttattaagtcataagagtatgaagatgggttggagatggtctaataagtcataaaagtatgggtcaagataaaccgaaattggtttataatcatacattatccggtttatgagccgaaaaaacaaaccgaataaccaaataaccgggaacggttttgggtttggttaggttcaatttagtttggtaattggtattgcaataataaaaatgctttctatgtttttttaacaggtttgctacggctaatgtgggtgtgggatttgtgctggtgatatatgtcttggtaccaatatgctattggctcgatgtgtacaagggccaagacctttccccatatttttcgagctcactttttttcgagcccag

SEQ ID NO: 7489 - DNA, 590 bp, Arabidopsis thaliana landsberg
gtccatcctagaaagttttgatatggattgataacacttagttagtgatcatttgagattctaagattaaggaaaagatgaggaaacctcatcagctgtatggaattccgacaagctgattctacgttcttctaagataaagttctctttcaccaccagttccatcacctggacatggattagaaaataagactggtcatgttatagtcctgaaatatgttatcagaaagaatatgaatcttcttctctcttacagtagctcgagtaatgccggggagacaataatctgcgtgaggagtgagtactcggtctttcttcaccatgaactgcaccaacagagttcctccaccatgttagtttgcaaatgctacacacagattcagtacggctctttggagagtaaaaaacgttcactccgaggatcttacaatgttggatgcattggtttcagacacaaacccatccttgtcaagcatgattgcatcatcgacgttggcattgttgctttcaatctgtgtcattaccaataaaaacatctcacaatgacgtccctaataacacatgatcacggattcaactcgatgacaggc

SEQ ID NO: 7490 - DNA, 2519 bp, Arabidopsis thaliana landsberg
gtacatatattatcaatatttaaaatgttacataaacaaaattctagacctaaaactatttcaggttttcccacgtgaccttaacaatgattcaagattattgatgttttgtctgtgaggacatgtatgtggccgctcttgccaccatattcacaaacgtaattgtatggagtatggaccaccttttcgctactacttctggatccccttatgtttgtaaagtgtatcattcccttatatcactattcactcacatgcattaaaatatcgaatgctgcaaaggaaaaaagagttattttctctttagatatcatttgggttatgcatattacttggattagtccaatatgtcgtgtacaaccattctcgctgcaaaacaactacaatatgtcaacatagtataacacatgctgatctggtgagattataaattgtgaagtttgtctttataatatgtacatatagtatttctttgattatgacaagtgtgtagaaaatgttaggatattattctaaatcccacatacgaaagattagataatgattatccaacatataagttcaatctaattttaattagtgtatcatttggggaaaagaaatcgtgcatatctggttgcttggtccaaatatctatattttctgacggtccaatatttatatacgtaccacataaatacacctatacgaatctctttactaatacgtcgataacgttcatagttaatgacgttatttactgccgagataatgaagtgatgatgtaggttatttattgccgagatttgtgaaggcagtggctctcacaatccctatcttttcctcttctttttttttctttttttctttccatatatagagaagtttaaatttaattgtaccattaaaagctcaccaaataccaacttatacatacagtcagtatctatatcaggaatttatatgtatgtgtgtataccgaataatagtaaactcattttactaataaataactttgttttattatatatttgataaacaacttgttataaattattttaatatgttaaatttgaacttattaaattttaagtaatattctagtgacggaagtatacattgtatttaaattgcatagatgtaattacttattttaaaaacttatagcactattcagtgatttacttttccaacctaaaatcgaggtgtagaatgtctactctggaaaaaaaaatcgcctataaaatatcaatatcaatggtgagttttgttctatgtaccaagtttctctaaaacaatttgtctttctattaaaaataaagagtaccacgatggagcctcacagaaaacactcggtcggcgacacaaccctccacacgtgtcatccttgccggcgcaccattccatatagaatctacgccgtatttcacacgtgtggcatcatagccctcatgtatcaccatgtacactcacttctcacagcaaacacaactctaatcacgtctctccttctcctctccgatattgttctcgccttcatgtgggcaaccacaacttccctccggtataaaccggttcgccggaccgagtaccctgagaaatatgcagctgaaccggaggacttcccgaaactggacgtgtttatatgcacggctgatccgtacaaggagcctccgatgatggtggtcaacactgccttatcggtgatggcttacgagtatccgtccgataagatctcagtctacgtatcggacgatggaggttcgtcgttgactttgtttgctcttatggaggcagctaagttctctaagcattggttgcctttttgcaagaagaataatgttcaagatcggtctcctgaagtttatttctcatcaaagttacgttctcggagtgatgaagctgaaaatatcaaggtgcgtattattctactaatcacttataattaggaatgtttttttttttatcgaatgttaaaattgtcattcattttggttacgttgaatagtggggaataacatgtttaataaaaaaacttggacaaaaaaacatttatatttttcgtggaaggagtaattaataatgacaaataaaaaataaaatgagtacaaaactacaaacagaaaaaataattatttgctaaatcaatggggagcgattgttgtgttgaagaagtcacttcagaaccttatcgtatctcttttcgacgatagtggcaatcttgttcttttatgacctaatactttggaagactgtgactcgtcgtagtgacctacaacaatttctcccaaaaatatatacgactataggagtattagtaatctaaatgatagaagtttttctttgtttgaactttcaattatccatgattgcgcataagtaaagtaaacttgaattggatatttcctgcccaccattaccgtaagcatttccttgatatatcatcaattatgaattaaatattaaacagtaattttaaagttgaacctctaaaacaaaatggaaagacttgttcagaaaaaaaaaaagatttgttttag

SEQ ID NO: 7491 - DNA, 801 bp, Arabidopsis thaliana landsberg
  unsure (1)..(801): unsure at all n locations
agatatgtgaagactgcagacagtagctctcacaacccctatcatcagccacgtgtttttttctccttattattcaacattttctccttttaatttctcaacaaataccatcttttagaaagaaaaaaacaagtcaatatatatttttattatttatatgtatgtgtttaaattaatttgctttcacacaattttactaatataactgacttttaatacaaaaatggtttaggtatttaaaacaaatttcagtaatagtctagtgaaagaactaaaccgtaagcttaaattaaccattcattttgtgaaactgttgaaaattgaaatcctaaaattgtctgggagaacatatcgactctttttgacaactaaactataaatatcatcaatctagtagaggtaagtttaccagtcttctccaaaacaatctgtaaagatagagtaactaaaacgatggagactcatagaaagaactcggtcgtcggcaacatcctccacacgtgtcatccttgccggcgcaccattccatatagaatctacgccatatttcacacgtgtggcatcatagctctcatgtatcaccatgtacactcacttgtcacagcaaacaacactcttataacatgtcttcttctcctctccgatattggtctcgccttcatgtgggcaaccacaacttccctccgcttaaacccggttcatcggaccgagtgcccggagaaatatgcagctaaaccggaggactttccaagctngacgtgtttatatgcacggctgatccgtacaaggagcctncatgat

SEQ ID NO: 7492 - DNA, 415 bp, Arabidopsis thaliana landsberg
  unsure (1)..(415): unsure at all n locations
attaataaacactnatctntaattttttcttcaacttttcaattgcacataatgatcacactgtactgtatcatcttatctcataaatgagaaactcgaccataagaactgtctatagtgtgtatattcagaaaagttatcaatagttcaatactaagaaaccggcctatatatatatatttgtggncactaatttctccaaaaaccagttgccttccgtaaaaagatggaacctcagagaaaacactcgacagccctccacacgtgtcatccctgccggcgaaccattccatacagaatctacgccgtatttcacacgtgtggcatcatagctctcatgtatcaccacgtacactcaaatggcaacgcaaacaacactctaataacagggcttttttctcctcctccgaaatag

SEQ ID NO: 7493 - DNA, 1187 bp, Arabidopsis thaliana landsberg
ttgatttgaagacacatacgctgaaaggtgtctccattttaaacttgtcatcctttgaaatgcaaggcagagttccttgttgaaaaaaggtgacctacagagaggcaatgtatattggtctacacacataagaaagaaaacaatagacacgcaggaaacaatacagctatgaaccctcttacttgatctggttcaaggccaaaatacttgtgactcttgaagaatttttgtgttggttcatgagtaaatggactggtcattatataccactgtattgtaactgggcgagttggacttgctgcaggcaaaatattatgtgaaacaaggtataagaaatggtagagttgtacagataaatagaatacagagttgagaactataccctcactcattgcctgagaagcaagcctttggacacataagatcctctcagcttgaatctgaaaaagtgatttcccagatggcagtccgatatctgagatgataaaattattatggtaaggtaacaaaatatacaggtaacaacagtaaacgtcatctgttattgaatgtcgcattcactaaaacaagagaatctgaacttgctaaggaaatttgcaagaacgtatagaagatgttcagcaaagacagaactgaaatgagaactactcactataacacccttttggatctgaacttccaagtcttgttccctgcaattatttttgtaacaagataatatcatgagttgaggatatagtatactaacaaacactacaataaggatacaagaggcaatcaatatcttatttgaaagtagttattcccatctgaatcttgttcaattgactaactctatcatacagttacaggtgataacacactcccatacatatccacagaaaaatattctcaaggtattaaatgctgaagtaaatgaagacaaagtgaaaagggtaaagaagattacaagatcctataaagcatctttcaggtcacgtgataaccattctttctcataataaggtggtcactatctagaggaaagcaccgacgggtttttaggttttcaaaggagttatgattactcatattaagcctttatgaccacaattatcaaaataagtacttttcacttttcagacttagcaattatttaagtaacggacatctataaatgcctttatttgaattaggaccacgcatta

SEQ ID NO: 7494 - DNA, 929 bp, Arabidopsis thaliana landsberg
ttatccaagttcctaattgtattatctctttgttctattttttttgccaaggattcaaatccaaaggttcctactatgtaaagccacacttttttcatttataatgatattgacattcatagcaaaaagaaaaagtcaaatattttgtgtaagaaaaaaaacatattgatctcccaattcaccacttgcatccttccacgttgataagagtcaaccaaactccattaaacaaagaaagcttacgactaattgacgagagttgatggcctagtgatctttaaaacttcgataactgagactacgatggagtagattgtaatctatagtgtgctacacttcaaccacaatactaatgagtaacgtagatataacctagcgtacgtagtttcatttgcatacctttaaaatttctaatcttgaaatgaaatgaaaccgctatcaagaaagaaagaaaaactaacttgatcgaactatagaaattctcaatatatagcatcctataaaatccttggaataatactttcgaaaaagtactggtatccactatcaaactatgcagagtacgaactaataatatacatcgattggtctttatcacacgtttataaaaaaaaagaatccaacaaatcccaatattgtgtgttttaactgatcacaactcacaatatccgatggatcaatcatattttatggagaaatctcaaaagaaaacgtgccttatttcatctctatttatacacacacaaaacactcgtttatttatagcacaaacctttatctagagacacaaaaaccacaacatgactaacctcatccttatcttcgccgcacaaatcctccttttctatgccgttgcttccgtcggagatgaaattgggaagaaccatgaacgggaaacaccttggcccttacaaaaggaagaaactcac

SEQ ID NO: 7495 - DNA, 702 bp, Arabidopsis thaliana landsberg
tagtcaaatcaaatttagtaaagtaaggatgactatttattgataatgtaggcacaaggtttgcataacatgaggaaaagacaatggataatgcattagatctagcttgtcgtctcaactctcaaggaatgcaaaacacaaacaatttacgtatactaagtaaggcaaaaggctaaacaatacggaggcaacatatcttacaagatttttaagcatggctctcaatcttctagttgactgggtgatatagccattgcatgagcgtttggcaccccctgactcacagcttccagtgaacattgccacaaactgagaagtacagactacaaataatgcacgattaagttcagtttcattccaagagtacagcatacaagtcatttacaataagctgtgcatttaagttcacttttgaatagcattaaaggttaacttgactttgatgcatctttgccaagacaaaagaagtaaaagtaaggtctataccaagttcatctaaatgaaagtgttagtggtaaacaaaacacggatggatctatgtctctgcggaaaaaatttacacctaatgcatttgtatcacagtaaggaagtactacaaggatccggtttgtcttcattaacctagtgccttacacccaaagaaaagtcacatcaaatcaggcaaagattagatgaaattaccatataatactttgcagagat

SEQ ID NO: 7496 - DNA, 1960 bp, Arabidopsis thaliana landsberg
  unsure (1)..(1960): unsure at all n locations
gtgttcttgaacatatgctcgtttttatctgagctttggacggtcgcaaaatcaaagctgaaactaccattaataaaaagaacatcattttgatttgctttgatttcattttctgctttttttttacaacagaagacggaagatgtatggtttatagagtttgtgtagttgtacagaattgacgtgagattgcttctgcgtggaatgtattctaaggatttccttctataagaagagagtgagtaaagaaaggccacgtatacaagatttggaagttacatatactcatttatggaaaactggtaaattttaaatacgttgaaaactaaccgcgcctaagcatccactggttagttagtccgtaagcaaaaatgaatcttaacatttcacaaatcgcaaacaatcatttatgtctcgttgaatgtttcataggcatcccgtttgtttgaagtcttgtcttaaagacaaatcacgacggcctcactaaggagtgtttcaatgcgttgaaaacaactaagtagtattattccatcgattatgagatgataaaaaaatcatcattgttgaacgtatgaaacatccatatactggatgcaggggttttcaacacatattctttggtcttttactctttaggaaagatgaaacctaattagggttaggtttagtcattttcgtaaacttaattaacacgaaatatgatttctctgtctctgtatgtctcattgttttcttgttcttaattcaccaaaacaaaaatgttgttgttaccgcttagtcaccaataaaaaatttagttgatttcataatcttgaaatttgaagcatataataataatttttcttttgggcctatctatctattaaccaaggcatcttcaagtgctttcccatatttacaacaacattctcctaaagagcacagacacacactacatgtaacactaacagacttggcacttgaaacctaaagatacacacagtaactctaaaccaccattgttcttcttatggttttgttcctttgtgcatctctctatatctcatcttataatcagcatagtaagaaacttgaagaccaaagttgggaattgttgcagagaactttacttgtgcgactttgtcagttttacctttttcttgtgtgttgttggtttgaaggaaagaagaaaacccaagaggaaactttgttgtggtcatctttaagctgagagaaacctatggaacctttctactctcaccttgttacgttgccataactgttcagtcttctttttcttcttcttcctgtggaagtaatcctctgtgtccaatacgtacgcgatctacaagagatgagtatatatgttgactgattcatgaacaagaaattgagtacagagaagcttttgcataaagaaagatgaacaggttgaaatgggtataattgagttgcttggttcaagatctttgggacggaagatcggtttaccttgtaagaagagcaagacatcttgcattccaagccatttactacttcgacaccttccatagctttacagagatcatacaacccggtgaggttcctgccaaaagggaatttatttaattattcaatatcgttgcagtatcctggaccagttccagtagaagagaaaaagaaataataaacctatatataacctgcaagcgtttcaaaagagatagaatctaccattttcatgaacctagaggtttatgcgaaaaccttaaagagacagatgattatataagatatatacctttgtaatacaatgtcatgtccctcctctttctttcctgatgagacggaaagcaactcagtttgcatataacttgcaaatgtgggatccatagaaactgcatatgcttctggcttctcgataatgntatccataagctggatagataaacgtgaaggcaaggatgactgcatatcaattaaaaagggccattaaattcaa

SEQ ID NO: 7497 - DNA, 1016 bp, Arabidopsis thaliana landsberg
  unsure (1)..(1016): unsure at all n locations
tatgtacaagtaaacagacaacgccaattacacaggtggctggatgtttcaatgcggtgagattagctgcggacaaagattccaaattgctaacaagagtatgttgcagagcagtgaaaacacttgatgattgccttttgcttgtatatcccgacagggcttacaatacttatatcttcaaaggcatttgtttcgaaaagttcaacgaatcacttttataaattctctgtattcctttttttaatgataaataaaaaaaacgaaacaaatttatttttttaattctgatacgagaatcttaaaacatttcacaaatcgcaaacaatcatatgtgtctcgttgaatgtttcattgtcttccgtcggtttgaagtcttatcttaaagacacatttcgacggcctcactaacaagtgtttcaatgcgttgaaaacaaccaagtcttttgaccttccattgattaatgtgtaaccttacgatcgattatgatctcgctgtctctaattattttcttgttcttatatcacaaaaagatgttgttactgcttcctcactatctcgacctcaatatatattgaacatattacatatatgacccctcaaagatatcttttttttttaaaacaaaaacaacaaatagtgaaaacnnnnnnnnnnnnnnnnnnnnnnnnnnnnncaccaataaaaaatttgagtccaacaaaactaaaaactctattggtcaactaattatatttaaagcagaaatataatttaatttattacatggtctttctttaattagtcaatcttcttatagaaggaaatccttagaataaattccacacataaaaaantcttcacgtcgtttctctataactacacaaactctatattataagccataaacttttccgtcttctattgtcaaacaaaaacagagaaaatgaaaacaaagcaactcaaatgatgttcttcttattaattctagtttcggctttgattaaccgaccatccgaagctcagctaaaactgagcg

SEQ ID NO: 7498 - DNA, 1002 bp, Arabidopsis thaliana landsberg
tgcttgggtcaaaacttgtatatttaattaattacgtctttctttctttactccatcttcttatagaaggatatccttttttttcttttgtcataaatagaagaaaatcctgagaaaaaaacccacaaaaaaaaaaggcatcacgtcatttctctacaactacacaaactctataaaccatctatacatttttcgtcttctattgtaaaacaaaaacagataaaatgaaaacaaagcaaatcaaaatgatgttcttcgtactaatagtagtttcagctttgattttccgaccatccgaagctcagatgaagatccaatcgtggatatgttcaagtgaacagatagcaccgatagtaaacgtgagtggatgtttcgatgcgttgaaattagcgttagggtcggagaaatttgtcagattgctatcaaaagactgttgcaatgcagtgaatatacttcctcactgccttttgattgtatctcccggcgtagagtacaatactattgtattgagagacttatgttctcagtagttttcaatgaaacaaatatcatgtaatgaaaaaatacaaatattttgaatttttttttaagttttaattatttaatataaacaattggaatcaacgaaatgtatttttaattttagacgcttcgtatatcaaactttcttctcatttgtattcaaaatcattttgatttttttttatattataactgaaacattttccgagaattaaaaattatctaacgatcaagatcctttttatctaacgatgaagaagatccttttttccttgattcattttcttcatagtttacaactttaacatggtacaaataccaagtcaacagaactgacatgcacatgaatgattttgattcgtgggttttttttaatgcatattcggatgccacaatcaatttggtatagattatgcgatgctatcaaagaaatatattcatatttttttcttactccacatatatgacctgttccgattt

SEQ ID NO: 7499 - DNA, 2577 bp, Arabidopsis thaliana landsberg
aacgttgttaataagtgttgccatagaatcacaatccctcgagtaaaagaggcttactggacagagttaatgaattactctgtcaagtgctctgatttctttggagtagcaagatatttgattaatcgagaaatatatgtcttctattagtatttgattaagattagcattcaaaaattatttaattccttgttgtagtacacattagatcttttctagttgtatttaactatgcgcatagtatattatctctgtagaagctttaaaatttaaatgatgcatcaataatcaagtacttgtttgaaatttgttaaatgtgaaagtttgaattgttgtgaaatgggtatttgtcaaaaatcaaaataagctgggagaccacattccggtcctatatattagttttccaacaattcacacatgcatacttgactgaatctgaacctggatagtgagtgacttagcaataacattagtacaaactatgctacatattttggggcattgcgtcaacacaaactgttagacaattaacggaataaaaaaaagtttgttagggggcaaaaaaaacaaacgatcattctcattatcttgcttaggaaatattacattgaagcctcttatacaatgagagggttctggttcacagacattaaaccgatattgatgatctaaaccgatcttaatcaattctatactctaatacaaaccacatttcctatttatttttttctaatgatcttgcaaaaaagaatgtatacagtcattatttcgggctaatatacacacttacatttccatcgtcgttcatttcacagacttaggagattttcaacagaaaagttatctattccacaaagagagatatctcacgcatagcaaaaacagagagaatcccatcaaaaaacttaaaaccaaaaatggcgaaaaagagagagaaaatatggcttctttcttttctcagggaaaatgtttccaagattcgaaaactgatgagtaattcaacgaagaatcattgttattatacgtaaaaacttcttcttccgtaccgcttaaccaccgaggcatgtacaccaaatcctccaacgagtcaaatatcacgaactcgttcgactcgtttaggctcgttcctagactcggtaactttacgatctcgtcaagatcgtcggagactgtactttcctcaatgctcgtaacagaggaccaagacgacgatgagaacgacaccgtttcgctactctcactactctctgacattttattcgacgtcgtcgtttcactactctctgaccttttactcgacgtcgtcgtttcgctagtctcagtatccgaacgaaacgccgtcgtatcgaagtccatgagagcagctttggtcgccgcagctctgacgtcacgagggctgagcgaaacgggtcggggaagaagtttagagagctcagggaaattgagaatggctgaagttcctttgatactcatagccgccacgtcgtgagcacgcatagccatctccgccgtcggaaaagtcccgagccagattctcgatttcttcctcggttcgcgaatctccgatacccattttccccagctcctcatacggactccacgatacacgggctgcttattattttccttcttctccttgtcggaagacgaatccgccattggtagtcagaaagtttagagctttttgtgatgccgtccaagtgttcgacaaaatgtcaaacagactgaagtttttttttattgggattttttgtagatttgggttgttgttgaaagaaatattataaggcaaaacgagtgagacattttattttggggtgtaaagagttttataaaaagatagttcttgtttctatcattctttggtgaaataatatcgagttctggttttggaatgtttccaaactctttctctctctctctctctctatgatttatgaaatcaatttaagattttaacattacattatatacatactctcgtatacggtatacgtggtggaaacagaccagagggtccataggttatatagattatctacgaggttggtgtgtataatgttaactacaattttaaagtatcttttcgtttttcattttctaacgcgaaacacgagatgatgtttttctaatcttttgcttcttcttatttttttgatgtgacgacttatacaagctcgtatagatatttatttctgcattcatttgtgtaagacattgtaacgtgagcaaggactggaatctacggtagagtacatatagacaccagttctgttggatttttattgaactcataagtagaaagaatttgttttaaatatcttgggtattactccaaaatggattttacaagaaacataaatgaattggtcaagtcggcaacccataggagcagggcgtactaacttctaagctaccaagtatcaagtacgtactttatatgcattaaaaaacgccttctttaaccagtcaattcggtccaagaaaccctaaaatagaggacatgtacaatttatcttaaaaactcaattaataaaaattaaaaaactggattgaacattaaccccctaaaaaacc

SEQ ID NO: 7500 - DNA, 765 bp, Arabidopsis thaliana landsberg
ctctccggtctgatttctctggccctatcgacattttcttcgaggtaaaggaactaattgtgtgttcttttgtggagatttcaagtactaatgtaggaatttacgcgaagcagagcgatggcttagcgggtttggagatatcagtacaaaatgtgaggatgcaacggttccacaaaactcaatggaggctacaacaagaccaagttattgaaaaggtattatacatacattatgaaaacgttttataagcgtttaaaacaatctatgactttgagaaaaactcgcagattcggaagaataaagtgagatttcaaatgagttttaagaacaaaagtgcattagaaggatcagtgatttccatagaacagatcaaaccatcattcctccttggttgtgctatgaactaccgtattttggaaagcgatagctatagagaatggtttgtgtcgcggtttagactcacttcattcaccaatgaaatgaaatggtatgcaactgaggcagtgagaggtcaagagaactacaaaatagctgattcaatgatgcagctcgcggaggaaaatgcgattctagttaaaggacatacggtcttgtgggacgataagtattggcagccgaattgggtaaagacgatcacggatcctgaagatttaaagaatgtgacactcaacagaatgaactcggttatgaagagatataaagggagactaataggatgggatgtgatgaatgagaatgtacatttcaactactttgagaacatgc

SEQ ID NO: 7501 - DNA, 1671 bp, Arabidopsis thaliana landsberg
atacttattttttgtaaaccttaaagattttgttttttctttttgataatgaccagttcccacaaattcatgttagttaaatcaaccatgtgcatactgtaagaagataacatctttatatagttgcgcaagaatataaaaaccggcgttatttacgagttacagttttctaacagatttggtgaataacaaggtttattaattgtagatatctatatatatatatatatatatatatattgaagtatgtatgtgttatatattgcataaatacattcaagatagttatttatttaattaaaaacggtaaaatatagattttatcaaatgacatatttttagtttaaatatggtacaattaattttaagatttactggcacatcaaatgatcaaaatgtggttgataattgtgttgattattgttatcgataaaaccattttcttttcaattaaacaggtgtggtttggacgaatcctaatcatcttagaagaataagacgattttttttttgccccagacgattaaaacatatcttatgattggcagccacacatatgcactttttagtgagatatgatattacgaaatgctagtttacgtatagtttctaaaatacaaatttcacgcactaaactacggacacctagttaagaaataattattgatatgatgtatgatagtatttaaactatataataaaatacaaaaatcaaaactattatttttaaaaaaaaaagaatcacatagtgtaaatactcatgtatttttctttagtcatcacaaaatttacttctctagatttttaaaaaagttttgagctattaaaagcatttatatcgtgtagagacataaaagtatatcaataataaaaaaataatatatatttctaatttaattatgaaatacttactacttaatttcttttgacaagtgattccattatttgtttattgtttgtctacaaatgatatccatgttcaaactgtgtcaatcattcagaatagagtcaacaacggttgccgtccacggtccactccggcctctaaacttttttttttttttaagagcctctaaacttttttttctgaagtaaacaacaaaattaaaactataatatatacaaaactgttacataaaacgtggaaaattaaaaaaccagtaggtaggtcgaccaaatcaaatctcatataaatacatacatacatacgtctttattctccactgctctatttctcaatctctctcctaaatcaatcaatctttgtattttcatttagccagaacaaaaaaaatggtggagcaaaagagatacgctctgtttctagcgactttggactcaaagttcgtgaagaaaacttacggaggataccacaacgtgttcgtgacgacgttcggagacgaaggagagcattgggactcctttagagtcgtcagcggagagtttcctgacgagaaagatctggagaaatacgatggcttcgttatcagcggaagctctcacgatgcctttgagaatgatgattggatccttaagctctgtgatattgtcaagaaaattgatgagatgaagaagaaaattcttggcatctgctttggtcatcaggctcttttcttttttctattatcccctattttaaatatattggattttttttgtcatttcaacttt

SEQ ID NO: 7502 - DNA, 725 bp, Arabidopsis thaliana landsberg
acacttggtatataatatttttttggctctcttacttttgtcagctgctaatcaattagagataaggacttgtgacacaattcattcatatgaaaagtcaatctttgtttatataaaaaaaacacataatttagatttgatctcactacaaatatcactgctctgcagtcacagtacattcttattgacctgtttgattacacacaacctgactatgttacaaagaagaatgataagtcttatggagatatgatacaacaacaataatgtcacacaaaggtatttgctaaatatgaaatcaatcatatattcagctgtgtcggaattttggctgcactgtgataactcctgttcttgtctcgtcaaacctggacctgcataagtaacaacttttcattcctcatcttgttatttatactaagattatgaactggaagatcaaagaatatcttcacggctagaggaagttgacatacctgttacaacatgcattgcatttcctagttctttgacagtgcatgtctttgacatggagttaaaatccacattcaaatgaaacatagtcaagagaaatccacccatttctgcaagtcagcataagacaaaagcactgtccacttgcgtcaaaaaagaaatgattattcaaagaaaaagatggttgactgactttaaggccaaatgattcgagcagtcacggtttgatcagtttatagagagccggtgat

SEQ ID NO: 7503 - DNA, 1269 bp, Arabidopsis thaliana landsberg
gaaatgaagtaacgacggtcaagaacacaaaaaacgacaaaaatgatctctaatagtttctgtaaaaaattgtgtcctgtgtatagttgcttagttatcatatgaacaatataacttgtatttgcataatcatcgtatgaacactcgtaaacatttctggactctaccatgtcattgtataatccttcacttgtctttctatttgtttagtttcttcagctaatgaatcgttgagtttgcgatttccttgagatactgcttctcggaactagccattcggctttggaacattgtccattcccgtttacatctgtctctcacctttgcaacaaaaccatataaccatcatcaattagttaacaagtaaccgcaaaattctctgttacaaacttatgtttcaaacttcttaccccttgccaccctgctttaccgtcttgtgcctctccctggtaaaaagaaaaccaaaaaatctgaatcaatatatgaacaaaacagaatacttgtactgaaattgagaaggtattgtcaagaacctggctgcctaaagaaggaagagattgatgtatgatccattgagaatccacaactcctatcttctcatgtgcaggctgtttgttttattaggaaactttttagtagataacttaccaaacacatgtccagtgtatttaagagtcaaggtatgtaggcaaaatgattaacctcaacgcatttacggagtgcgaaatcaagaccccaaccgtgaaccaaatcgttctgaatcatatgccacacgcaacgccatgcatctcttgagaatactggagccataatctctataaacctgtaagaatattacatggaatcaagagtactgtatagatctatgtttttgtaatgaacatttgagactacgtacgctgcacagggaggcaagtgagggtcattgcatcgacctggtttctccttcgcatctctggtgattagattttgcagacagaaaatgattagttccttaaagttttctccttttgatgtttggaatttgtaaagttacttacttgtgaacttctcctttggtttttctctttgttatctcccatgtgatctttttcttagactcaacagcaggctgcgatatctctagaccgtgtttctttataagcctgatgtacctgcagaagagagagaagcacatattcacattttctggactaggattcgtgcggcgatttaaaaacgttttgttagaatgagtaagaagacgcactcttctacatcgaagttttc

SEQ ID NO: 7504 - DNA, 1742 bp, Arabidopsis thaliana landsberg
  unsure (1)..(1742): unsure at all n locations
ctcttctgctactctcagttaattcgtttggctaatatattcttgagatttgaagatcggggtttgttgtgtttcaagataccttcctacgcctaccaaccttaaactatgggagctccataagaaagtgaagaactcgatcaaaagaatcatagattcaaggctaaaatcaaaatgtaagacctatggctatggggacgatcttctaggggtcatgttgactgctgcgaaatctaacgagtatgagagaaagatgagaatggatgagatcatagaggaatgcaagaatttctactatgcagggcaaggaactacttcgattctattgacatggactacgatgttactaagcttgcaccaaggttggcaagagaaactcagagaagaggtttttaatgaatgtggtaaagataaaatcccagatacagacaccttctctaaactcaaattggtaatgttcattttcattgtgttacttgcgggtgaagaaaagggttttcttacacctattaatcttgcagatgaacatggtgttgatggagtcgcttcgtctgtacggacccgtgattaaaatttcccgagaggcaacacaagatatgaaggtaggacacttggagatcccaaagggcacaagcattatcataccgttactgaagatgcacagagacaaggccatatggggcgaagacgccgaacaattcaatcccttgagattcgaaaacggcatttctcaagccaccattcacccaaacgctctcctcccgttctcaatcggaccaagagcttgcattgccaaaaactttgccatggtcgaagccaagaccgttctcactatgatccttcaacagttccagcttagcctctcccccgagtataagcacacgccagttgatcacttcgatctcttcccgcaatacggcctacccgtaatgcttcaccctctcggatagtagttctgaatggtgaggaagagaaaaccaagaatctcaacggatatttggtcacgttatgttctatatttggccttggtcacaaataaagttcagatgatataattcaatagtggataagtcaaattcaaagtgaagtaaggaataaaaatctgaacatgtggtggttgttttagttccttgattttcatagtcgattctatctaaatttgattatgcttttgaacaatgtatttttccctaatttaatagtgggaggtcgaccatattccgaagtatacaacagaacctagtggattaaaaaccaaatcactcgttgaaaatttcgactctttgggttgttcccacttccactacaattaaatcaaatactaggcgtacaactaaatcaacggcatcagccccattccttcaacgtatggggtcctctgtgtgtctgtctctccaccgacactctctttatcgttgatcactccaacggaccgnnnnnnnnnnnnnnnnnnnnnttcttctattatcctctgcacttaacacacggtggactacgtactctcacgctgcttcagattcgtacattgcgatttggaatgtttattatatacccaaagagcaaaactttaggtgggccttaaactaattaatggcatttacgcgtcagtgagagtggagtatataacaatctgaagctgaagaagaagaattgagagataacagagagatagtttcttcttcatccaaaagaatccaatcttttcctcanaagatagtttctggatcgaacgacaatggaga

SEQ ID NO: 7505 - DNA, 1020 bp, Arabidopsis thaliana landsberg
atatctaattagttgacagtagaagatagcactttgttaacatttcctaaatttcttcagctcatgacccaattgatggtggattgcacttttagaatgttccttgagtggaaaaaacagaggaatggtgtagaaacagagcaatttgtgttgattagcagagagtttaagagattgaccgctgatatcatagcgacggctgcgtttggaagcagttatgcggaaggaattgaagtatttaaatcacaattagagctccaaaagtgttgtgctgctgctcttactgacctctatttccctggaatccagtaagtttcagtataatcactcttttgtttttaaacttcgttcttgttttagtgatttgaaaattggttttatttcttgtatcccaaggtaccttcctacgccttcgaatcttcaaatatggaagcttgatatgaaagtgaatagctcgatcaaaagaatcatagatgcgaggttaacatcggaatccaaagattacggaaacgatcttctgggaatcatgttaacagctgcaagctctaacgagtctgagaaaaagatgagcattgatgagatcatagaagaatgcaagacgttcttcttcgcaggacacgaaactactgcgaatctattgacatggagtacaatgttgcttagcttgcaccaagattggcaagagaaactcagagaagaagttttcaatgaatgcggtaaagacaaaatcccagatgcagagacatgctccaaactaaaactggtaaatgcaaattgcaaaagagttccttgcggctgaagaaaacggttttacttttgacctaactacaattgatcattgcagatgaacacggtgtttatggagtcccttcgtctatacggaccagtgttaaatctgctccgattagcatcagaagatatgaaattaggaaacctagagatccctccaggcaccactataatcctcccgattgcgaaaaagcaaaaagacaaagccgtttggggaagtgacgccgacaa

SEQ ID NO: 7506 - DNA, 1540 bp, Arabidopsis thaliana landsberg
  unsure (1)..(1540): unsure at all n locations
aagagcttgagaaaagctgtgaagtcggatctttattagtggatctcatgggtgaccctcttgccgggatccgacaatctccttctttccacatgctggtacgtatatgtgactatttatacgtttatgtcaaaaatgggtttgattcgagtttttggccaatgcatgtgacaggtggcagagatcggtaatgagatagtcgggatgatcagaggaacgatcaaaatggtgacacgtggtgtaaatgcattacgtcaagccgacgacgtttcgccggaaataaacaccaccaaacttgccttcgtctccggccttagagtctctccgttttacaggttcgttttctaaatagtatttttccaatatcatatcaactataccaaaaataaataaagaattaagtacaagcacttctatttttgaaaaatgcatgatggttacaacataaagtatactattttgatgatatacataactcctaacggaaaaggaagtttttaactaatcaaatttaaaaatattttaggaggatgggaattggactgaaactggtgcaaagacttgaagagtggtttctacgaaacgacgccgtttactcctacgtgcaaactgaaaacgacaacatagcttcggtcaaactcttcaccgagaaaagtggttactccaaattccgtacaccaactttcttggtcaacccggtcttcaaccaccgagtcactgtctctcgacgagtcaaaatcatcaaactcgctccctccgacgccgagtcactctaccgcaaccgattctcaaccaccgagtttttcccttcggacatcaactcaatcctcaccaacaaactctccctcggcacttatctggctgtgccacgtggaggagacaacgtttccgggtcgttacccgaccagaccgggtcatgggccgttataagtatttggaacagtaaagatgtttacagacttcaagtcaaaggagcgtcgcgtcttaaacgcatgttagctaagtcaacgcgcgttttcgacggagcgtttccgtttttgaaaatcccgtcgtttcccaatcttttcaagtcgttcgcgatgcattttatgtacggtatcggtggcgaagggccacgagcggcggagatggtggaggcgctttgctcacacgcacataacttagctagaaaaagcggttgtgccgtcgtggctgctgaggtggcgagctgtgagccgctcagagttgggattccacattggaaggtgctctcgccggaggatttgtggtgtttgaaacgtctccgatatgacgatgacggcgtagactggaccaagtcaccacctggattgtctattttcgttgaccctagagaaatataataatttgtatagaatatattaagaggactctaacaattgcaaccaaacatacaaacaaaaattacagaattaaataccaaatctcagtgttatacttacttactcttcatacaatgtctagagttacctgtaatttcacacttagaagttgntaataatttggattacaagcacaagct

SEQ ID NO: 7507 - DNA, 1595 bp, Arabidopsis thaliana landsberg
atcctatattatcataatatagaaagactaattctaatgaagaggaaaacgactcatccaaaattccaagttataaagttgcaaccacgacatagaccactaaagaaaacaaatatatatgtttgattcggtctttgttcttgttatcttacaaatttatggaaaataaataaataattcaatttcgtttcaaacattttttttaaagaaaaaaataaccaaaaaactcattacgtgaaaaccattaacccgactttgattctcacaccagctagcgtggcacaaacctctccgttgacttagtcataaaaatgaaatcaatcctctgtctctttcccggcgtgaatatggctctcgtgacgacgtgacactctcgtaaataatcacactatgctcctccactcttatttttccacattgcgtgaactccacgcgccacttccttcatgcggagacgaagagctcttccgctctgaagatgctgctggctcgtccatctccttccacgtggccattctctccgacacgcgccacactttcaccgacttgtttataacttccgctgtatataatccacttccggtctccctcggccactgaggcttttgctccctgatgacaagcccgttcctcctccacggctaggcacttgaccggccccatgtgtcccgtcaaaacagagagacactgatgggacttgtcagacgggtcccgcctccatacgcatatgttcttgtcggcggaaccactcaacagcaagttccccgctatacctagacaaagcactgcggatttgtggcctttgagtattccgcctgtgaatgaccgctttgaacgctcccaatagttcactagcccgtccgaagaaccgcaatatacgatggaagattgtgattttacggccaacgccgtgaccgcattttcttgcttgagcaaaacttgagctaacgtatgttttgttcctttgccttgcaactcacgtttccacactttaacagtaccatctgcggatcccgtgaacaccaagtcatcaaaaccggacattacagagtttatcgcgtcatcgtgtgcatgtatcgattccaaacattttgaatccgcgattctccacactttgattgtcgtgtcccaagaactcgagtacaacaatccaagctccacgtccaagctaagactagacactgcgtcgttatgcttcgtcttcacagagtttctgttgcggcgtacctccatgaaatgcttagggttgacggagctcttgaccattgatttaaatgttggcaatgttccaacccgcttatgttttcctggttttctcttcgaaaccttccaaatccggatcttcccgtcttgatggccggtaaagattcggtctccgaatatcacaatggccttgattagcccactactggatttaaacccagcgtgttccttcaaattcttccaaaccctaatgttcttcgaatccgagcccgtgtagagaaggtcaccagaagcggctagcgagtatatatgcccttcttttctaacaatagatccaatgagaccgttggtctcgaggacattgtctttgttgaaatctgcaccccaaggga

SEQ ID NO: 7508 - DNA, 1841 bp, Arabidopsis thaliana landsberg
  unsure (1)..(1841): unsure at all n locations
ggattaagctttgcggtaagaagaagatgaagaacaagaccaatttaggtctctcagtcttcttcttctttatatgtctcgtttccgtgacatcagatctnnnnnnnnnnnnnnnnnnnctaatcgcgcttcgtgacggtgttcatgggcgtccattgctgtggaatctaacagcaccaccgtgtacttggggaggagtccaatgtgagtcgggtcgtgtcacagcactccgattacccggtgtgggtttatcgggtccattaccaatcgccatcggaaaccttacaaagctcgaaactttatcattccgattcaatgctcttaacggtcctctcccgccggatttcgcaaacctaactcttctccgttacttgtatcttcaaggaaacgcattttccggcgagattccttcgtttctcttcactctaccaaacattattcggatcaatctcgcccagaataatttcttgggtcggatcccggataatgtcaattctgcaacccggttagctactctttacttgcaggataatcaactcaccggtccaatcccggagattaagattaagcttcaacagtttaatgtctcatccaatcagttaaacgggtcgattccggatccgttgtcgggtatgcccaaaaccgcctttttaggcaatttgctctgtgggaagccgttagatgcttgccctgtcaatggcactggaaacggtactgtgacgcctggaggaaaagggaaaagcgacaagttatctgccggagctattgtcggaatagtgatcggctgtttcgtcttgcttctcgtgcttttcttgatcgtgttctgtctctgtagaaagaagaagaaagagcaagtcgtccaatcgagaagcatcgaagcagctcctgttccgacctcatcagcagccgtggctaaggaatcgaatggtcctcctgcggtggtggctaatggtgcatctgaaaatggtgtatcaaagaaccctgctgcagtgagtaaagatctgacatttttcgtgaaatctttcggcgagtttgatcttgatggattgctgaaagcttctgcggaagtacttggtaaaggaacgttcggatcttcgtacaaggccagtttcgatcacggattagtggtggctgtgaaacgattgagagatgtcgtggttcctgagaaagagttcagagagaaattgcaggttcttggatccataagccatgccaatcttgtgacattgattgcatattacttcagccgcgacgaaaagctcgttgttttcgaatacatgtctagaggaagcttgtctgcgctgttacacggtaacaaaataaataactctgtttattgtttgattctttagtagtgattacagattttttaaaaccaattttttggaatgaattcgtagggaacaaaggaagtggcagaagtccattaaattgggaaacaagagccaatatagcattaggagccgcaagagcgattagctacctccattcgcgtgacgcgacaacatctcacggcaacattaaatcgtctaacattctattgtcagaatcctttgaggctaaggtctctgactactgtcttgcacctatgatcagccctacttctacacctaaccgcattgatggttaccgagctcctgaagtaaccgatgctcgtaaaatctcccaaaaggctgatgtttacagcttcggtgttctcattcttgaattactcacaggtacaacaacacacacaaaaacagagagatcttgaaaaccgtatttttggtcaaaatgttgattcatatattggtttttgtattgatttgcagggaaaacttcaacgcatcagcagttacacg

SEQ ID NO: 7509 - DNA, 781 bp, Arabidopsis thaliana landsberg
tctctccggtcaattctctctctggtcctatcccttcggatttctccaaccttgttctcctccgttacttgtatcttcaaggtaatgccttttccggtgagattccgtcggttctcttcacgcttccgagcataatcagaatcaatctaggggagaataaattctcgggtcggatcccggataatgtcaattctgcgacccggttggttactctgtatttggagaggaatcaactctctggtccgatccctgagatcacgcttcctcttcagcaattcaatgtttcttctaatcagttaaacgggtctattccgagttcgttgtcgtcttggcctcgaactgcttttgaaggtaacactctctgtgggaagcctttagacacttgtgaggcagagagccccaatggtggtgacgctggaggacccaatacgccgccggagaagaaagatagcgacaagttatccgccggagctattgtcgggattgtgatcggatgtgttgttggtctgttactgcttcttttgatactgatctgtctctgccgaaagagaaagaatgaagagaacgttccatctaggaatggtgaaactcctgtcgctgctgcgacttcctccgctgctataccaaaggaaacggtggttgttgtcccgcccgcttaggctacggggtcagatagtggagcggagaataaagatttgacctttttcatgaaatcttttcgggaatccgatttggatggattgttgaaacttcaactgaggttcttgggaaagggaacagt

SEQ ID NO: 7510 - DNA, 895 bp, Arabidopsis thaliana landsberg
gtcacaggctttaatgtagttgcagcaggagattcagacattcatcagcaggctttggagtcacttgagtggcattgaaaagattcgctggtatgttctcgcctacttattgtttctacacactcccttgcttgaagacataattatgatcactttcttcatacttgcttgtttgataaataaaaaactgatagttaggttatgattctggttagagcttgttttttttttttttcttgaaataggaaccagagttattttatttttggctttgtgttaaaattgtcaagataacagaattagcaatttgctaaatatagaccattgaatatcatcaatgctcatatcctccaccaaattacagcatactccaaaaactggccacacatataacaactcaccttttctctctttcatgacctttttttctccctcttttcttcaaccacaagctatccaacaaactccctcattccttcttatctttgttcctcctcatccccctctcttctctctctccttcccacccaggagggatggagataagaaagaaaccaaacatattcacggttctcgtcattgatttttcttcaaagccttccatggctctccttctggctattctccttttcctctcaggcccttctgcatctgcggtagctgcagctgctgtgggacctgctactggttttaaaccggcagatgatattctcattgattgtggaagcaaatcgtcatcaaaaacccctgatggaagagtctttaagagtgaccaagaaacaatccaatacatagaagccaaggaagatattcaggtctcagccccgccttcagacaaggtcgcatctcctatctacctaactgcaaggatcttccgtgaggaagccacctacaa

SEQ ID NO: 7511 - DNA, 1969 bp, Arabidopsis thaliana landsberg
  unsure (1)..(1969): unsure at all n locations
gactttacattcataaaactgatatgagtatcattaaaatcttagtggagaaaacgtttgcatcttctttgtaaaaagtttcttgcatattgctcatgctagacttgtgtaattaggaatacaagtaaatgtgatacctcagcgtaataactgaatgccagctttgaaatcagcagaacgatccaaaacattgtgtacctagtagtcattttgtgcatcatcgttaagcagtgctgaaaaaaacaacctacattcgaacctataagttttagggtccttacttgaaaagtgacaaagcgctctcatgcataccccttcctatatacagacgaggctgtatcacaaagaaccatgataagaccatcttttcactttaacattcatggactagcatttttcaagatataagcacatgaataaactacctgagaccaccacatcatcagcatcattatcttatagtcagacctttcaagatagcgccgaatgaatggaaacaaaaacagcaacgcagaaagcatgttcggggataagtagataagaattgccactatgaaaagagaaggtgaattatggctgtgtcccccaaaccaattctttatggtctgagaaaaaccggaggcgtttttccagctgtacgcataagtaactgccatgactacaacccatactgcagccgcacctaccttcatgacgtatctgagtttcacatagagtgacatactatgtcttgccttccagctgagggctatgtcaaggacagctgaaatattatgacaaacagtcagaaaatgtaaggaaaattgtcatgaaaccagaagatcgcaaaggtcaaaccaataattggtaggaaaacatcatattcaagaggacactaaatcaactattgcccactcataacggaggatgctaaacagctatactatgcatcattaccttgtgcaagctttagtatagctgctgtaatgaagacgctcaaaacctttaggaagacatcaccctgaaaaatggcgcttaactctccggatccattccatgcaataacaatcattgcctaaagaagaataatacattaaataacaaaaaggaaatacaaatttgaaagacaaatgtactaactaaaagatattggtacctgcaaacacaggatataaaagctccacattctatcaaaacttctaaatatatgccagaacgagcgtatctccacaaaattgactttgcccatccaccgatctccactgtttgatttnnnnnnnnnnnnnnnnnnnnngaatcaagaaattaaagatacagaaatcttgaggcaaatgacataaaaagaaaatgtacaggttaaaataactctataagacaggaggatcagtctaacctgatacagcgagatttataatgaacatgataagattacaagtttataatccataagactaattaatgcaagatttgctaacataagcagaaaacttcttatacggcccattattttgtctctattactcatacctcacttctctcaagtcgaagttcttcagctgtctgacaaaagaaatcagcatcagcccgcattggccaccctaagcgaaaacatcgaattgacctgcaaaattgcagggacaaggaatttagaccacccagaattccgaaggatagagtgacattccaaaaaggttataagatgatcatctgcatttaccaaaaatattcattcaagtcatcatagtttctccacacagaatgctttgactttcctcctctacttctctttgcttcctgtaatgcacaaaaaactagattgagaaaaaataataggcacgagaagaaaagatgtccacgactagaataactgaagcaagtaacctttgatattgtcttgtatataggagtcacaactttctgcaggaaagcttcatcttcaccaccatacgcttgctttacattgctccctgtcatgggactaaacactacc

SEQ ID NO: 7512 - DNA, 580 bp, Arabidopsis thaliana landsberg
ccctcaatcaccattgataatataaaatacaaagaaaattatcaattaatttgaatttataagttgcaaggaaggtaagtatatgtataccaagaggagccctcataagataaaaactcaaactaaagttcggctatgtttttctttcttttggtgaaaaacaaaatgtcttctaccgaatccaaagtagaaaccataacccaactcatgtcttttcatcatcatcctctattatttacgaatgcctcttctattcattgcattttgtgcgaaacagaagaaagtgaagatagcttggtctgccaatgcattgagtgtggcttctcattgcatatagaatgcgtagagatcttcgagctcttccaccagccacttccgtgcagtcactttcccaagatcttcatcaatggaaatcacgattgtcatttttgtaaaattgatctttcgacgacgtctttgtatgctcgttgcacgatatgcaatgtaaacatggatctagactgtatggtgaatctaccaccactcactattttcgagccaaagcaccataagcatagcttcaaactcttggtacgagtag

SEQ ID NO: 7513 - DNA, 2072 bp, Arabidopsis thaliana landsberg
aataaaaaacaaacctaatttaaaaagaatgtttccgtgccctttgtttattggactcatctcgttggcctcggaagtcagaacaaaatggaaacatcgtggaaccacttaagaactttcagaagaagcagcagatcaatgagttctgatatataggaattccgcacaatatattccaatttttattttattttataaatgaaaaattataaattgtagtcgtttattctttgtgttagtctatttgtttcattacgcctaacggcagcagcaaactctaccgcatattgttgaagtaaaatgatgtcaacaatttttaaccgcagctacttgcgtttgccgcaacgtttgaccacatcgtcttgcgtccaccaaacgaatatcatcatggttgccgctgtcgcaaatagatgcggcgatcaaacgaacaacctaattatacttttaaatagttacataaatattcgggatttgttgttaattttgaaaataatttttctagctaattctttcttatattcttttcttgcataaaattgaaaaaattaaaatattgaaatgtcccggttggtaaattgtgaactaactaacctcgagaaatatgggctctttcaactaataccataactttcgttttaattaagtagatgattcgataagtcgtcgtttcgtctttgactagagagaaacaaacacaagagcgagcaaccgagcgagagagacagagataatggtggtggaagagaaccagaatcagatgatggcttccatcgccggcgactcaacggtgacggcaaatatatcggaagaagacgaagcagaggaggaaaccaccaccaacacatggaaaaccacaaaggaattactgattctacatctctccaagaagcttctccatggagatctcgatttccgaattgaagccgctaaggaaatccgaaagctgcttagaaagtctccggttaagtcttccgctaggtcaaaactcgccgacgccggcgttatcccgccgcttgttcccatgctcatctcctctaacgttgatgctcgtcacgcctctctcctcgctctccttaacctcgccgttagaaatgaacggtaatctctcttggattgttctaggttttattgccatgtaccagaaactgattctctcgtcttctcttctaggtctaatttagctcgatctgaggctttaggcagtgtttaggattagtgacttcactaatctctgctcagagcttgatttatgacattgttctggatttgtagttttagtgttaaggcaattgtttaactctatcaatcaggcatcagaatgtactgagagtagctacattttggactttagatctgttgaaaccaagaggatactgctttttggacactgatctgattgctctaggtctagctttacctgtagtttactgctatttgaatgacgatagcaaatgtaggatgtaatttacctacttgctccagcagtattttctacttattttgggttgtgatttctgaccaggaataagattgagattgtgaaagccggtgccgttccacctctcatacagattctgaagctccacaatgctggtttgcgtgaattggccactgcagcaattctaacactttcagctgcaccagccaacaaggcgatgattataagttctggagttccaccgcttctgattcagatgcttagctccggaactgtacaagggaaagtagatgctgtcacagcccttcataatttatcagcttgcaaagagtactctgcttcaattcttgatgctaaagctgtctacccgctcatccacctccttaaagaatgcaaaaaacattccaagtttgctgaaaaagccacagccttggttgagatgatcctgtctcactctgaggacgggcgaaatgccatcaccagctgtgaagatggtattctgactttagtagagactgtagaggatggttctccactcagcatagaacacgcagttggagctctgctttctctatgccgcagcgaccgagattagtaccgaaaactcatactgaaagaaggtgcaatcccgggt

SEQ ID NO: 7514 - DNA, 1904 bp, Arabidopsis thaliana landsberg
gatatccattcacaccagatcaaaatccttgtttatccaaaaaaagtcttagacatcccaggagaaaacgggtgccttcgatacaacaaatgaaggcatgaaaaagaatcaggacaatcaattttgtctgcttggaggattctcagtatctggacatggtacttcaaataatagttcatctaatgtgagcaatttcgaccagcctgtgactcagcaaagagtctttcattctgagcgaactctacgagatccaacagaaactaaccgtttgtctaaatctgatgattcccttgcttctcaatttgtaatggctcaaacaacatcagatgctttcctgcctatcagcgaatcatctgaaacttctcatgaagcaaatatggagtcccagaatgttcatcctactgcgccagtaataccagctcctgatagcatctggacagccgagggtagtatgtcacagtctgaaaaaaaaaacgtggaaactaacaccccggagcatgtaagtcagacagagacttcagcaaaggctgttccacaaggacacaatgagaagggggatatagttgttgatataaatgataggtttcctcgtgagtttcttgctgatatattaaaaacgaaagagtctctgaacttccctggattagggccattgcatgccgatggagctggtgtgagtttaaatattcagaataatgaccctaaaacttggtcgtattttcgaaatttggcgcaggatgagtttgagaggaaggatctatcccttatggatcaggaccaccctggatttcccacttccatgactaacaccaacggagttcctattgattatagctacccaccattgcagtctgagaaagttgcctcaagtcagatacatccacaaatccactttgatggaaatatcaagccagatgtgtctaccattaccatacctgatttgaacacagtagacacacaagaagattacagtcagtcacaaatcaaaggtgctgaaagcacggatgcaactctggtaagcttattgtattcaacctaaatatggaaaatctaataatttcactactggcaacgtctcaactgatatttttctaatttccataaatttgatatgtagaatgctggagttcctcttattgactttatggctgcggatagtggcatgaggtctctgcaggtatgcatttgtcagcgtatggcttaacaattttacaagctgttgcatttgccctctcttttttaaccagatacatacaacgactgagccaccaccattagtgaactggacagcatcacaacatagggcctgaatagttgttctagtgattttaaaaccctaagtactcttaagcagtacagaccctaagtaccagaaggacttttatattatgtcaaccaagttatgactttccaatgcaaccttttagctgtctttctgtttttggtattcgtctgttcttgtttaaaggacttttgtagaataggtataatgtaccccattggcaggtgaaatcattggaaccttagaaatcttttgtcaatcttgctcctggttttctcactgatggagaaaaaataaagcgactgtatccattttgtcttctgtttcaggtcattaaaaatgacgacttggaagaactgaaggaattaggttctggtacttttggaactgtttatcacggaaaatggaggggtacagatgttgctatcaagcgaataaaaaggagctgttttattggtcgttcatctgaacaagagagattggtgagctttctctctgaaggagttaaggtttctggttgtataagtacattggccactgcgtggatctaaacaaattaaattatctttatgctttagggtaactagagtactgctagaagaacactactaatatctgaccc

SEQ ID NO: 7515 - DNA, 2218 bp, Arabidopsis thaliana landsberg
  unsure (1)..(2218): unsure at all n locations
caactcccattttggggatacatttcatgttctctgtttgctttttgctgaccataagggattaagagatggcgggtgtataataataaaatcgaaccttccataaccaaaaatgttatggaagaaacatcaccttcggtgatggcaacactgggccttcgacttgagtgaagtcagagccaatcctaacaccacattcttgcaacattgggtcatcattataattactagtcttgagagccctcaaaacatggaacttagtatacataaaaatgcaaataaaaagaggataaatggaaaatttaaagtccttactctggttaacacaccaattctttgttgtggattctgccttgattctttgataaggttactcctctggaatttggttagcgctttagtatagcgttgtagagatacaagctcacagagctgcaaaatattttataaaacaaaagatgggaaagtatcataagtatcataagccattaaacatgagattatgtggaagaaaaacaaaacaaaaaacaaatattacctcaatgggaaagtaggtaggacgatttggcttaccaacattgatacaaggtaagccacccgagtaacgcagttcgatttcacggatcctagtgaagtaatcggacactgtaatctcaacctcctcaaattccctgttttggttccttttcttccaagtaaacctaaatcacacaagaaaaagagataaacgagaagcaaaacaagaaaacttaaaataaatatcaactcacaacatacgtttgatccttgcagtgtagtccacttagtccggttatcttgtattcttgatttgaagggaggactttaactctaagatttttcagagtatatttagcctatacgagagagaaacaaaaaaaaaatcagaaaatgaagtacttcacctcaaagatatgctaaaacaccatttgaaattcttgtaaatacctttttccagttaatagagaatggatcgttcacaccttgatttgcaaaaagaaaatcaacnnnnnnnnnnnnnnnnnnnnnnnnnnnnntcgaaacatctgatgaaagaaattaaaactgaaatgttacaaagaatgtttttaataccacatgaaaaaacatatgttaaaagaaaagaaattaccaatattgagggacaagcctccctgagtagttctgaagcttgaatgaaatcctttgcaacaatctacaccttcaccgatattcgcaaagtactttgcgtcattgtggaagaaagattgccgaactaggaggcaacctctgcgcaaaatagaaatgtgtcacaacatgaacatcaagaacatcaaatatccaagaatatatctaagaaaaaaaaactaaaaaaggttcactaactgtctagctgcattttggctcaaaatacagtccatcactctgatagcatctagaagatgtttagttttctttccttgaagagcatttgcaatagcttccattgggatttctggaggcgcaaaaaggattgcaacattgaatttcttggattggtgaggaagctttagtcttttgtctgcgtttctcctagaaggcgcggtttcaagaacaacagagaagtctagactggatctaggaagaggaccaacagtataaagattcttgtcgccatcataagcaaaatgtttgcaacccaaatcagcttgacaagtctgttgaactttttcaagaatctttctgccaaaacctttggctaaaagtggactaccatcttcatatgtgatagtaacctgtatccaaagagacaaagcacactataaagtatgttttccaaatcaagtcatggaaacaggaacaggaacaggaagggaaacaaaaagcgcacgctgtaatggaagaaattattactgtttggttttctgaagttgactctgaagtggttagtgagcagaagaatcttctgtcctttggaaccgttgccacggcgagtcattggaagaagactactcttgctcttcaaaggttcacgttccatgtgttgaggaggcggtagagtcgtatccatttctcggcctccagatgttatgcgtcgttgatccttagttcggttctggctttgacgtactaaggtgtttggccccgaataggaataaccctaaatagtaaaagaaggattatgtaagaggagataagaggcgtgcggtgagtgcaaaagtcttaagccttttatgtttac

SEQ ID NO: 7516 - DNA, 1336 bp, Arabidopsis thaliana landsberg
aaatattaatctcctttaaacataatctagatttgcaaaagtcactatcatgaatcatccattaatgcatatggttctttgtgtaatttcttcaccgtattattaacagttaaattcttattgatttcgccaaattataatagccgacaaaaccaaaacgacgcaaaacaaaaaacagagagagacctgcgataggagacggggacaatgcctgcacggtatagaccgatcttgaggaacataggcatggcgagatcaaaatgctcgcgcggcggattgcaccaccctccgtcgtcactcggctgagcaaaattcggcggacaaaagttcgtcgccgtcacaagaatagatggatttcccggaacacaccatctcggatcatcagtacacttaatctcaaaacaagcaccacagctgaatccgttgttgaacaaagcagtgctcaacgccgccgtgttcacaccgtatccttggctgtacaagttcccgtacccacacgcgccgcctagcaaaaccccacgcgccaaaaagaaaaacagagagaacaaaaaagttagaaacttcacaaaaaagaagaagtcagaaatcataattcatggtatatgtacgaaatgaaatcgacaatggtggatttggtaaggacgtaaggtagtgaatatttatacccattgtgccggaggcgtcactgcccccgtagaaagtggcgtgtgcattctgccacggtccgccactgtaaacgccggggattttggcgtttgttgcggttaagagaaaggaagccgtaacggccaaccacaagccgaccctaaacgcagtcgccgtcattgagttaataagagagagagagatgtgtattggatagggacgagagaaagcgggaaggactacgagtatttatggggactgatgctggttgggtgtttttaaccttccagttaaagttttctgtaatttttcagatttataggttttggtaggtaaattaattgctgcccatctcattggtttgattggctttcactttctgagactaaaccgaaggtggcaattgtggttatgtgccaaaattaaattagtgcagataaattagtaaaccaaaactgaaaaatagatgttgttttagttatgttttatccgaaaccaaacagctctcaacccaaaaatcaatttcggtattcatagttgaaaaccgaaaaaaccaaaagctcgaatttcgtataaccgaatcaaaccaaaattataaatataatattttttttggtaaaacaaaccaaaattatatgccaaacacagtcacgtatgtttgtctttccttttcacgaagtaaaaagggtat

SEQ ID NO: 7517 - DNA, 718 bp, Arabidopsis thaliana landsberg
tttgctgcaatggtgtgctctgttcatggctatgacgctggatgggtcaatgctcatgctaccttctatggtggaagtgatgcttcaggaacaatgggtatgtgcttctcactttgttctctaaaatgtctcagagaaaacgaaaatctaggatatttacaatcttgttgatgttgttgtctctaggtggagcttgtggctacgggaacctctacagtcaaggttacgggaccaacacggcggcgttgagcactgctctgttcaacaacggtcttagctgcggggcttgttttgagatcaagtgtcagagcgacggcgcgtggtgtttacctggtgctatcattgtcacagccaccaatttctgtcctcctaacaacgctcttcccaataacgctggtggttggtgtaaccctccgcttcatcatttcgatctctctcagcctgtttttcaacgcattgctcagtacaaagctggtgttgtccctgtttcttacagaaggtaaaacataaatctatagtctttactgttacaaagtcttgatcttttatgcagtttcttgattaggtgtcaaatttcttgttatgggtcttcataattgctctgcttgttgataaaagtttcaatctttattcactttcgtatctgcgtcatcgtaccttgttaatggtttcgtcatttaaatgactctgttattaaactcaatgctttttttttttt

SEQ ID NO: 7518 - DNA, 2705 bp, Arabidopsis thaliana landsberg
tttaaattgtgatcccttaggttggctcaataacccgatcgtatcaaagatcaattgatactgttacttggtactcaaggttgttctgtcattacgaacatgtcttatttgccaaaaacatttccatcatgtcacactcgcaactagtatattttaggttgcaaatggaaataagaaaacgtccaaagagagagaaagattaccagtgccggtccgagaatatttgatgcttaaagcaaattcaaaattaatgccccaaaattattttctcgcaaaataaaataatatgaaattgattttgtttaagaaaattaaacagaaaaattgttaacaagaaaaaaagacagaaatataatttttcttcatggcgaaacataatcctccttgctttcgctcctgcaaattcattaattaatttttggtaatcgagcttcttaaccagttcttgttctatagatatcagcgccaaaccattcaatcgttcttgaggcacagtcgaacgtagataattttttatgagctttaattttgaaaagttctctccgcagaagcaattgaaaccggaatggtgagtagtatacgataagtgatccatgtgtttggataacaaccatccattcttttcaaaaaatccaacacttcgaccggctttgtaatctcttttggcaacacatcttttaaaagtttcagctccataaatagatcttctccatcaacatctgaatgaacatcatgcttcaaagaagcttcaagcttcatacacgatgtccttaactcatcatcttctgctaccttcaatctctttacaccaaacaaaaatccaaatatttgttcatatacttggaattgctcgaatcttatctcaatacacattatagcttgatccattatattgatgaagtaatcaattctaaaactctcctctgcaatcttactttcatcaatcttctcaacatcctcaacaaattgctttttttttttcaccggcttttttggaaataccggcgcaatcttcatctcaatggcaatttgtgtagcttcaactttggctttctcgaaacctgtttctctgtagtttttcaaataaataacaagccctcctaactgagaaatagcaacctcaagatccatatcctcaaaatgtaaggatttgcttactatattcacagcagctagcaaatcgtaccaaattaccattccaaataaaaattcaaaccctccaattccatgtgtttcactctctgtaagagactcaacatcactccggtgtcctggattataagtgtattctgccaaataaaaaagtgcatctcgtatctgtatctttgaagcttgatatcttattggtttaagactatcaatgcggctttcccaacgcgtttgagacaacggtttaagtgtaataccattcactgtttcgctaaacacttcccaattgttggttgaagcttcaaacagacaatgtattcgctgaacaattccaaaaaaaaaaaacagctttcttggatgatgaagccatatcacaaagtgcaaggttaagaccatgacatccacatggagtgtaaaatgctcttggatatcaagcaaccttttctgaactcctttatgttttcccttcatattttgtcagttgtcgtatgcttgtcatcttacatcatcaatattcaacttaagatcaatcaatgcatcttgaagagtcttaaaaagcccctcacccctcttatctttgatgtgtagaaacgtcaagaagaactcctcaatcttaggtgaacacgttgaaacatccacacatcgaattaagaaggtcatttgttctttacgactaacatccagaatggaatcaagaatgactgaaaaatacttcgcatctttaatcttctttaagatcatcatcttggtctcattagcaagtaattctgtcaattcattctgactcttatgactgagaaaatggcaatgaatttcacctttattagccggggggggttgttccttcattaccaaatcaaaacctccaatcattctaataaatgccaaaacatttccactattaggatcatcaaccttctccttagtttgttcagctagagtctttaccactgcaattattctcaccaatacatctctccaatatttttctccttcttaattgcctcttccatatggttatcaattgttttactcttttgcaatctcacttctatctccatccaatgagtcatgaaaataatatgacgatgagttgtttcatgtcttttcagcctttgcgcagcatttctccagtcattatacccactacttgctaacaaagtaggatttgtttcttaatcgaataatttacagcaaaagcaaaagaccttatctttaactttcgagtaaattaaccatctctaacttgtttctctccattactcagtcttcttatttaagatgaataagtgaaacatctatcaatatcatctcttggaaaacggtaatcagctcgtggtcttggaggtgatcctttctcaaccaaataatctctcctttttggtcaatcttctcccaatttgctggattagtcatatccacattatcataaaaaaaactataatctcatcaactttcttatcaactctctcatcttctttcatgttttcaccctcgacccgtttttctctattctcattcatacgatctacatcatcctccatcacggtttctgt

SEQ ID NO: 7519 - DNA, 647 bp, Arabidopsis thaliana landsberg
agcttgatccattatattcatgaagtaatgaattctaaaactctcctttgcagtcttactttcatcaatcttctcaacatcctcaccaaattgcttcttctttttcaccaagcgcttcggttttataggaaagacctgctcaatctccatctcaatggcaatatgtgtagcttcagctttggctttctcagtagtttttcaaataagtaacaagccctcctaactgaaaaatagcaacctcaagatccatatcctcaaactgtaaggatttgcttactatattcacagcagctagcaaatcgtaccaaattaccattccaaataaaaattcaaaccctccaattccatgtgtttcactctctgcaagagactcaacatcactcctgtgtcttggattatcactgtattctgccaaataaaaaagtgcatctcgtatctttgaagcttgatatcttattggtttaagactatcaatgcggctttcccaacgcgtttgagacaacagtttaagtgtaatacaattcattgtttctctacacttccctattgttggttgaagctgcaaatagacaatatattcgctgaacaattctaaaaaaagaaacagctttcttggattctaaaaaaaaaaacagtgtaaaggttag

SEQ ID NO: 7520 - DNA, 632 bp, Arabidopsis thaliana landsberg
tagaaagaacatggcgacaacatatcgtttttctctttgatatttataataaaaagagaaataatatttcaataaagccttataggccaaatatggcaagtcctggatagaagaaaatcaaaggcaagtgctgtacacagtacataatgtttctaaaatgacgtgcagaattaaaaacaagtttgtagcaattcagcagatttgcattcgcatcataaaagttggtttgtgtgtctgagattctttagacgttcaaaaatacatgcatgttatcctagattataccaaaataaagttcaaatactttatgcttagagacaatttcctcgaatagatccggtttctatagagaaatctcattacaagcaaaaaaaaacagaattttcatttttctttattgcgaaacataatcattcttacttttgctcatgcaatttttttataatcgagtttatcaaccagttcatgttctatagatatcagcgccaaaccattcaatcgctcttgagatatagtcgaacgtagataattttttatgagttttaattttaaaaaatttatcttcgtagaagcaactgaaaccagaatggtgagtagtatacgataaacgatcatgtgtttggatacaacca

SEQ ID NO: 7521 - DNA, 194 bp, Arabidopsis thaliana landsberg
tgaggatccccgtctcaagagcgattgaatggtttggcgctgatatctgtataacaagaactggttgagaagctcgattaccaaaaattgatgaatgaatttgcaggagcgaaagtatggaggattatgtttcgccatgaagaaaactgagatttctaaatttttttttcttgttaacaatttttatgttcaat

SEQ ID NO: 7522 - DNA, 1619 bp, Arabidopsis thaliana landsberg
acatgctttaaatagaggacaagacaagattgtcagagattacttgaattctgcactcggttaaacgttctctaggaaccatctgaaattggcttaatacttcctccacatcttcgtcaattgatatttcgtagtgaattatgagttgttcaagattaggcattgtctcaaggaagtactcgacttgatccatcattttgtccatgtcctcatcttcatcgatatctccaaacttcattatctttaagaccttcacaggacttaatgatagacaagtgggaatgttctcctcctcccaaggtttgcacaggcactcgtcactgctttgacatttcatatcatatctgtggagaagtccctgaaacataaaggaaacacatttcaatatcggcttctctctgtttgaataatgtatcagcaaagaatatagttagtacttcaaagacaagggtttctaggtttggactgttcttgagtagagccgtcaatgattcccatcccacaagacgatcagtcttaacggttagctgaatcaggttgttgaaaaccggcagtggctcacagcagaaacagagtacctgaaacagagtatcaccttttaaatccgaaggaaaaaaagaagaagatgagtacgaagttggagactactgacctcaagagtgttgtaagataagtaaagggacctaacattacaaattgcaatgaaaaaaacagttgcattaccaaccaacccctcatgctggattggatcatccgctgaaaatttggccttatggatctgatcatgtgtcatttgaagatcaagacgagcttcaacaagcgaatcaaaattcgctttaagatacctgacagtactgacatcacgaatattccaagtacaagagattgggagtacaaacgacacactcttgtgattgtgagagaacatttgattaaaacgaaacgttggtctcttgaggcttgtgctagatacagaacaagactcccaaaattcctgaaccattgtattgcacccatcaatcgctgtagacataggccaatcccaacatgaagagatgtctagtgcaagttctgatacacgacgtttcaacacattggttatccaaccaatgacaggagcaggtccaacgtcatctttacacttgatggagaatctgttcaaaggaacattcttacacaaagccaatttaccatccacacgctttatgaaacgttggagcatcttaaccctttcttgttttgtcactccataatgcatacgcttagagtcatcaaaatcgagattcatctttttcaaatgcaaatcaccacttatagcctgaacagagcaaatgagcttaagtaagaaaatacaacaaagggattccaaaaatacaacattaccaatttcaaagccggtttcaaggtctaagcctttcacacaatctttaagtttccatttagattcttaacagaaagagaaatattgataactaagaatcaaaacatcaacacacataggcaaatgttcttcttttcgaaagtttttaaactagagacactacttgagaagaggagaagcttacttggggtgtgaagcagagatcattatacaactggtgagtttttaatgtactttc

SEQ ID NO: 7523 - DNA, 797 bp, Arabidopsis thaliana landsberg
acgtaagagcctcggacgataagtacatcctataacttatctgtctcccatcataaaatctgctgcgggggcgcgcttacatcttttataaccatgatgcctattcactaaatctcttgcgtcaaagacctgatcatgtgtcattcgaaggcctatgctagcttcaacaagcgaatcaaaattcacttttggatacttgaccgcaacagtatcagtaaattctaatttttcaagatttggagtatcaaaggatacactctttggattctcatcaatgttctcacaatcaattgatactctcttgagggatgggctggacacagagcaaaattcccagtaatcccacatcattttaatcataactagctcctcaagggcgtgacaagcagaaatcagcttggcaaatggaggaccaccctcatcaccgaacgaaatagcactcaaatgcaaagtcttaagctttggaagaaaaaactcaccaacatcaatggtgaactcatctgttcctgacactttcaggctaaccaatgtcttggtcatcaagacctttggaggcagcggatattcgtattccgaagcaatgtacagatcaagttcttcaacaccacggtccaacactttgagtacccaaccattgacacgagatggatcagaaccaattttgcacctaagagagaacttttttaacggagcattcccttgcaaagccataactctatccacaaaaagcaaaaagcttttacgcagctctagcctttttcgtctacccattttaggacggtcatagatcatgttgt

SEQ ID NO: 7524 - DNA, 535 bp, Arabidopsis thaliana landsberg
ggtactattgtaactcttctcctaagagcaccgttttgaaggagctgtttttcagtatcttctgagtctacaacaacatcatacaacttgccaccagcagtaacctggaaacaagaagcaaagtgacttcaggcaattgaaatcccaacagtgtttattgtgaaatgataagatatccagtctacctccaacgctgtcattgaggacctatcttttacttttattagttttgcgaccacacctttcaccttagatcggtcaaagttcctcacaggatcgctgtatgtaaactgaaaatttgctaattgagctgataagccacgcactttatcttccagcctctgcacaacttcaagttcggctccacggtcctaaatatatatttcagtcagagaagtatactttctgtagaaaaagacaaaatcaactaaagtgaccatgctaaccttctcaaagcttccatttgaccctcgttataaggaatagattcaagtgccttttttacatgttccacatcatttttcctagctccaag

SEQ ID NO: 7525 - DNA, 816 bp, Arabidopsis thaliana landsberg
aagacgttacgcaaataagaatcaagtcgagactcgagagtaaaaaacacattacaatcatatataatcaaacctacaaaatcaataaacattattagacgcaagactatgcgaatacatttccggatagatattcattacaggacagcatagaggggactagaggtttatagttatatatccgtgtaggatttaataccatgaccaacttttcttgacattgttagatgccattatttgtctaataagagtgtagatagagcatatgtagatgacagaagagagagagcgggagggtttatctgatctgtggtcgcttgaatgatgagttggtcataggaagtttcctgtctaccctgtttctttcttgagtctggatcagttgaccgctaaaccctctccggcctgacccttctccaaaactgtcaccagagatcttcctcctcctctcattgtgtccagctaagcgcctcctgcagcttcttttagcttcatcaaactctggtagctcatgaaacctgctcaaaaccatcaaaacaatcaaattgaaaacaaacccctacttaatactttgtataaagtaatactgaagggaagaatcatacctgctgcattgttgacaaaagcgttgcctgacccctgcaacagtcgcagcagatgcctttgcatgtacttcacatactctgtgtctgcggtaatactgcttggcctcagtcaaattaacagtgcacctatcgacctggcacagtcgcgatggaacacggtcagtgctaggacctctaactctttccatcaccttcttccttttgtcttcgt

SEQ ID NO: 7526 - DNA, 929 bp, Arabidopsis thaliana landsberg
  unsure (1)..(929): unsure at all n locations
agcaagagctgttcctaatcgcacgtgagtatcacatagctcctagagattctttcttgtaacacatttttataattttacttgttcataatagaaaaaaatatttgggagtttcaatcacattcaaatgatttatactccctttatttcatatgataataaatgttttgtacacattaaaaaaaaaaaatagtatttgttttgggctgatacttacacatgaataatgtaatcataaagatcaacaaaattaagtcatcaagaaaagaaaccaacaagaagatcccaacattttgacaacatccttttttctattacacaatatcttaaaccgcttccacagtatattggtaattcgaacgagtttttctctctaacaagctttgtgtcgagagtctagaagtctgttgactatcttcagaagtttcccaatccgttactacgtgtaaattcaagagaggcttaggtggaacctgtagagcttctagacgactgccctctaacatttcaacaacttttctcattggtggacgatcagatggattggtttgtatacaccacaaacccactaatgtcattctcttgattatcttctcttcttcttcttcttcgattatatgatcttctaatagtctcatggtttctttcctctcaagatcctcatagacccaatcaggaaagtacattgaacttttatcggtcgcagaagtttcaacttcttctcttttcgttgccccaatcatctcaagaaccaccattccataactatacacatctgacttatgcgaaactcctccatagttcttggaaaacatttcaggagcaatgtaccctactgtccctctcgcgtccaacattcatatgatactttctttctttttgcaaagctangaaagaccgaaatctgaaatcttcgggcaaaagtcttg

SEQ ID NO: 7527 - DNA, 760 bp, Arabidopsis thaliana landsberg
tcaagagtgtctggaaccgtttccgcgggtgaaaacaagagaggattaggtggtacttgaagagcttctagattcccctctaacatttcagtgactttgatcattggtggacggtcagatggattcatctgaatacaccatagagcaaccaataccaatttctttgcaaatttctcttcttcttcagttatactatttccaaaaatccttgtgatttctcccttctcaaaatctttatagacccattctggaaagtacattgaaccattgttagattcagaatattcaaccttttctatattctttgctccaatcatctcaagaactaccatcccataactataaacatctgacttatgcgaaactgctccaaaattcttggaaaacatttcaggggcaatgtatccaaaggtccctctcatgtgcagcattgatatgatgctctccttgtttttgcagagtttagcaagaccaaaatctgaaatcttaggacaaagattttcgtccatcagtatgttctgcggctttatgtcgaaatggacaatcctcgtgacacaccgattgtgtaaatactctaggccgcgagagatacctaccgcaacgtcgtataatctttcccattccatctttgttgacatattcgcagaaatatacttgtcgagggacccattcggcatgaactcgtagattatagctctcttgttcttttcataacagaatccaagcagagaatcaatattgacatgagatgttctactct

SEQ ID NO: 7528 - DNA, 501 bp, Arabidopsis thaliana landsberg
acagtttgtttaacttctttggaaaagtgtaaagaatcttcactagctgaaagagtacctcgttcgaactgagttgggttagagaagcttgaagtctcattactatcttcaaaagtttcaggaatcgttgccgcaggaagatacaagagaggtttaggtggaacttcgagagcctctagattcccctctaacatttcaatgactttgatcattggtggacggtcagatggattcgtctgaatacaccacaaaccaaccaataccattttcttcgcaattttctcttcttcttcagttatctgatctcccaatatcctcataatatctccttgctcaatatccttatagatccaatctggaaagtacactgaactattagtggaacgagcatttttaaccttgtttatattccttgcttcaatcatctcaagaaccaccatcccgtaactatacacatctgacttatgcgaagctcgccctaagttcttagaaaatacttca

SEQ ID NO: 7529 - DNA, 536 bp, Arabidopsis thaliana landsberg
tgaactcttctccattcccctctgacaccttcaagatcttaactgcgacatcccgaccgctatcggctaactttcctttgtagacagttccaaatcctcctttaccgagaacatgcgcaaatgagtttgtcatcttcttgactcttgtataactgtatcgtttcaacattgcaactgcttcaacgttctgatcattccactcactatttctcatattctttgttctcactattattacgaccacaattaagatcatcagggtcaaagctgctgagactcctggaattagataattaagaagaattaaaaacgaggtgtttttcgtatacaaaagtactatggattgagcgagatatggtaccaactatgagttttaacttccatgatgacttttctgtaagaacattcaaacaaaaagtcttttaagcaaaaattaaaaaaccataaggtatgaaaaagtaaataaaataaacttacgtttcgttccttcattagtttccttggatggttgagacattgaacttatgtcgttgcta

SEQ ID NO: 7530 - DNA, 1893 bp, Arabidopsis thaliana landsberg
ggttgtgatcatgatgatgatcatggtcgtgatcatggtgatcttccttatcatcttcattcacagagctttcgattctgataaagcaaagaacaccttaataactgcgtgaagctacaagacaccaaactgaatattatcataagttaaacaagaagcagacctctctagatcaaaacctccaattccaagaacataatctaagtcaacatttccgtactttgttcgcgtcatctgagccatgctgtttattgtctgtagataaccatagcaaatacgttaacattataaccaagaatggtctgagagactaacatataatcatctagtgaaataaatgaatacgaagaagatgtgagaccgacctttatgcgttgtaccaccgaacctaattccgcctcaccaacaagatcagtctgcaacaaagtacagtcacttttcagaaattggatatgccaacaaaaacaatacaaccgataacttcccaatatatttgagtaaaacatatggatccatcacttaggacgtgtcaaaaccatttgtgcaaatgaatttatttgtaaactataaactatttgagagaggaacgacctgaatcttatgatagaagagattcaaccactcaagatcacaaaaactatcacattctctttgagacagttgtgttcaaaactttggttaccttgttaactatgatacgatctgcataagctatttgttcaacagcctcattgacaacaccttcgggtttgacctcgtctagatgcaaacgagcatgcttagcatcaactagagtaacaacaccgtccagtttgacatcattgaaaatttcttcctcggcataaaaggtttggataatcggtgccgggtttgccaatcctaaaaagtgaaaataaacataagatagtcattactcattccccagattctctaagcatactaaatgaaaatgccccctttcccaacctgtagtctctatgactatatgatcgaactttcctttcttggtattgactaattctccaatcatcctgacaagatcacccctaacagtgcaacaaaggcagccattgttgagcatcacaatatcctcagctccaatagatttagaagcaacaagtgacccatcaatgtcaacttcaccaaactgagagaattcacatgaaacatgaattagaaagcaacaccattataactgaattcaggcgaggataataagctaacctcattctcaatcacggctattcgcttcccatgatctctggttagtatatgattcagcaatgttgtctgtggaaaaacaaaacattgcagtataattagtccaacatttcttttacttagcagggctaattttaaaccctagaatagatatgaaatgatgagaaacactgactgaccttgccagagcccaaaaaaccggtgataatagtagccggaatccggttatctggcggaatcttagtggtgacatcagaatcttcagtctgcgtagctgaggcggagacagatgagaatctttgacggcggaccaccggggaatagaagaaagacggcgtcgttctgacggaaacggtggtagctctgggcctggagagaacagagacggcggcagaagaaaagcgatagttgaaggcggcagaggaacgaggagcggtgaaagagaggaaggtcgtagcaatctctagtgttgatagcgtcgccattttagttaaagaaagcaagcgagaggtcaatggcgattggcgagtttaaacctcgtcccactctgtagcttcttctagatacacacaccagataattttcactcgattttttttctctgtctcttctcaatattttctcccaattactatttttgaagatatttatcattgtagatatataggtctg

SEQ ID NO: 7531 - DNA, 771 bp, Arabidopsis thaliana landsberg
ctaaaccctaaaccctaaacctctgaatccttaatccctaaatccctaaatctttaaatcctacatccatgaatccctaaatacctaattccctaaacccgaaaccggtttctctggttgaaaatcattgtgtatataatgataattttatcgtttttatgtaattgcttattgttgtgtgtagattttttaaaaatatcatttgaggtcaatacaaatcctatttcttgtggttttctttccttcacttagctatggatggtttatcttcatttgttatattggatacaagctttgctacgatctacatttgggaatgtgagtctcttattgtaaccttagggttggtttatctcaagaatcttattaattgtttggactgtttatgtttggacatttattgtcattcttactcctttgtggaaatgtttgttctatcaatttatcttttgtgggaaaattatttagttgtagggatgaagtctttcttcgttgttgttacgcttgtcatctcatctctcaatgatatgggatggtcctttagcatttattctgaagttcttctgcttgatgattttatccttagccaaaaggattggtggtttgaagacacatcatatcaaaaaagctatcgcctcgacgatgctctatttctatccttgtagcacacattttggcactcaaaaaagtatttttagatgcttgttttgcttctttgaagtagtttctctttgcaaaattcctctttttttagagtgatttggatgattc

SEQ ID NO: 7532 - DNA, 1047 bp, Arabidopsis thaliana landsberg
  unsure (1)..(1047): unsure at all n locations
gtagtgttcgatctgtattgccaccatatatcataagagaaacctcgagtaggaaagtacttcacatggaaatttgtggaactttactgtaacattagcatccaattgtcgttcattgatgaacgattttccattcagcctatcatagctttggccaagataaggcagtaatcgtttcatatcagtccacaacctttctgaaaccattgtaccaaatgttagatgggtaacaatatgagacatgttcatttgagaagcatcaaatgaatgagctcctgaatgagctgagattacaagttcgccgggaacctgagatcaaacaatataaaagacaaaatggcaccataagaaaagaggaaagataagcaagaaaaaaaatcatcggacatcacataaaattggacgttcgacatttttaccttctttgcgcgaacatatccttcaattcgacaacctccactaactggtgcctttttaaaagttgaagccgcattatcagatttaccatccaaagccaacttatgatcctcctttttaataggtttgagcagttcttccaccatctggaatagtcatgttattgtatatgaaagtttttcaaggaaacacagtttcttatatgaatacacaaaaagcaggtataaggatgtgattattgaatcatataatcctaatggtcgaatctaactaagaccagtctaccttgactaagctatctgtgtcccgatctccatagtaagattcatgttcgtggttcccatggtcctccctggataagattagataacaattgatcacgaaaaagggaatggagttttacaaaatgcttaagtacatgacaagaagaatcataactgaagctaatcgtaaacttaaggaactaatttagctcattttctcacctaagatcactgcctctgcggaaaatccgaatagatggatagccttgtatatgattgctgaagattggtaaactaagcttaagtcaaactgaaaaaatcaatctgaataataccataaaacaacananaatatggaggaaaatat

SEQ ID NO: 7533 - DNA, 268 bp, Arabidopsis thaliana landsberg
gagcataaaacaaaaagagaagatctaaaattacgtgcgttttttgttatgttgttattgcgttattttgtcttagcacataataaaggtcaatctgaccaaaagacatatcaggtgagtctgttcattgtttcctccaaatgaagctttcaaatttagagcttaacaccaattgaaaaataaactcacatgcatttgtgttcatttgttactgtttccttacatgagagatcttttgtttataatgattcaacattttgagctacct

SEQ ID NO: 7534 - DNA, 2372 bp, Arabidopsis thaliana landsberg
aagcctcgctctctgactcctgggaactcgctttggagtttacgacagatagatgttcatggtttggtgtttctgtggcggagtgagctgaagcgtgaggagaagcagctccatttgttgcattgctgctctcaggtgaatcttgcttcagtatagaagtgacagaattagtcacatgattctcagcatcggaagtaaccaagctgtcagaagtttctgagtcaatagtggaacaagagatcccaaaatactcggaaaccatcttctcattttcattagcaacattaggatctggaaactctatcttatccaactcacccggaactgattcagacccttctggatccttggtagtttcatcaatagaaacagacgaaggcatagagggaatagccatcacgtcagggtaggatccataataggagagtgacaattgaacaaaaccagctggcgaatggtagagatcagtggaagaaagagagaactctttctcgagtttcccattcttgaagagcagttccgacataggaaccagagtaaaaccaagcagctggtcctcaagataattcttcaccctgctcatcatgtaaatctcacatttgagggaagtgtccagaaccctgacatcaagcttaacattgtcatcaaaaaccggattcctcccaccgccattgatgattttggtcgagacagacttatcaggatcacttgtaaggcaaagcttggcataaacgtcttgcttgtgatatatacaaatgttatggatatcccttgcctgatggacataaacctcaagagcaccaacaaggtcttgccggccacaacttttagaatctttcccattggaatttatgccattcgattggtttccagaactctgcacagaatttgagttctcattctctgactcaccaatcttgaatggtgaaacaacagattgtggggagtccattgtaaatcctagcaacattcctgcaaagatgaaggcctattagtatcagcacatgtagatagagtctattgttggaaacttgcacatccagaagagacatgactaaaaaaaaagtgaactatgtgtccatgataagtacaacaccaagctgagcaatttgttaatattcaccatgccatggtatctttagcaagcaaacgggctattctataatgcgtctaacagcctagcagatattaagactgaacccggaaagaacgggatcttgtgataatatatcagaatgtaatgtaaaccgaaagatcaagttttaaaataaaaatttgggaaagaaaacaaaaatttagatcataattaaaactcaaacaatgttgattaacagattttgaaaactatatgtaagggagatacaccaaccaaaaggacagtttcatgtcaaaatcagaattgagaacgttataggcctaaactacgcagagcagagctaatagagagaatctcaagaacaaggaaacgaactctgctcccttagatcccaactcacaatatagtcacttgtaattcaagatggatgcatcaacaatcaacacagccaaaatccacagatcaagtttagacaacaattcaaggctaatctcaacatagatgataacacattcaacaataaagaaattttgaactagagtcaagtttaggtattaccaagtctttaaattcaaactctaaccaagtcaaacaatttatgagcggtttcatacaaattcaaactctaaccaaggcatcaattaactgaaagtttcaaagtttcttgctcgatccaatcatcaaagaaactcaaaaatcctgccacagcttacaatcaatcaacacagacaacagaaatggtaaagctgattacttaagaaaacttgcctaaatccaaaaccaagctctgatctgaggcagctgatttctctaacaacaagaacccacaaagagagaaactttaaacaaaacaaaaaaaaagggtaaagaaagacaagtcgtagtcgtgtaagaagatgatagaaagaagaacaagcatgtgggtgggttacataagaaaaagttagaaacaaacaagacaattttcaaagagagttttaaatgcaaactgttagtaagttgacaaaaaaagattggaattttttgaagggtcggcggaaagaaagagagataagattagggtttagcacagtcacttcaatggcggaccactaagaaggtgggacatagacttcaaattttcaactgtttcggctgtgaaaagtttagattgaaagctataaagctttatctcttattaaaagaaatctttacaataataatacatcacgcggatgaaatcacttacagagatgtttggaagatggaaaagctgtgagcttctttttttttgttg

SEQ ID NO: 7535 - DNA, 1971 bp, Arabidopsis thaliana landsberg
taatatatatttgcgatagattttcgatctcacttatatcttataaccaagagacaaaaacaatattgcagtcaagtacaaaacgaaaacaatcacaatgtcgactatagatgagtcggtcattcgatccaacggctctgagtccacgaaacacgcaaccaagtggtgctctcttttacaccaaatcatattatataaaacttaaaagaaagagaggatggttcgttggctccttcttgttccttaattaattcaaattatattcatcacctccattgaataagtccatttcacgacaaagtcaccaatgcttcttttacatgtatatatacttctttccactccctcttctctactcaaatcaaatcttcttccttctctgttttcttaagctttttgaaaattttatcaatggcgactcctaacgaagtatctgcactttggttcatcgagaaacatctactcgacgaggcttctcctgtggctacagatccatggatgaagcacgaatcctcatcagcgacagaatctagctctgactcttcttctatcatcttcggatcatcgtcctcttctttcgccccaattgatttctctgaatccgtatgcaaacctgaaatcatcgatctcgatactcccagatctatggaatttctatcgattccatttgaatttgactcagaagtttctgtttctgatttcgattttaaaccttctaatcaaaatcaaaatcagtttgaaccggagcttaaatctcaaattcgtaaaccgccattgaagatttcgcttccagctaaaacagagtggattcaattcgcagctgaaaacaccaaaccggaagttactaaaccggtttcggaagaagagaagaagcattacagaggagtaagacaaagaccgtgggggaaattcgcggcggagattcgtgacccgaataaacgcggatctcgcgtttggcttgggacgtttgatacagcgattgaagcggctatagcttatgacgaagcagcgtttaaactacgaggatcgaaagcgattttgaatttccctcttgaagttgggaagtggaaaccacgcgccgatgaaggtgagaagaaacggaagagagacgatgatgagaaagtgactgtggttgagaaagtgttgaagacggaacagagcgttgacgttaacggtggagagacgtttccgtttgtaacgtcgaatttaacggaattatgtgactgggatttaacggggtttcttaactttccgcttctgtcgccgttatctcctcatccaccgtttggttattcccagttgaccgtcgtttgattagttttttttgagtttttgaacgatgtgtatgctgacgtggacgtacacgtaggtgcatgcgatgaaaaaaacatctatttgttcatatttttgcgtttttctatttgttcattctttttcacaattcacaatacattatttcagttaatgattacggataatttagctttacgttaatttattatgagtactagaagaaatcggagtaattcaacatatagattatactagtataaatgtcaattgcattgacattaattgaggaattatagtagaacctagtataaaaagaatgattcaaacatgagatattgaccggcgttatgtgaagttgttcagacaataaatgcataaccgtgattctgtctgaacaagtcgattcttaggataaaaaatggataaacttagtcaaaatatttcccacgtggttagacttttgcttagttacatgacgaatgtgaaagccatccatgcatgtatccagaagaatatatcttgcacggcgaattctctacgtattttagtattttagatttgacgacatctaattttcttttggtatttcgggtttgacatctaatctgctaagaaccttttcttataatcgaagaattttgttgggtcgtcttgtaagatattattttcagtacacac

SEQ ID NO: 7536 - DNA, 2631 bp, Arabidopsis thaliana landsberg
acactaatggagctacaggatgtatcttccgatatgttgatttctgttttttcatcttctcagtatggaggaggtttgggctcgatactgtcttgtgaaattgcgcagattctattttttccctttcctgtcaataacaatgactgactaagattttataattttatagctacaacattagaccgcgcacatgccgaggatgctttgctgccaatcgcaagagttgctgatctgcacgagaaaaagagtgtacaactacactcatctgataaggatacttatatggttgaccaaagtcatgctggcgagttttacatcacggttctgaagtctaaccgtactgatgcagataacttgattttggctattttagtaaacatatgcagatgcttcagtacaaaaactgctctggccttttcttcattcttttctatttcaaaatttcagatcatgtagaaacatttagcatggaggataagttgagatcgttagggatactgggaggtacagatgaacataaaaatctttcctatgcttcaataattgatggaactgatctcaaggcttatctaccaccaaagaaggtatatttgctttctggatgctcagttctttggcgtgtgttacaacccactgatgcatttctttagagtttttcctttgaatatatcaatcgtagtattcatataaatttttgtattggcagttaaagtctgctgttttgtcaatggaaccctccactgcattcaagactctagaagctttggctgctatgtggttgacaaggttggttctctgatttccttggttcctgttcgcaagttgtctcatctattcttattattgaaaataaagtcgactctttaaacttcattgttcttctctagagtagcaaatttttttttttttgtttaatctttggctataatgatataacccaaaacatgtttgattcgctggtcttaacacagttgcatttacttcaacagggcttgtggtgggaggcatcttcttccatggatatacagcataatggtgaatcatagtcattacatcatgtcccaagaaccaaaagaccagcagcttcataatacattggttaaggtaagagataagagtagagccaaggaatttgttaattctgtaatatttgcttggtttaattatgttatactgttcttccagattaccaagtcccgaggaacggctcttcaacagttactacagttatctgggcgcttacaacttgttacagctcaggtaatacccatcaccttctaatcaattctcaaggcggatgcaagcttatcgttgtctagttttaataaacccttctttgatggcagatcaataaagctgcaggaagtcaaacgcaaataacagcccatgatcaagagattgatgaaagtgaggatgaggaagaagatgtagaagaccatttctatggtgagaatgataatgaatccgatttaagcagtgacgatggaaaggataaaggtaaatgattttagattcatttctcgcaatattggtttgtggagcaaatgttatatctaaatcttgcctactgtctttactttcagatgattccttgatggagacgtaagctaatgagcgaagcgtagagaaaggagcgtggcctcttcttctcacgtttttttttggtctcttttatgattcccattatcttgtattagaatttgtatttttgatccgaagcgggaatttttttcactcatttcttgtcttctatgcgttgcacagaattatctgtctttctttaaactgaacaagactacaacgaaacgcttaagttccatagcaaagaagtattgcaacggaaagaaagcctttacttatctagttcctttcatgttggattacgttcaaagagaaaaaagcttaacatgtgtcttgaaaaagaaacatcaaccattcaaatactaaaacttctgcttgaaaatagaaacatcaaccttttctatagcggtgttgtttattattattaccataatgcaaaacctcttcgaaatggctcgaatttactgttaggtcgccaaaagatgtacaacaagtcacatagcatttacctttctcttcatctcggctgatctttttagtatctggtttttcaattgctcactgctcagtgtcgagacatgctttaaacggcacactgatattctcaccttaaaatgggattagacacagccatgtgcttttgatgaaaggattccgaaactgcatgttttgggcttgaagcatctgacgctgagtcatcaacatgttcttctctttcaaaataacatagcacagcttctgaagatcatcccatgactcgagacgcaattttgaagctttccaacctcgacttataacacaccaaaatatatagacaaatgttcttaaaagacctcatcatcaaaacaaaacaatccttaattccaacactacagtttccaaactttttccatagcgaaaccaaaaagaaaaaagcttaagggacaagagttacagttatatgaacaaagtataaaaagaaaccataaaacattcagaaaacttaaaaagcaattggtaacagaataaccacattacatgaaccataaacaccaggtttgtcttcgtctt

SEQ ID NO: 7537 - DNA, 584 bp, Arabidopsis thaliana landsberg
tgactttgaaaaacagttttgaaaaactataatgctagcaacatcctctattaagccctaaactaaggactatcaggtggcttatttgaaaaccactaacccacaaccgagggtattgcatacatgtgtattgttatttttgaggccattcagtttttaatggatcgacactcaaggtaaggtgagatgtgagagcatgaccgaacaaacgtcggtctaggggagtgcttaattgttgcgcttgattatatacatgttccacatatgtatatatgaaggctgcgatgtggagtatttacttttctgggaatcagtaccccatgaatgtgtatggatatacatacagacatgggaatactaagaagtgtaatgcacttgtaacgacgcacctacgctcaggtaagaaggtgagttaccataatgagttgcctatggttaaagtgtggcaacagcgcctacgcgtggctcggcgcttaatgaagagctggcctccatatagaaaaatatggagtataaactgagataaactgtcatgtgtgactgcatcatggaaaaatgggatgtgatggattttttctgcaggt

SEQ ID NO: 7538 - DNA, 1533 bp, Arabidopsis thaliana landsberg
aaacagaatattgaccatacttgatgtcaacattcttgtagcagacccggcagggcgaaactttggctggatggtaaggagtgtgagagagtcgatgagggtgacgtgtgatctttatgacgcggggtaaatcaatacaactttggtgaaccacatagtagcatcggtaacatgcataacttggctccaacgcgttaatcaacccacaagcattacaaggaaatgaaagtggtcgagggaacaaggcgagtgaatggggatggcttttaggattttggattgtaagaggtggaaattccaaggcacattggaaatccaaggaaaagttacatatcgtacaacgatagaaccatccgctgagatcattaccacaccaagtgcatatatcgaatatgatactggattttggcttaatatttttggggtattcagaattttctatatcaaaacgataccgaaatctatagtattcaccatagttggtatcggctatgattccggtttcatagtttataacggtgaaaacgagagggtgttgagggtgataagggtgaattatcttacttgggtactcaagacaattctcatggaactccagatcgcatatggtgcagtagtaatacaagtcaggacactcacgtatctcccaaggaacgtcacttttcccgcacccaaagcagtcgtgctttaccttctgcttggatctatgggagaagttgtgaggttgagccggatcagacacaacgcatctcggcatttcctcatcgtccatttcttcatcactgctttggccttgacccatttcttttctgctttagtttgtttttgtatttttatcttttgatggatgtgtgtctacaaatttgtcttcccattttgtatatatatagatgacaacgataaatcaaaataataattaatcaacaagcagcctcataatatcataataaagaatgccgaaaacataactatgtatgacatgataaattgacccaacccaaagattcatattttattcattggtttccacaacttataacaacatttatcattgaattttatttccaagatctgcctccaggctgcccacgtttcaagaaataaattattgatgacatttagattataaaaccctaattagatatagaaatgcagctaatcgcctaatcatgctccccagaggccagagtcatagtggtgagggaaaaaataacaaccaaatcttaatcaattgataaaggtttgttagctgttaacacagctgttactacagctacatgatgttttgtttgcttattattagttgcaccgcaaatcattatgatctcatgttttgttttactcgagagtatatcaaacaattacatgttctaaattactagtattacattttcattttccaaaatgaaaattactagtggtaatgacaacaaaattactagtactacattttccacattattagttggtatcatcatcatcaacgtgagtcaggccagtggtaatgagaccaatactttttcacaagctttc

SEQ ID NO: 7539 - DNA, 719 bp, Arabidopsis thaliana landsberg
  unsure (1)..(719): unsure at all n locations
aggaatactgaccatatttaatgtcaactgtcttgtagcagacccggcataacgaatttgggggtggaatgtaatgtatgaaaaagagagacgatgaggatgacgtgtgatctttatgacgcgtggtaaatcaacacaatattgatgtaccacataattacattggaaacaagcataacttgcttccgacgcattgaccaaaccacaagcatcacaaggaactaagagtggacgagggaaaaggacgagtgaatggtgatggccttttgggttttcaatagtaagagggggtttggtttgtgtgcacatagtatccaaacaaaagttacaaatagaacaccgatagaaaactgtcattcttggatgtgaacttggtgttggtatgtatttcccacaccaagtgcagttatcaaatatgttaccccatccagacttaccaggatccgatgtgccttggtcttcataagggccttgttcgctcatattgctgccgtcgatgatattgtcatgctttccataggttaaaaagagaggatgttggaggtgaaaaggatgtaatatttttctaggaatattaacacattcttcgtggaaatccacatcgcagatggtgcagtggtaatggaaaccccgagaagaagtggatacttgcttcccgcatgtaaagcaattggacttagtgtttttgctgagtttangggaaaggggtgaggatgagt

SEQ ID NO: 7540 - DNA, 913 bp, Arabidopsis thaliana landsberg
ggccttaccgagcaaagtagtgatttgagaagcggagaacagttgttttatacattgactgctttaaaatgtctctgcaactgtcaagtcttcccggaagtttcagcatacacttccaccgaattgacagaaagcgagtggttgcttgcttcagattaaacagtgcagctgaccaaaagaattccaaaaatcagaaagaaacaacacaaaacacaaaagtcatcaatcttaacctgaagagaaaagaaaaagagccacctactcaaagtgattaataacagtttactttgaagcagaagatgattcggaaactgaaacactctttatacaagtcatgtctcatgtcttctatagacgattcaattcttaatttggccaacaatggctcatttagtctctatcacaaacatttctaaaaccagatactccgaatcaatatcagatccaaagaaacctcaccctcattagctatgtcgcaagaagcatcttcacaagaagcagtctttctcaaacacttccatgagcaaaaccctttggcttaatcccaccaatctgaaaacccttttgttcttctttatgacaagttatatcatttgctctgacttctttcctcactagaaacttcatctgtgagattcccagacatggccatacccgaaaagttcaagagacatgggtatcgcgcaacgtcggaaacaccatcgccttcaacaatgttttcgagtaatgcaaatccaaacgccaatctatctaaacactgtcgttccgtaacattattcaccatcatcgcctgaaacaacttcggaaacaccatattcatcgtcgccgtcgttcccttaaccaaaactctgccgtttataatttaaaaacgccggctttaaacgttgtcgtctcaacttaccaatacgcagtc

SEQ ID NO: 7541 - DNA, 684 bp, Arabidopsis thaliana landsberg
gaagtataaaattgcaattattttaagattcttcaagaaccattcttcacctttttatgtaaaccattagaattcaacaaagtgactatcaatggttttgagcttctccaactcctctccatcagcaattccattatcaacgtacaacatctgtatgtatatatcatcacaatattacacaaatcacactcagacaaaatcacttagctttatgcaaaataacaaagaaatgattgatatcagagttcgaagctgagacctgatactcggggcatttcagtgtgtgagctcctcttttaagatatccctcccatcctctcttctctataagcgctatctctatagctctagtaaactgcattcacattcaagtctcacaatcattaatcacattcaacgttagtaaaagctgatgttcatgtatactcacatcagccgggtccaaaatcaggagattgtactgaggagtaaatgtagttccttgcaaccgtctctgaatcccaacaattgtcctcgagtgcccttcatgttggaaatacaagggcctgcagtacacacgataacatcaactcaggaaccttagacgtaatgtgttttgaagttacaaaagacatttcagagatcaagaactgaaacaaaacaacctaccctttgttcgtcatatgaacaccggatgaaacattt

SEQ ID NO: 7542 - DNA, 1687 bp, Arabidopsis thaliana landsberg
gtcaaaagtgtatgcaacgacgatcaagtcaatcctctccttctgtcttgtacttgtttggtcttctctcctacacttcaattcaagcagctcgagtgcatctcgatggtaagctaatcttcttgaattaacaatccatcgtagtttcccttgaatagaatttacttcatttttaatttttattattatgatagttgaagggcatatgctgctgagagcaccagtgccaattcggttttgccctgcttgtgcgtgttgtgcaccggctccaaaaggttcttgctgcccatgccgatgcaccaacaatccccaaaggatgtgactttgctttctgctagcatgtatgtgtttgatatgtgaatgtgtatgtgcaaaatggtcaaaatttaatgaaaattaacaattcacaagtaaaagtaaatctatggtgttagaattgtagctataaatatcccattaactagtggataaaggaaaggaagacaaataaaaactagtggacaaagaaaagaaaaggaaaacttaaatttctgaactttcaatagatatcatccaacgagtaatattttttttcttgactaatataaacatcatttactatggtctcaaactgcatctgaaatcttattaagtttctaagcatttatcagaaagctgcaatggccaccgagcgattctcaaccatgctcatttccgttctcgtacttgctttggtcttatctccaatccttccatgtcaagcaactcgagcgcatctagatggttagctaatcttcttgggatttatatataatacatcgcagttttcttaggtgaattgttttctttttcttatagctgaaacgcgtatgctgaggcgcgtgtgtccttcgtgtgtgtgttgtgcaccggctccacgaggtgcttgctgcccatgtcgatgccccaaaaatccctaaaagcttcgactttgatttcgtctaacaccttgtcatgtgtttaatatgatcttatttacatgtgaataagcaatcaaaagattagactccgtatgaatcttgtcactcaggccattctactttgattgttataggataaaaaaaaaagtattctatatgttttgtttgccttgtagcttcgttttaaacttattattaaagtggatcggtcaatgtttgaggaacctttgaattctcattcaactcagaaatagagactttgaatcttagaatggtctgtggaaaagtcatctttaaaaacgcatataaatatgattacccttaatcctctacgaacacaaagcataacaaaccaaagcatcaatggcgtcgtttcacagtggaaaatccatcttcttgaagctctttgtcttgtttctgctacttgttcttcccttgtctcaaagcaacgctactcgtatcccaagaggtaacaactcaaggcatcaaactaaactttatatatacctacaatagtttccaatattagattagtaaagtgatctgtatggatcaatctttcttggtatgtatttcacatcagctcctattagctcgagaagaccgatttgccctgcttgtgtgtgttgtgagccagctccgctaggaagttgctgcagatgttgtgcatctcctattgtcactcaaactcatcaccactctcaatctccatgaaaatgtaacataaaaaagcctgacttggtacccaa

SEQ ID NO: 7543 - DNA, 1368 bp, Arabidopsis thaliana landsberg
gtatgaataaaaaaaattagtaaggtgaaaaaatggaacaggggagattcaaaggggtgacctgagatcacaaaactcaatggtttcaatggaaatttgaagaaaccataggatatgtgttcacatgccactcctttgaaatttcacctcctgttgttcttctcttcttctccatactttgctttcactgcttcttatatatactatactacacaagtttctacatatataaatacagtttactcttcttggtcttacttagatttttgttcacttctgttctgtcataatgtggtcattgtgttgacaaaaaattagtaaatgtgatgaaaatgaccacatccttttcttcacatacgacaacgttcaatggaatgaatcaaacaaagttgggctcagaatgtatatctattaatgggctattgatgagcccatatgagctctcttctaaactctattcaaatagtttaattactctgccgacaaaatcataaatggtcaaagagttggatagtcggacgaacgtggcataaggacccatttttccgtgccactcatcaaaacctcaaccaatactaaaaaatttaagtgtagtaaaatacaccaaatattacttctctataaagtataaactctacatttatgatgaagaatccaagattatactagcatttacataggtaaacaaatacacaaaactaaaagtacctatccaccaataaaagtaactctatgatcaagaatcaaagataataagaaagaatttatcaagaccggttatgagggtcgacttttgcgaaatggtcaaatgtaatcaagcatcttttttacgtaggaagagaataaaattcactcactaaagtcgaaaagtagatctaaggcgtaagaatcgtgactataaatatcccattaactagtggataaagaaaaagaagaccaaaaactagtggacaaagaaaaagaacaaaaacctaatttcaagaaattcaataaatatcatcctccggataagttgttattgtacgtttaccaaattcaagaacaagaaaaaactttttcctttgaaacaaagaaacatggatttcttcaccgatcaagtaaagaagaaattctccgacaagaaaccggagagctctgatccggatcctaaccacaacaaaaacaaacccggtcacaccgagccagcaacacataaacccggtctcggcgagccaacaacacataaaccggtctccaacaccgatccaacaacacacagaccggctacgaacgctgagctcatggctagtgcccagcccgtagcagaagctgctcaagccgcaaaaacgtaacgagtcagacaagcaagaaaaagctaaagtctccgga

SEQ ID NO: 7544 - DNA, 747 bp, Arabidopsis thaliana landsberg
tatagccccttctgagccagacccaattgcctttgcattgcattgccagaatgttcccgatggatctgtgtagtacctatacaggattgagttgtttaacatttgttgtttaccaatttgagatcatctacacagttggaaaatgatataagcgaaatgaataacaacttacaggctcggtccattttcatcatgcccagcaatgagaagggatactccaaatggacgagactgcaaaaagtttgtgagaccgagcataagtacattcatataaaaaggagacagtaaagaaccaaagaatatttgctaaaacattatggaagattagggattgttatagtggtggttcctaaagagttatatctattaattcacaacaaaaatttaaaaccccaatctaagggtttatctctgataattgatcataatttccaagcagaaagaagagaaatccactaaacattgcctatgctataaaggtaatagagcgattactaccattgactcttcctatgctataaaggtaatagagcgattactaccattgactcttcctctccttcaccaaaccgtaaagcaagatcacacaaagcttgtgttgtagattctacagtcattggctcaccatacgagaacctgtggttctgctcaacataataaaaccagttggtaacaaaaagaacttttgatgtaaaaacaaatccatgagaaacagaaagtcagaaactgagatcacacatgggtctg

SEQ ID NO: 7545 - DNA, 960 bp, Arabidopsis thaliana landsberg
attaagtttttttttttttttttttttgtcaacgtctctgattaagttaaactcatatagttgacagttgtaagttgtaacgttggctaatattttagtcaataaattttgttcaggtataaagaaaaaaactaacatttcttttgaagttggtagataaaagtctttccaaacataaaatctgaattgtcttgaaaccaaaaacatttgagatcagccttactacaaacgaagcaacacttagattataactataagccaccacaaaaaaggtaaaaccttatagacaaaacctactcttcgtcaaacaaaccgaaaccaccctcatagtcttcttcgtctgattcttctttcttctcctctaccttagctgcagctccagcttgagcactaccaccacctgcatccgcagacactgccgctgcagcaacaacaaacttgctgggatcctgcatttcaaatttacaccaaagagttaacattaacacgaacaatactacaagtttcaaaaaccacataagaagaagatgtacaatttaatgactaacctttaagaattccttgaccttctctgcttgagggaaagtgtagttagtagcaacagcaatagctaaagcattcttgtaggcattgatgaacatatgcggtgcagccgcaagggtagggtaagaaacagctagagccaaggaagtgaccatagagataccagaagcaaacttttaacaagttgatcttcagtaagatcaagaacctctggactgaagactgatccattatcataaaccgactgaacaactagaccatacgagaaaggcctaatgccaagcttagctagaagggcagcctcagaagacccaaccttgtcaccttgcttgataagctccacaggggtgataatttcaacagtacccttgttaatcttagtgggaatggtaagcacctatacattccaaacaacac

SEQ ID NO: 7546 - DNA, 1541 bp, Arabidopsis thaliana landsberg
agaatgttttctttattcctgaattcagattgaatttgatcagtatcagctctttgactactgaccttggtactagagtgatctttgatccttcttgctgtcaaatacaggatcttaccaaggggttgacgcttggagaaggtaaaaggattgggaatttctatgtgttggacacacaatctcctgctatctcggtgaatgcagttgtggatgtgagcgtgtggcacaagagacttggacacccatctttttcaagactggattctctttctgaagttttgggaactactagacataagaataagaaatccgcttattgtcatgtttgtcatttagccaaacaaaagaagttgtcatttccttctgcgaacaacatttgtaattcaacatttgagctgttacacattgatgtttggggacccttttcagtggagacagttgaaggatataaatatttcttaactatagttgatgatcattctagagcaacgtggatttatttgcttaagtctaagagtgacgtcctcacagtgtttcctgccttcattgacttagttgagaatcagtatgatacaagagttaaatctgtgagatctgataaagctaaagagttggctttcacagaattttacaaagcaaagggaatcgtttcttttcattcttgtcctgagacaccagaacagaattcagtggttgagaggaagcatcagcatattcttaatgtggctcgggctttgatgtttcagtctaacatgtctttgccatattggggtgactgtgttttaactgctgtattcttgattaacaggacaccttctgctttgttatcaaacaagactccttttgaggttctcactggaaagctaccagattactctcagctcaagacttttggttgcctttgctacagctctacttcaccgaaacagcgacacaagttccttccaaggtcaagagcgtgtgttttcttgggttatccgtttggttttaaaggccacaagttattggatttaaagagcaacgtggttcatatatcgaggaatgtggagtttcatgaggagttgtttccattagcgagttctcaactctgctactacagctgcagatgttttcacaccaatggatcctttgtcctcaggtaattccatcacttctcatcttccatcaccacaaatttctccatcaacacaaatttctaaacgcaggattactaaattccctgctcatctccaagactatcactattattttgtcaataaagatgactcacatcctatttcatcttctctttcttactctcaaatctcaccatctcatatgttatacatcaataacatttcctaaattccaatccctcaatcttatcatgaggcaaaggattccaaagaatggtgtggtgctattgatcaggaaattggtgcaatggaaaggactgatacttgggagattacaagtttacctcctgggaagaaggcagttggctgtaagtgggtgtttacagtgaagtttcacgcagatggcagtttggaaagattcaaggc

SEQ ID NO: 7547 - DNA, 694 bp, Arabidopsis thaliana landsberg
agaactttccaaagctttttctttgatatgaaggcagggttagaatgcaagctaagttgtatgcttcttccgaatgcttctcctggacccagtagaagttacgtttatgagcaaacaggaaaatggaaaccaaacatatatgtaactactttgctatattacctttgaaaagtacccaaccatgtggcatcctcggtcatcacattcgcaaagaacgtagaatagaaacaaatcaacatcgtagtaaagagttttgtggtcaagaaataactttgccaggtagcagagattctgtgcataaaccttgttctttttgccatctacctgtaagatgagagtacggttagagaaaaacgttcctgctaatgtagaacataaccagatgagagataaactaatcagcatccatatacgaaaaaaaaaaacataagagaaagctaacgatacatcatatccagagcaagaagaccagagacctatctcaggatattacctcaaacattgacaaggtaccacttcggtaaatttcatcaccaggtgggtgcttcaggtcacacttcctctgcaggaaaaaagtaaggaaattatacaaaagctacaagataaaataaaaccatataaatgcaactttaatgaaccgtgaatgtggatatgcaagtcagtgacaatattcaacagaatctgaaaggttggg

SEQ ID NO: 7548 - DNA, 904 bp, Arabidopsis thaliana landsberg
aaagtacatatggcgagcaactgttttttttatcattcgtagcattttaattgttttgtcttttctgttatttttaatttcacacataccttttatgggtcattctttttacttaagttttgctcaatcgtcttttatctatgcagaggaaatgcgatttgaagcacccccctggggatgaaatctatcgaagctctactttgtcaatgtttgaggtaatagattgatgttttcatccttaaactgtttgctttaggcttacgatacttgtttggaagctaataaatgtatttagaattgaattttcacgacctgggagtttatttgtaatatcttacaggtggatggcaagaagaataaggtctatgcacagaacctctgttatctggcaaagttatttcttgaccacaaaactctttactatgacgttgatttgttcctgttctatattctctgtgaatgtgatgatcgtggatgccacatggttggatacttttcaaaggtatcagcacactttggctcttgggtctgttatatacatgttctgtttcaatttgattgtctgatgaaaaaaatgcaatttctgttggtacaggaaaaacactcagaagaagcttacaacttggcttgcatccttacacttcctccatatcaaaggaagggctatggcaaattcttaatagccttctgtgagtttttgtttttcattcaactcttcttatttggtctcacctctctctataaagcttacacgttatattgtgttatagcctatgaactctcaaagaaagagggcaaagtcgggacaccggaaaggccgctctctgatctagggttagtgagttacagagggtactggactcggattttattagacattttgaaaaagcacaagggaaacata

SEQ ID NO: 7549 - DNA, 863 bp, Arabidopsis thaliana landsberg
acttagctaggtagtgatccccagcagaggaaggggaagaggaatgaggaggcgtaggagccgccgtggcaggtgatgattgagactgagcggaagattcatcctccggagccgccatgattaacagaaggaagtcggcaaaggtcgtgcttttccttctttaatttcctctccgtcttgtgaaattaaaaaagggacccaaatcttacagtgacactgtttcattttttatcataagaaaaaaaaaaacagttaaatccatataacaatcgttaaaaaatcagttattacttattaacataaaccctacaaaaaaattggtgaaaatataccatgatttgtatgttccaaaaaatatactatcatatagtggtttgtattagtattgtaacgtgttataatttagatttatatctaagtttgataatttaatatattcatcatctattctattgttagtattgttcgatgatatattaaacagtttcaaagatctattggaatttaacttttttagtcactagtcataagaccgatttgctagttaaaaatgtttcaaaaaaacaacataaaggatttgctaatttggaaaatgcgcaagagaaaattgttttttttttaattggtaattatgtttgttattcttgattgtatttgatgtgtagtagtaaaatttaaagggtaaatttgtttcttcattgggttggtgattagataagaaaaaaaatgttattaaaattccattagatttgtttagttctaaatagtttattgggcttggaaaatcactaataatcactgtacagtactaactacaaaaatgttctaggaaagaaaccagttataaaaaaaataaaaataaa

SEQ ID NO: 7550 - DNA, 2680 bp, Arabidopsis thaliana landsberg
cttatataagcattcactttctcctctatagtcttatcactaagctcatagaaaacatacaaagcattaacatactttggacttttcggatcaaaacccatctcaacaatcttcttaaccgattcttcaaatctttctttaccacaaactggtttagctctagagatcaacaagttcaataacagtctctgtggtactcctaattttctcaaaaccgatacatttcgatttcgattcgtctgctttctcttggaagaagaagaactagaatcttgatcttgcaaaatctctttgacataatcatagtaatgactaatccatttccctcctctctttcccaagatcttaggaacttttgaaacaatctctgtaagctcagagcttgaagctccgttaagcttcaagaaatgaagtttagcacgaagagttttctcaggattctcaatgagaaatcgtgggtaagtggaaataatacttgagatttgagaatctttgaatccatagcttcttaagagtttaagcactgaatctggattacctttttcatcgaagttagctttcattgagattgattcagcgagttttgtagttaaccctaatgaatcaataaggtaagagactgtgaaagttttcctctttcgttcatcttcaagacttagatctttagtagtagtaacaacggaagagaacgattcagtgaaagcagaggagttttggagaagaagattcagattccgccattgatgtaactcgcgtgaccttcttccaccatggagtattaatgaaaacatgatgagatttatggagagaaaggagaaagagtgggtcgatcaatctgaaaatgctctgtttttaacggagatgatgaagacaatgaacgacggcagaacataagactgattgtctttagggttttagatttaattatttttaggaaattcttattaacaaaaaaaaaatcatcaatttgagtttgtaaaccaaagttgtgtactgtttaaccttacaccagagtggttaagctttggtaatcaccattgaagatagatagtgattgggttttagagattagcaatattaaatacaaaattatgttacaccgttcacttgaaagttaaaacagatttgataacagttgcattaactaatttttcttttttattgacaacagtacatgaaactttaaacaacataagtactaaaaaaccatggtccaaatattacaattccaaaccaaacacactacataatcatacaaataacccacacacgcttattatcaaccacgagcacattattaccatacttaaaaagccataaggtttttctccttaatcaaattaattagctaattaaccaaaatatgtagtttgattaattatctaattaaccttaaactaaacaaacactcaaacaaacccattgccatttccattgacatagccattaccattaccattgacatggccattaccattgacatggccattaccattggtgagcttctttccatcatcttcttcttcctcctcactaagtaaaaactctttgctcttcacaagcttctccataacagaagcttcaagagttatctccacatcaatacttatgcctcctgctttaccttggtacaaatacatcatcccattaaaccggttattcgacccgctcctaaccgtttccggttttccaaacccgaaatccacctcgtaaacacgaaacctcggtgagcttcccaccgcaacacaattcactccggcgtctttgaattgaaaaatcttcggcgatttctcccactcgtcgttacgtgcgtcgatcacactcgcgtcgtgtgccgcgattgctttctggatcaccgaagctccgaactccggtccgtgcgctgctagtagccccgccgctgttccggtgaagatcgcttgaatcaagtttccgaaatattcctccggcattggaggatcaacgcggcggcgacagtcggcgaagacggtgaaaatagttatgtcctccggtttgagtccacgcgctaaggtgacgtggcgccagatgtgtgatgtcagggattggaatgttgagaatggttttgaactgtccgatgggattactgaattagctcttgacttgatcgtgtggacagcaaagtccgagaacctgaagatcttttctactagctgcggcggttccaccgtcggattggcagcatcttcgccgttggaggtctcgttggggtccttgggagcagtgaggtcgagcttcacgcgcgtgtcacgcgccttcgatcggtcaaggaaaggttgagtcgagatggattgggctccacgacagatctcggcccatgagctcataaaatgccacgtggatgtcccgtctaagactgcgtgattgaaagctaggcccattgcaagcccatcttttagcttggtcacctgttgcgaaacgaaaaatgttggttaattaatacttgtgaaaatgtttttatttttcttttaaattttagtgtaatgctttttttttcatgttaatggtttggagtgtttgatttggacgatagtttcgagaccaacatagacaatgactctcccaacgactacacctatattctaaagccattacattcaatgcacattaatgccgttgagaatttaaatgaccatatccgacgaaaatgaaagtttgtata

SEQ ID NO: 7551 - DNA, 2060 bp, Arabidopsis thaliana landsberg
tatggatttgttacccccatactttgcagaatggcagtagtctcttaagcctaggtacttggatctcattggcatatattaagcctggtaatagcatcattataaacattacttaaaccaaaaaaaaaaaacatacgacagccaaatagaatatggggataagaagcaagagaaaccaatgaagacatacccgtatttttcattagagcggcgatataagttgttttaccaccaggagcagcactgcatcgatataaaatcttgttataaactcacacaacaaaacagtcaaacactagaattggaatcatcacacgccaacaaggtcaaacgctttttagctgcagcgattgtttagtagatgagtagatgatgataacttacgctacatccacaatccgctcattctctcgaggggcaagggccatcactggcaaaaacgaactagcaccttgaagctgcaaatacaccaagtagagagacttaagcaaacaattgcattccataaaggtgaagaaaagggaaagacatcagaagatcacttaccatgtagtacccagccagatattcaggagttgcaccgattgggacttgtgaatcataaataacaagtccaacctgcagtaggacatcagtaaataagacttaggacagatcaacaatagaagattcataaaaataggactgacagaatagaaaatagtaagaacaaactacttactttagaccacttgcttaatgggtctagattgactcctctgttcaaaagtacatcagcaagatcccgtcttcgagtctaaagcaaaacatacatcaccatgaaattgcagaacttgaaagtcataagctacaacccagtaagtcacaaccaagttcaccttaagtgtgttagttcggatggacgtaggcctttgcttttcaaaagcttcaataagttccataagttcaccaggaggaaacatctgcaagagaaatcccaattcaacatccataagtaaagaatatcagcaacatcctatccatactatatcaaaggaaagaaactagagagtctcacctcaaccaaagttccaataagaaaactgttataaccataataagaaccgagatcagctttgagctgttcaacacaagctttcctcgtggtgtcttttggcctgaaagccttaaaatttttaagagctctaacaactgaaatgttaaatgaatcaacaattagaacacaaatccaaaccaacctagataaataccatcacaccaacatttcaacagtaataaagcaacaaaatttggaaatgttactaactctcttcaattctagtcttaagtagaggaagatctggtggaccacgagcttcttcttcaagctcctggacaaatgaaagataacaacaacagttagatatatgctaaaaccaaaatcaaacagagtaagtattacacatgaaaaaaaagttacctcttcagttggtagcctaaacgcatcatgttcaggttcttcatcatgtacatcatcttgcttgataaaatcctccagttcagcagcagcatctttcttctgcattgctaagtctctatcaatagcatcagatttcgccacaatatcgtcgtcgtcagagtcagcatccgaatccgcatctaaagatccttcctcatcttcatcgccgctaccttctagaaaatcgtcacccaaagtctcttcatcgttctcttcctcatcatcagagaataactgattagacccgttctctccatcatcagattcatcaatctcttctgattccacagctggagaaatatcatcttcatcagaaccatcggaaacttcgtcatcttcatcagaatcatcggtaccttcgtaatcttctagaggctcttcctccacaacttccttcttctgcttcttcaatggaggtttgttctgagatttcgctcctttcttcaacattgaagtttggggtttcattggaggggttttggatttcgtaagctgcttcgttggacgggttatcgagttcgtcgcagccctcttcttgtacgagtgagggcaggcatggcta

SEQ ID NO: 7552 - DNA, 780 bp, Arabidopsis thaliana landsberg
cagtggtataagaacttgttacagatatcacaatatactagttgcatatgtctcacatcacgggacaatcaaattggcttttccgttttgacagcacttatcatctcagcaatcataacaaatgatacatatcacaagctacacttcaatatcagattaaggtactgcttggtcatcatatatatatatatatatatttatctgagacacaaatatagtgcatttatgtaagataatgacttacgccatgtccacaactcgttctttttctcgaggagcaagggccatcactggcaagaacgaactagcactttgcaactgaaaatgtaccaagaacatacttaagtaaacaataagaaaacccataaagtgtgagccgaaaagtacaaaaaaaatcagaaaatcaagtaccatatagaatcctgccaaatattcaggagttgcaccaatcggaacttgtgaatcataaacgataagtccaacctacaaatattatgccaggatcaactaaagatggtccacaaaaatgttttcgcaaataaaatggaagacaatctgcaaatactacttacttttgaccacttgcttaatgggtctagattaactcctctgttcaaaagtatatcagccagatcccgtcttcgagtcttaaccaaaacaaacatcagcattaattgaaatatcacaacagctgagaaatactttgttttagacactccaatgcacacgcaagttcaccttaagagtgttagtacgtatagatgtaagtcttttcttttc

SEQ ID NO: 7553 - DNA, 1183 bp, Arabidopsis thaliana landsberg
  unsure (1)..(1183): unsure at all n locations
cgtgtcttcataacaacttttgatttcttgacagcaacagttctaccatcgacaagcattcttttgtacacagtaccttgaccgccctgtccaagtatcctgctttcgctgaagttatcagtggctttttcaagctctctcgagctgaatattcgtgtcttctcgacgttgcctttatttgtatttaattgttgttgcaacaatagtcctccgttacgtttaaagaactttcttttcctcttactcatccttctcttcttaaggaactttctcaaccaccaaattccaaccactaggactaagatgccaaaagcagcacctactcctgaaaaccgtacaaaaagattgtatggatatgttaaccatcacatgtttcctatcatcacgatgttaactgaatctaaagatatattcactctgtcttacctatcattgttattgtagtcttattgccaatgcaattaaatgttccgggaagattcacacaagtatcgctttctctacaattttggcgttgtccataagagttacgtaggcactcattaatatctggatagtgaatacgaaaggtctttaagaaaattgtgaaaatacactccgtacaatcctacgtactctgaggttcccagatgttttacacatagaataagagaggactttagaaacaatttaactgacctttgcatccgccagggaggtatgggttaccttcgtaaccttgggagcatccacagtttgcataatctgtcccagaaatggtgacattgttgcatatgcaacttgttacgagtttgatattatacgtagaattatcgtactctgtcgtgtttttgtagctcaaggagtttacaaaggagagattcttcgtctggatgacccatcctaaactaactgtagcatatcttttagcaaataacctttttggttcgcttgcattcgaaaacggggagacgtcatctgttaagaaagcgactctgcattctagttttgtcgagtttccatgatcaaagctctctatgttgatgccgatcacttgtggagcctcagaatccggtagacctgcgatgcaacatccgttaccatcacagcttctttcatcttccccgttgttctttgtacaaagcgagctgtaatagggcaacttgttgtctgagcaccagttttgtnaaaaaaggatgcttta

SEQ ID NO: 7554 - DNA, 3474 bp, Arabidopsis thaliana landsberg
caatatacggagctcgcgggagtttaagttacaaggagttccaactacaaacctaacagtgttagacgagggaaagaaaagagagcggaattgaaagagtgcagatgatagaactttagggttgcgcttgtaactcaagtgagcgtatgttccctgtgccacaaggaacagttgtatgtccgcgggaggaagactggggcaatgaaaggtgaggagctagaagcagccaataaagagtttatcgaaatactcaagactcttcaatgtgagctcggagaaaaaccttactttagcggcgataaattcgggctagtagacattgtcctgattggattctataggggggtgccagcataccagaagtttggtaacttcagcatcgaaccagagtgtttgaagctgattgcttggggaaaaagatgtatgcaaagagagtgtgtggctaaagctttgcctgattctgagaaagttgttggatacgttttacagcttaagaagttatatggaattgagtaaggatctctctaaattgccgttttctgttctgtttagctatttgttgtgttgtgttatgtgtgtttctgataatgaaacgaagtctttgttcgaaattcggatgctttgttttgttgaaattcgatgtttggtctgaatgcactacatcaacgtataaataacactttatcatgatttcccttgttgattgtcttgcatgatttgccttgttgttttatctctttggatttagatcatttcaaaagatacaactgtgtttgtttcgtatttctagcaaataacatctgacttttgagattgattaccaaattgtaaattagtaatattaacgacgattgcaattgcactgaaatttaacaatcacttagattatttgaacaaagtattttataaaatgaaaacattagttaacataaaaaacatattcataatcaaaaatataattaaaaatatatgatccaaagataattaaaaaataagtttacataataaaaatatttgtaaccaaaaccctttaaaaaaaagtatctaagagttaaatttacttgcgtgaaaagcggttgaactaataacacctcttacggacccgtatgttgggacgggatgcttagtccgccgctttgttttaatgcattgaaattcaacatttagattttttgaaaaccaaattattttatataataaaacaaattgttgacaataatcaaaaatataactaaaaagatagtttacataataagaatattttgaaaaaaccataaaattaatcttagtgttaaatttacttgcgtgaaaagcggttgacctaatacccgggtttaaggacccgtaggatgggacggcatgcttagtccgatttgatctcaatgcattgaaatttaacacttcgattttttaaaaaccaaaataatttatacactaacaacgtttagttaaaaaaaaatatatacattttatataattaaaaagatagtttacataataagaatatttttaaaaaactataaaaattaatcttagtgttaaatttacttgcgtgaaaagcggttgaactaataacacgacttaaagacccgtaggatgggacggcatgcttaatccggtttgttctcaatgcattgaaatttaacacttacatttttttaaaaccaaaataatttctatactaaaaaaagttagttaaaattttttaaaaacatttgtataataagtaaaaagatagtttatctaatcaaaatatttttaaaaaattataaaaactaatcttagtgttaaatttacttgcgtgaaaagcggttgaattaataacacggcttaaggatccgtaggatgggacggcatgcttaacccggtttgtttcaatgcattgaactttaacacttagatttttaaaaaactaaaataatttatatactaaaaatatttagttaaaattaaaaaagaaatattttgtataagtaaaatgatagtttacctgataaaaatattttttaaaaaatcataaaaactaatcttagtgttaaatttacttgcatgaaaaacggttgaactaataacacggcttacggccccgtaggatgggacggcatgcttaatccggtttgttctcaatgcattaaaatttaaaacttagaaattttttaaaaccaaaataatttctatattaaaaacagttaattaaagattttaaaaaacattttttataagtaaaaagatagtttacctagtaaaaatattttaaaaaaattataaaaattaaccttagtgttaaatttacttacgtgaaaagcggttgaattaataacacggcttaaggacccgtgggatgagacggcatgcttaaccccggtttgttctcaatgcattaaaatttaacacttagatttttaaaaaacgaaaataatttatatactaaaaacatttagttaaaattaaaaaagaaatattttgtataagtaaaatgatagtttacctgataaaaatatttttaaaaaaatcataaaaaactaatcttattgttaaatttacttgcgtgaaaagcggttgaactaataacacggtttacggatccgtaggatgggacaacatacttaatccggtttgttctcaatgcattaaaatttaaaacttagatttttaaaaaaactaaaataatttatatactaaaaatatttagttaaaattaaaaaagaaatattttgtataagtaaaatgatagtttacttgataaaaatattttttaaaaaatcataaaaactaatcttagtgttaaatttacttgcgtgaaaagcggttgaactaataacacggcttacggacccgtaggctgggacggcatgcttaatccggtttgttctcaatgcattgaaatttaaaacttagaatttttttaaaaccaaaataactatactaaaaacatttagttaaaattgaaaaaaaacatttttttttctttctaaacgactactttcaattgatatttaacagtgattacagtgtagagcgtttgtatattttgcatatttaaaaagatagtttacgtaataaaaatatttttttacaatcataaaaactaatctttgaaataaatttacttgcgtaaaaagcggttgaactaaataacatggcttacggacccgtaggatgggacgggatgcttagtccgttttgttttcaatgcattgaaattcaacacttaatttttttaaaaattaaaaatattttacataataaaaactttagttaaaactaaaaaaatcataatcaaaaatataataaaataagtttacataataaaaatatttgtaataaaaaccgcaaaaattaatctaaatattaaatttacttgcgtgaaaggcggttggactaataacaccgcttacaaacccgtaggatgggacgggatgctcaatccggttgttttcaatgcattgaaatttaacacttagattgttaact

SEQ ID NO: 7555 - DNA, 2084 bp, Arabidopsis thaliana landsberg
tccctttaacacataaatcatagccacacattataattctctatcttgtttaaaaggattcaagaaaacttgcactgatcttgcatactctttagtctttacctggggagtctcaataatatattgtacgtcttgaaatgtgaaagttagaggttcgaaaggcaatgcatttttgaaacgggaagcaattttagaatcattctctgagctttgagtgttcttttcatgagaaacaatcacacgagacctctgtgaagctgaagttgcagaaaaaacatcaattctcattgattataatctaacatgattaagtcacattcttatctcttgtgaacttactcttcagaaaggtcaaggccagtgcaaaaacagtattgaagaagagtgtgaagccaatcaaagcgccaaatgcattccagtaagattgatttccaaagttcaacccgcgagcatctagaacttcttcccccaaagttctgttttcagatgttatctaatggtaatgcaaagatgataaggatcaataatagactaaaaaattatctaatgagaaaggtttctgaagaattcattaccttcccccaccgtggagcgaaaaattcatttgcagttagaccaatctcagcatatgacaatggagaaagccagaatccccactcaagccaagaaggcattgaggctgaaaagtaacagggcaccattacagtgaatcctccgagttactacagttcaagttacaggttaaaaacttacgttttcgaacaataaatcctccgaatactgagagaagcactatagagatgcttccaatggtagtggcaacatcaaaatctcgaaagacagcacctatagcacggaacatcgatatacacgaaaggtgtagagcaaataagatcaagacctggcgaaagaacctgaaggaaagaaacaatatttttgtttagcagaaagcaaaatattaaatttggtttctttttgcatgttcgaaattagtaccttcccgcctcaggactgtaaccaatgacataatatgtcaacattgtccagaggaatgattcaagaaatgaaatcggtatctttaaaatagcagaaggaatagcatatgcccaagcaggataaaagtataactctttttgtttgcagaacaccgcaattctcgagactgtcaatgtgagttctggtagtccatcagcaagaagtttaaagagagagaagaacaaagaacccataagataattagcatgaagagaatctcttgtagacccagtccgtagataaacagtcattgcaatgaatccaatgaaaattaactgcagaaaaaggtaaatgggtttaatatgtatcggtaaaaataagtaaagctttttggcaaagtaaatacaacttacaagtccagatttgaatacgtaaacgaaagagttacgtttcatcagaagaaattctctccttgagcaagctttaagcatatcccagttactaagtgagtattttttataacataaaccatccttgcgagtctgggacttattaaacggctttgacagttcttcctttagcagcaacccaagatttgattctttaaacttattaatgaaggaatcaacagatatataactgtagggcttgtctctgtggcaccaatattgttcttggtcctttttcgacataatctgtagcagaagcatgtgatgattacaaatagatagggaaaatgatcaaatttacagccatacctcttggagaaagtcagcaacgccttttctctctggacacttaaatccaaactcttcaaagaatctgcagatatcagcgcgtggagcatggtaaattatctttccttcccccataagagagaaggaatcaacagatatataactgtagggcttgtctctgtggcaccaatattgttcttggtcctttttcgacataatctgtagcagaagcatgtgatgattacaaatagatagggaaaatgatcaaatttacagccatacctcttggagaaagtcagcaacgccttttctctctggacacttaaatccaaactcttcaaagaatttgcagatatcaacgcgtggagcatg

SEQ ID NO: 7556 - DNA, 1986 bp, Arabidopsis thaliana landsberg
ttcttgttctgtttttttttgtcttaatcatgcatggttctgtttttttttggcttaaaatcgaaactttttgatgtttcttcttcataatgcaaatgggttctctttatattgtggttttgtgaaattgtggggtttttctttttcaggtgaataccatcttgatttgatagtacgttacggatgtgtaccagtgattgtaccaagagtaacgggtgttcacatgttgcttgagagttttaaaccaatacatggagttttactttgtgaaggagaagatattgatccttctctttatgaatctgaaatatcttctctttctcctgaagagcttcaagagattagagaaacacatgctagtgatacagctattgataaagagaaagattctattgagttaggtcttgctaagctttgtcttgaacagaacattccttacttaggaatctgtagaggatcacaagtaagtctctttttgagtttatgtcttttggttagaacataaaatgttaatgatgatgataagttttgttttggcagattttgaatgttgcttgtggtgggactctttatctagatttagagaaagagctaacgaataagttaccagaagaacgaagaacgatgcatatcgattatgataattatgatggtcatagacatgttgtgaggattgttgagaacagtccacttcattcctggtttaaagattcattagatggtgaaaatatggagattttggttaatagttatcaccatcaaggtgtgaagagactggcacaaagatttgtgccaatggcttttgctgctgatgggttaatggaaggtttttacgatccggatgcgtataatcctgaagaagggaagttcataatgggtttacagtttcatccagagagaatgagacaacatgatcttgatgagtttgattatcctggttgtcctgctgcttatcaggtttgtgtgattttgaagattgttgttagttaagtaagttgtgaaaattgagttctaatgtgattttgatttaatttgtaggagtttgcaaaggcggtgattgcgtaccagaagaagctgaatagctcattgtctgttccaaagacattgaagcttgatagtgaaatggagaataaaagaaagatgcttgttaggagtttctcacttgctaagtatatgtatgttagaggagcaccagggaagaacccatcaaaagaatcagaacttgaagttggagccgagttccttgaggtaaatgatcactaaatctctcgacttaactttacaaaatcttgatcacatttgattgcaagaggcaaaatggtttagacacttgcttggcctttcgttatcttaagagttacatagtgcaagccagttttttttttttaatatgcatagcattcattttagatgatgtctatggttgttgtgatgggccaaagcgcctcggaccagaccagcccattttatgccggttctgatttcggcttgtgggaagcaaacatgcatgtgggacataacatgcatggtgggttttgattacttgaaaacggatatcgttaggcccggctcacgggattttggcccaccaggccacaacaacaaccttagtgatgtcctactattttgacccacaatgtttttatcaaagatgaattattattgtatcttttgctaactttgttcttttgtgtgtagtcgaacacggcgctaagcgcagagcaagagatgaggctgaaggagatgggagcgacggtgaggaacggaggatcatatatgaaaaagttgaaagtggacgaggataagcagaggatggcgaggaacatgatgaaaaagatgaacatagagcaactctcagagcttatggcgttttatcatttgatgggtaatatatgtggagaggttttggaccgaaagcttcaaggcaatgtcaatgaatgcttgagggacctgtgagtttcatgtgaatgaatcgcatgcagctct

SEQ ID NO: 7557 - DNA, 926 bp, Arabidopsis thaliana landsberg
tccaaggtaaaatatgactcctaacttttttggcccttgcaatagtatggatcaagatcttgtttaattcacattaaacggtttggtgttatgtacctcaagaaactcagctccaacttcaagttctgattctgtggattggttcttcaacgaatgagatctggtgtacatagacctcgcaagcgagaagctcctgacaagtatctttcttttgttctccatttctggattgagttccaatttcttaggaacagacaagaaactattcaccttcttttgacatgcaatcactgcttttgcaaattcctgtcaaaaccacataagactataaagtcattgatcaacacatgtagtttagaggtttgtggtagtgttgttcatctgtcaccatcaaggttcaaactcgcataatgcatgctaatgaaaagaaaaagaaaacatgaactcaataacaaacctgataagcaacaggacaaccagggaaatcaaattcatcgctaccattcttcctcattctctctggatgaaactgcacacccattaggaactttccctcttcaggattgtacatatcaggatcataaaaccctttaatcaatccatcaggagcaaaagccattggcacaaatctttgcgccaatctcttaaccccttggtggtgataactgttgaccaagatctccatcttttcttcatctaaagaatctttgaaccatttatgcaaagggctgttttttactatcttcacctcatgtctataaccatcatagtcatcataatctatatggtttcttttatgttcctcgggaaccttgatcgtgacctctttctccaagtcttgataaagacttccaccacaagcaacattcaaaacctacaagtttcaataacaccgttaatcaaccgtggtgtcctagtaatttaag

SEQ ID NO: 7558 - DNA, 1234 bp, Arabidopsis thaliana landsberg
caattttcttcttcttcttcttctaccgttttgtccggcgatcaaagctggttcaggagaaaccttaagtcttggtatcaaacgaaagaaagttttggaatttacctctgctgctgcaacttgcaacactttttttatatatattggatttttctatggctttgctcaaacgtaagcaaagcagatgaaatctagctacaatcgctgttgcccttgtatgaagtttggaatttaaggaattcaggagaatctaagaggtactttcttgtactttcctcttctgtctttttccaatagggaaaggtatcttatttgctccattagtctgtatctctcaagctttgtgtgtttttagttctccttaatcttggccttattagttgaacaagtaagcaaattataaaaggagtttgctttagggaactggtagaggatcctttacttcttacatgttatcttaatttatttctcaagaattccattgcagtgtttaggaaggctaattctttcttctctttttaagtactcctaagcatttaaagaaggcacaaagttagagaagattaggaaggagcattagcatttaaagccatggcgaagaaaacacaacgtcgtgctgctgctcgacaggagagggaacagttagggtgcatgtggggatttatgaatatgtttagtttccgccatggaccactgtctcacaagctgcttctcgaccaaaagcatggtaacaaccttctcaagtctctggcatctttggttttgcattaaccgtggaagacttcctttggctaatagttatgttaattgttcagctgctgtaaatcctaagaacaaggagcttaacaagtccaaattacgcgaaaaggatgctcaagaaacccatgtaagcttttaaacttattggaaacatccttaactcttttttctgttgccttaagagtctcctgtggattaattccttgaactgtttaaaggttggtgaagaacgcaatatcacgataacgattataaagccaagtgtgaagaagctcatagcagaagagttgtccattgacaaggaaatcaagaagcagagggagaatgctgaagcaggacagttgtcagactctgaacttgaaggaagaagaaggaaaaaccaaaggagaaaaaacaagactcgcaagaaaagctgcgataattttagccatatgaacttagttgacagtgaagagcctctagttcagcgcagaaa

SEQ ID NO: 7559 - DNA, 2143 bp, Arabidopsis thaliana landsberg
  unsure (1)..(2143): unsure at all n locations
cggaaaaagatttgttatcctctctacattaccgtctctacccctaaaaagactttcaaaagccaaacaaaattcacataagcaacaaatgcagaaaaaaaaaaaaaactcatcgccaaactcagaagcagccacaacaaacaagcttcttttattattcagctccttttttttcggttaaaagtcttttccagagtcttctcttctactaggttggtaggctggcggaatctaaaatgcccataacccaaatttacatgcccgacactcctccatacttgttagataaaaaaccaccgagagagatgataagctatcacttgacacttatttatttctccgagagaatcttctagatgaatctctcctctgtttctcctgctctttggatccatgggtgccctgcaacaaaacaaaattacaaaataccaaatttagttcactttatcattaaaccaacctactaaaaaaatggatcagtgtggataagataacataatctgttaaaaaaatagatgaaatttattgacattaaaaattcaacagagaaacaaatctgatggttttagaatcttacttaatgcttgttcggctgagaatcttctagaagcatctttgcatatcaatttccttaggaaatctttagccatagatgaaacccccggaatatcttcgtcggaaaacggagatttcctctgagtaccgcttcgaatatctcttcagctgtctcgccgtaaaacggtggagttccagcgagcatcgtgtacaaaacgacgccggcgctccatagatcgaccttctctccgtaagaatatcccattaaaacctccggcgccacgtaatacggcgttccgacgactccttcagtggtctctccctcacctaaccaaatccctgaaccgaaatcgcagatcttaaccgtatcgtttcgtagatctaccagaatgttctccggtttaatatccctgtgaacgacgccgtatcggtgacaatgcgaaagcgcctggagaatctgtttagcgaaggacgccgtctgagactcaaagaaggttccagaagagacgagacggtcgtagatcgaaacagagggatggacgagctccatgaagatggagagagtcgaatcagtgtcgatgagatcatggatttgaacgatgttagggtgataggacaagagagccatgagcttaggctcgttgtcgagacaggcacggtcaaggtcgtcggagagagaagccttgtcgatggttttgcaagcgaagaaatcaccggtggccggagcgtagacgcgagagacggtgccgaaacggccacggccgatctcctcgcagatctggtatttcttggtgttgttgtttccgagtgtttggctgcaagtcataatatcactttcttaatattttttttgttttgtgttggttcttgtgtgagttaagaagacctcttgagtcggctctacctttttttatagccaaaactcttgagaatattccttttgatgcctacatgtttttttttctactagtagtattttccttaacattatatatcttttcggtttttattttatttcatttcgttttaaataggatttttagatattatttcccaatcaaaatctatttttttgttttgttagaattttacttggagaaggtttgtaccccngaatgtcttttcttatcttattatatacaattttactttctaacaattctttattatctatttaagaatttgttttgttctttgaaatgataattactttgtggtagtctaaaattcacatttaagttattatcaaatgtactacaattacaatcctctctaaattacagaaaaacattttcaacattctcgaaagataaaatatgggatgatttacaatttaatatgtttccagaaaaagttcataaatttataatgcagaatctagtgaaaaaaaggaaggatatccaacccaaatttacgctaaaacatttccaaattgaatgtgagtatcaaacgatttcttggacgaaattgaaatctgaaaaagagataagaaaaagtgtgtggcatgtttggattggaattgggagataatccctgcaagtaagtaaaccagagatcccacgaaaacaaaccaataaagacactggat

SEQ ID NO: 7560 - DNA, 1194 bp, Arabidopsis thaliana landsberg
cgattttggcttcttagaaacgtcttgcttctgatgcaaaagcggtggtggtagaaaccgtaaaagaaatgatagtgaaaatagattttcctggttgtataaaagtggccgacttaggatgttcttccggggagaacacgttattggttatgtccgaaatcgtcaacacgatcataacatcataccaacaaaaaggcaaaaacttaccagagatcaattgttgtctgaacgatctcccagacaacgatttcaacactactttcaagttggtccctgccttccacaagttgctgaagatggatgttaaagggaaatgcttcatctcaggagtcccaggctcattctactcaagacttttccctagcaagtctctccattttgttcattcatctctttgtctccattggctttccaaagttcctgatgggcttgaagataacaagaagaatgtgtaccttagaagtccatgccctccaaatgtgtacaagagttacttgactcagttcaagaatgatttctctttgtttctgagactgcgtgcggatgagactgtgccaaatgcacgtatggctcttactttcgtgggcagaaaatctttggatcctttatctaaagattgtttccacaattggtcgttgatatctgattccctccttgacttggtttctgaggtacgcattatttgtttttgataatactctatcggctgatccagttcgcttcggtagaaacacattgtgataactattatttgttttctagtcttttagtagtaagaactagggcattgtgataacacgttgtgataattatatctcgattcgaatttaactaatgttgcaaacaaacagtatatggaccaatcatgtctttttacttatgattatattcacatatacattaaaagttttagtttagatatattttgaaatcataaatttgtgttagtactgcatgattaaattaaattgttgtaatatgattttggagaaaaatgttttgaatgcagggtattgtgaaggaatcggatgtagattcttttaacttgccattctacaatcctgacgagagtgaggtgagggaagttatcgaaagcgagggctcgttcaaaatcagcaattttgagacaatctttggtcttctcttttcatacaaaactggtcgtactgaagtgaaagatgatgatgataaatt

SEQ ID NO: 7561 - DNA, 727 bp, Arabidopsis thaliana landsberg
cgatctactttgaaaaccttccctacaaggtggattccaagattggttacattgattacgacaaacttgaggagaaagctatggattttaggcctaagttaattatctgtggaggcacttcttaccctagggaatgggattacgcgagattcagggctgtcgccgacaaggttggagcttttttgctctgtgatatggctcataacagtgccctcgttgctgctcaggaagccgcagacccgttcgagtactgtgacgttgtgacaacgtcaactcacaagagcttgagaggtccaagggctggtatgatcttttatagaaagggaccaaaaccagccaagaagggccaacccgagggtgaagtctacgatttcgacgcaaaaatcaactctgcggtattccctgcgcttcaaagtgtcctcacaataacaagattggtgctctagctgttgcgttgaagcaggttatggctcctagcttcaaggtttatgcaaaacatgtgaaagctaatgctgcttgccttgcaagctacctaatgggtaagggatatactcttgtaaccgatggaactgataaccaccttattctttgggatcttcgccctcttggattgaccggtaagtgaataatcactaacctttgagaccatattttatactgaactaatttcctgatgttaaattctgtttctgcttctgcttctgctaggtaacaaggtgagaaggtt

SEQ ID NO: 7562 - DNA, 768 bp, Arabidopsis thaliana landsberg
catccgtacacaggcctgtctctaatccatggtagactactactgcaaatgtcatgggttcattacaaaattcaaaagatttttaaaggaaaaagcctatttttatatttttaaaaaaaattactaaaaggttttagtttttattttattttgccaaaggcccaaaaatataatgagtcgggtcgtacatactatttagcgagagcgtaatggacgtaagcatgataatcctcccaacccagtaaatcgtctaatcaagtggatagacactcacatacgaaaccaactttcggcaataagatttgaggaagatagaagatatgacaaaagactccaactttggtttagcacaagagggacatactaaacaagctctaaagctctaaaaaaaatttaaacgtaatgttgcttaatctatcactgcacaagttgtaaaaacgttatttttaaaaaaaatctaatttaacattaaattcaaaaaaaaataatgatgagagtctatggataataacttaaagattctaaactcttgtttaaattcaaaaaacaaacacacattaataattaagatgatttgttcacattgagcttaattagtaactttcgatgtgatacagagacacgatcatctatgctcgctctagcaacctaacaacacttttggtgaataagtttaaattaagagcaaaatctacatgatgtgaagctagatttaatcaataagaaaaataacatacgaagaatccagtcaatagttctcagatctaa

SEQ ID NO: 7563 - DNA, 1623 bp, Arabidopsis thaliana landsberg
  unsure (1)..(1623): unsure at all n locations
ttattacactatgaacaaaaacattccgtcttttagagatctgtctcaaaacaatatgaataaaagctttactttttgagtttgaggttaaaggtaaataaatgctagtacttaacattcataatttcataccaaaaaaaagaagtaaataaatgcttttctcaatatctagagactttcacacatcaagtggcttcaaaaagaaatgccaatttaccaaaccaaaagttattcaaattttatctttttatgtatgcaaatagaaacttaaactcaagtcacaagaaaacctgaacaatgatgcaagccaaaaatatagtttcgttatttaaaaagctgttcatcaagagactgtaaatgaaatgatagcaaaaagcttttaaatcatttgttagaaactttgctacaacacatttatttcnnnnnnnnnnnnnnnnnnnnnntgagatcaatataccaaatttgcgttttcgaaactctctaattgacacaacttatcaacctcaaaagtttgatttaaggtttgcagattagcacaaaacaaggaagcaaagctcgagaattgagcaaatagagctcctcaacatttgtgtacaacccaactttaccagccaatgaatcaaacccactcaacaacccacccatctcctctacattctccaccggccgatgaaccctcccggcaatcactcgacacacaatcaacgccttccgatcaccaccaccaccatctcctatcacaattgactcaaacgccctctcactcgtcgacgcagtaaaaaccccaattccgttattcatctcccgtttcgccgagaacccatttcgtataatccgacaaacgcaacacttttccgacgaacacagactcgtcgacccgtttatccccaaagcgcaagccacagtggtgccgtgaaacctgagaagctcgtttccgtcggcgatacatctcggatgtttcttttgtaacttgcttgctctgatcttcactgtatctctgtattcttcgaatctcgctaaggttttttgcatgttgtgtactttcaaaatccgatcgattctccctccttgattctctgtctttaaccagcttgttctgcagattatctccactattctcctcgacgagtctccttccattagctcagtcactgaaaatttgggttaccattaagaaactctgtaacctaattgtgaaattcgaaattgaaatttacaaactttgggaacaactttgctaaaaagtaagaaactttgaaattcgaagatgaaagttatgaactttgctataaagtaaggaactttgaaattcaaagacgaagtttgggaaatttaccggcgtgtttggttagatgatgagcttctgcagcttcgagtttgctaaatttctcgccgcatttatggcaagaaacagaggaattgtctccgttaatggcggcttctctatcattctctcttctgctctggtgaaacctaatccttctctatctaaagaagaagcctttctcgaagtttggctacggcgtgaagaagagtaattgaccggcgtccctggtctaagattcccgacgaattctgttgctcaggcggcggtgatcttgactcgcaggtggagttgnaaag

SEQ ID NO: 7564 - DNA, 866 bp, Arabidopsis thaliana landsberg
caaaatgacaacgctacggataaatcgattcattccaccattaccattcaaatcaaaatggcaaaaaaaaaaaaaaaagaagtaaaatctagatatcaattatctattgatttcaattctcattatacgatacataaatttatcaacacaagaaaattcaatattttttcccaaaatgctaaatgttttagggcttgcaaataaccacaaagcaaggaagcaaagctttaggattaagcaaataaagctcttccacatttgtatacaaaccaactttaccagccaaagaatcaaacccactcatcaacccattcatctcctccacattctccaccggccgatgaactcttccggcgataaccctacacacaatcaacactttcctcaccgtccgatcaacatctccactctcatctccaccgttaaccaaaatcgactcgaacgctcttccactagtagacgccgtgaaaacaccaaccccattattcttctcccgtttcgacgagaacccgtttcgtataatccgacagacacaacatttctccgccgtgcaaacacttgttgacccgtttatacctaaaccacaagccacggtggttccgtggaacctaagtagctcgttaccgtctgcgagacatcttggatgcttcttctgaagtttgcttgctctgattttaactgtttctctgtattcctcgaatctagctaatgtcttctgcatgttgtgtacttttaaaactctatcgattcttccacattggttctctgactttaaccagcttgttctgcagattatctccactatttttcttgatgaatctccttctacaagcttcgtactgcaattagatgaaagtttattaatt

SEQ ID NO: 7565 - DNA, 953 bp, Arabidopsis thaliana landsberg
  unsure (1)..(953): unsure at all n locations
attattcttgatttatagggtaaatgaagacgaggaagagagagaatgtatgaagcctataatttcttcaaagaagttaagagaattggggtttgagtacaatatggtattgaagaaattgttgatcaaaccattgatgcttctatcaagattaagttccctaccnnnnnnnnnnnnnnnnnnnnnnnagaatgtgagatcaacaacgattgatgcttctatcaagattgcattctacaatcccaaacaaattgtttgtattcactatacacttttagtcttaatacgtctgaacaattaaaatgatagatcctactagctcagagtgtaagtaatagtacttagttttgtcgtcacttttgatgcaagctttgtatcaatgcgtatggaccattttgcttttcaaacaatatgctagctacgatgttctgttcttgttcgcttatcgttttaataagaaacaaaagcatgacagtagcatgtttgaggtaagccaaattttcaattttgaacttgatttcagtttttagagttcaccaattccactttcatttgttagagtccattaccatgcacaaagtttcttacacgatgaaggtgatagagcaaaaaagggcataaaaacttttgacaaaaaacaagggaattaaaaacctgatcattaatttttctctactttgagacttatttgcttgccagttattgtatggaatttggcatttaccaatattctccacccgtgaaacaaagcctctgtatctgacgctcttcaacctccattcctttatttcgtgcaacaacaccattccctacttcacatgaaccaaaattatcaattattacaccatgaacaaaaacattccgtcttttagagatctgtctcaaaacaatatgaataaaagctttactttttgagtttgaggttaaaggtaaataaatgctagtacttaaca

SEQ ID NO: 7566 - DNA, 1524 bp, Arabidopsis thaliana landsberg
ggctaagacaccaccaataacgatgcccttaaatctcttcatataaacacctttgacgacacacacacaatagtgctctacgacgcgaatgaaaattacggtctcgtgccatcatttcggaaatggatcgttcaagttgaattaactcaagccgtatcaaccgtttataatacttataaaagccatcgaccgttttgtaataaaattgaagaagtcaccacgacaatttttgatggactaccactcaagagatggaggcatctgttcaagagattttgagagagaagccgataaaaccaactctcaagagttaagagttgcacactggacgacggttgttggacgaggcaaacgtattgtggccatggctagtgattcagtctcatccatatgtcatcaccttctctgccctttatccattagctaatgcttaagctcactctttctttttgttgtcaaagtgtttaagctcactccagatttagtaacttcttagtttctttcttttaatcagctactcacaacctgtatgctccaatagtccaatggatcataaccatgtaatctttgccacttttaaattaacacatcaaaacgtttaaaacaaaagagaggttgaaataacaaaaaaaataaaaaagtgaaatacttccatcctctttctttttgttaaatcgaccttggttgtttgacaatgtgtatcttccttcttgagctgtcttctaggagattaatcaaaatcttttatcgtttcattgattctgaaagcttacttatttttgttgatacaatagacggatttttttgtttccatgttttattacttttttttttttttggacaaattttattactttttctatgagaccaaattattgattcaagtacctccaaacattttctatttttaatgaattttatatgtttagcaaaaacaaaatatataaaaaaattggtgttgtgtatcgtacaaaaaaataatagaaaacaaaagaggggcttgccaagttgactttgtctaccccatcaaaaaaagttgacttttgttttctttgttgactattggaccataaaaaccagtcttcatagcaaataagtcgcaagtcaaaacgcggggagaaggaaactagtgggcagtgtagcatttagctaagctaccaaccgcgttcattttaaatgcaatatataaaaagtttctcttgatttggttttagctacttgagataagaagagccaatggcgatgaagacatcacatgttcttctgctttgtttgatgtttgtgattggttttgtagaagctagaatatcaggtcagtttacttataaagaaaatcacagttactatccttgcagctattttttcacaaatatctttgttgtgaaatagatacgggtccggatataagtactccaccatcaggatcatgtggagcttcaattgcagaattcaattcatcacaaatactagccaagagagcaccaccatgtagacgtcctcgactccaaaactcagaagatgtga

SEQ ID NO: 7567 - DNA, 1783 bp, Arabidopsis thaliana landsberg
attctattgatggctctgattattccatagcaagacggaaccacatcgtaaaggtacaatttttttagatcagtcattatttagttggtctcatatataaccaaaaaccatgtattgtaagaacagtattacgaggattctggaaagccgacgcctagagttgaagtgatgaagttactcaagggaaatggatacttgtattcaaaagaatttgcaggagaatgtgagcctgtaatcattattgccaaaggacaaagttagttactccattttctattaacttgcaaagttcaatgtagtaatagtactaatatgtgaaattcttgatctgatgcagatgtacaaggaacatgcaagtacgggacacgggtcgattacattctggcatctccagagtcaccttacgaatttgttcctggctcgtactcagttgtttcttccaaaggtacttctgatcatcatatagtcaaagtcgatttagttataaccaaagagcgatctcgaggtagcttcaaacattcacgcaagaaagcaaagcagaagatctttcagataaaagctaatttgatgtcgaaagatacatggaaactaggaaatctgatgtcttcataaagtttggacactgattaagaaacaacacttgtgtatatgataacgtttattcccatcatattaagatgcaatacaacatttagtctacatattaatagctatgcttacaaagaactaaataaaagtttaagtaaacaatgatattcttgtacaatctacaacaaatcttgacaaataatttagaaacaactgaggtaaccgatcttaggcagagaccgaggctttcttggtctcctcttcagcacctacctcctcagcaattggcgcgtacccgattccacttcgtttgctcggaaacaaagcaaagatagcggctgaggcaacacccacggcaggaggcaaagccatgacaagtgtcttctgtgtttccctgaaccgaggataaaagcagctcgcggtattagcgtcaagcagcaccagtgtaccaaacacagccagcacgaaacccgcatgaacgaaatccgctatcctaagcttgtacttggataaatccacggatcctggctccgcgtaagtccaaagacctttcttggtgactataccgaactttgttgatccgtcaacgcctttgaaactatcggtaaagcatgagaagacgcaggaaaagctgcaaagggcgacaagaatgctcgacatgaccttattacctgtggagcattcactgtcgttagtgaggacagggttaagtagaaggtagataaagagtgttcccgttgggagaagctttataagactctcgaggcctgtgagggatttgtttgtgtttgccatgttttctgatgaagctggagagtttgttttgggtatgagcaaagaagtttcggacatgagcttgaaccttagagttagatgtataaactataaagtatgtttttggcttgatacgtgtgtcggtatttataaaacaattttgagatgataaatcattgatccggtccgagatgttggatttaacaccgtagaagaattggtaataacattgactaagtcaaactattttaaattttgtctatatgtctacacacgaagactcaataatttctaaaacggttgattataatttcttcgataagttattgagttttggaactaaatgcgaagaaatttctaaggcgtcgaataaagcacacgtttggtgatgaatcttgactgaatctaaagggtatagtcg

SEQ ID NO: 7568 - DNA, 1226 bp, Arabidopsis thaliana landsberg
  unsure (1)..(1226): unsure at all n locations
tatatcagagatatgttcataatctatgcgattatgctaatgattactaaataaaatttcaccctcgttttagcatggttgtgatctggttaccacatttccatgttaatactataacacgtgttagggttgggtggacgaccaacaaaattgcatgtcgatactatctcgagaaaccatatgaagtaatgtttggtaaaaaaattgtatttatggccaaaaagataaatgtaagcttaatgcagatagagcggggcacatacaaatgatgatcttctttttaaccaaacccgcaaaaaagggtaacaaaacatgtttatacatgatcatcagaactcaggatgggnngggtatgtatgaaaaatttctatccaagctgattcctgagaatacctgtgatgattccctttttcttctcaaaattggggattcaattgatggctatgatgagaaaaccgactgacacatacatgaggaagacggggtatagagcgagtgcttttcttcttgggttaaccgctgagctcataaaagggtaagcagcccatgagctccaggcaagggttacagacacaaccaccatcttcagtatcacattgtctttcaacatgcagatcacggctccaacgtctagcggaaataaacagtaacctagaaggctcaagctttggaagaagattatatgtccaccctgttcatgacacaacataatggttgtaagtatgtgatcaaacgaaaaacatctgcacgagatacaaggagagagcagtggtggtttaccaggagaagcacgtttagtgtaaggatcaccgccccggctgctaatagtgcaaatgccactgcaaatacctcggactggaatcaaagggaaaaggtatgagacaaagacgaattctgatagataatagatagcattctatgaaaagccactcaatatcggcaagataagctgtaattacatcagattcaaattcaatcctttaatcagacctacatgctaataactcagaatagtgcatccaaagtgctactttgtgagtcaaaatcctacatgatccactgtacaagaaagaagctttatataacctatagcctaagaatcaagtgagaagcaatgccacaagaacagtcctcatttttcttcatcatgttccttctataatctaaaaaatcacaattggagaacaatcttaatgcaaagaagtggaaatgctatcttggctccc

SEQ ID NO: 7569 - DNA, 1543 bp, Arabidopsis thaliana landsberg
taacaagacaatctattctcttcttcgttttttttgttattcattcaaacatgatgaaaatgatgatccttggtctttacgcaactttcatttgggcattataagaaagtattaagtactattacaattggtgtctttgagagaatagtcacatatcacctgaagaggtaaaaatgatctaaaaagagtaataaagagatgacgtagtacacaagcaagctctgtcttcttcttacattatcacttcgagagacacaccccacactctgccacactcgttcccccaaaaaattacttactactaccaaacaaaatttaacaacttgaaaagacaaaaaattaataaataattgatggttgtgtggcacagaagctataatctctgaaattaaatgcaacagagagaataagatttcatgcagttttctttaataagttcctttgcctaattagatatcacatgaaacattgttttttttttgttcactaaattttctttggaacttgaatttgtcatatttttttgtttggccaaataatgtcatggacttttaaacaaatccacagcttgactttgtaaacacccaaattcgaatctcctttttgtaagatttgatcgtctttttgttaaaggattatatggtagattcttttagcaagagcttctcgatattgatgattggtcactcacttgcatgaccaaattaaaacaacgattacgaaaagcaaatcagattagagttttaattggatgatcatggaaatgcttattgtgtgtattttcatacaaactagtttattggtaaatccctataattataagaataatagtatctaatggctatttctgtaaattttcgctacaaattactcaagattagtgatatataccaaaaacgagaacacatagtagtagaaaaccaaaaaatatgaagtactgcacagattaaagctacgagcatcaaggtcttgatattatatatacgtttccaaaaaagaaccgtaagtttcatacacaaagcaaaaccatatagaagagtaaaatccacaggggagtttaacaaaaaagcgtcaaagaacatattatacatatgatctcattagaactcagaatagttcgcggctggagaattctctatctactctgtaccaaatgacttcccaaactgaatcaaagaacctatctctgatttcccatttttccggatagaatcaattaatggcaatgattaagaagccaacagagacatacatgaggaagaccgggtagagtgcgagagcttttcttctcgggttcactgcggcgctcatgaaaggataagcagcccaagagctccaggcaagagtcacagacacaacgaccatcttcagtatcacattgtctttcaacatgcagatcactgctccaacgtctagcggaaatagacagtagcctagaaggcttaggctttggaaaaagattatatgtcctccctgaaatttgcattgttcacgatataatgggatgtttaaagtcaaaacttataacagaaaagtgtaaagt

SEQ ID NO: 7570 - DNA, 575 bp, Arabidopsis thaliana landsberg
  unsure (1)..(575): unsure at all n locations
taagattaattggggaggttctaccacttctctcctcctccttcaagctctcttccacatagattgataacgaaaactcaagctttgaagcatgaggagatcgatttcttcaaaagcgaagtcgtttcttcatcggaatcttctgtattcaggtaattccggaacttctccgtcgtcgtcgtttagcatttgcggtttctgtttctcgagacgagcttattctaatggcagtgattatcgagaaatgttgagaaatgggattcggtttatgaaactagacgattctcttgatctcttctttcacatggttcaatgtcgtcctcttccttcaattgctgatttcagtagattactaagtgctatttccaannnnnnnnnnnnnnnnnnnnnnnnnnnnnnnnnnnnnnngatgcaaatgttggggattccacataatctctgtacttgcaatatcttattgaattggttctgtagatgttctcagctttctcttgcgttatcgcttcttgggaagattgattaaactggtcatgagcctagcattgtcacgtttggctcgttgcttaacggtttct

SEQ ID NO: 7571 - DNA, 2042 bp, Arabidopsis thaliana landsberg
ccttttgtttccagattatagtcttctcgattcaacaatagatcaaagattctgccagacattgggactttgctttaagaaaaagaaaataatgaaaggccatatcatatggagtaccttgattcttcagcaaaaatttctcaggacgaagcagagaatgtcaagaaaacccctgatctcgcttgatcgtgttcctgtttcttcaatatgtggcagtaattaagctgtctcataacaaaacaaaaaagatggataattttggtgttaatcattgcactttcattcgataaaaatgcataagggagagtagtgatgagaaccaaacctccatacggaataggcttgttggtaagacgattccagcaccaactgaagttctgaatgtctccaagaactttggagcagtgaagtttctaaactcattctctgataacttcgccatattccctgcacaggcaaacacatgcccgtggattcctctctctcttaaccatctcactggcaaatcaaatgagagatccgcaaatgcagtcactgccgcatctcctccaacaaaatcccgttcactatcacctttcctctttggctcactgggaccaactcctctggtcttgaatccccacagcgcagatggcccactcaaggagcacacaggcgaagaattgccacccaagaagaatctctctggtatagatgaaggacggttctggtatccgcttccccacggaaaggagacacccccagacacaccaaaatttatagcagcattgtaaaatccaaacggaacagcataccgaagatcaacttcctgaccaaacaaatgaaaatagatgctaaaactatcagatgtcttagattcttgttattccctctcacagtgagcataaatttcagacatactagggaagatatgtatgaaaacaagggactgaaaccacagaatttgctgtgtaagaacttacaaccttccaaacttaaaataaaggtcatctaaatgttggcaacaagaaagaagaggagaccaacctgcttcaggaagcgtaagcttcggctatcaggagcaagaccaccaatttgagatgtagagatgaaagcatatccattagttggcctcaagcttgagtttctctgatcaaacctaaaagtatacttcaacgcagaaagcagactgtgtcccagttgtctccttattgatactgcagcagcttgtgatggatcgatcagattacgccacgcaatcgtgtagatcagctcgtgatacttgcttgagaaaagaccaagagaaagaccgagggatcgttctttatacgatgaaaacttaagccagtcttgagtcgaaaggaaaagacgggaagtaaaaggagtagacaatcctctgaaccttggcaaatacatccccaaaccaacctcagcagagttgtcacagccataaactatagacccgtcccaaatatctccataaccaaaaatgtttttatacttcaaagatgcttcaacgcttgatgatctagcctacaagagcatcacagaatagaagaacacaaatagcttcatgaagatgacaaattcaactctatagaaaccaatacctaataaaccaacacaatttaaacatagcagtgaatttttactgttaaattaatacctctgctctagtataggcaccaatttggccggtgagagggtttttgctctcgacgacttcgattaccacattggtagtaccaggaagctcaggaggaccagaatcaagcgtaatgttgacggaatcaaagatatctaacgcacggagattcgaattggcaaccctagatgcttcgagaagctcttgcaacgtggtcgcctctctcacagcatcgcacttccgcttcaatgatatggtccttagtcttctcgtttccactgataatcacgtcgtgaacacgcaccggcacaggagcagctcgcatccgacggaatagcgattccgccttgattctgtctacactggatacctttcgcgcgtttgagatttcgactcggtgtcatcgtcttctccatcg

SEQ ID NO: 7572 - DNA, 595 bp, Arabidopsis thaliana landsberg
  unsure (1)..(595): unsure at all n locations
tcataatccatcaaaataatgaggagtctacatcctcatcaacatttggactctcagtcttttagttgtggtagctggggaactcattaccgatgagctaccctctcggccctgagtgtctgttgatcnnnnnnnnnnnnnnnnnnnnnnnnnnngatctcattgtgggttttatctgcatctccccgccagttgatgataatgagcagcttcttgaccaactgcatatcttcagagaaatgtccacatggattctttgcctattctttttaattggcctacttatattggttttttggggggttttttgtttgtttttgttttttcaagacaggatttctctctgtagccctggctgtcctggaactcactctgtagaccatactggcctcaaactcagaaatccgcctgcctctgcttcccaagtgctggcatgaaagatgtgtgccatcactgcccggcccctacttttactgttaaattgcaataactctttatatatgtatagtctagtcagatacataatttacaaattttttacactgtgtcttcactttcttctcatttatatatcctaagatatagatattttcat

SEQ ID NO: 7573 - DNA, 585 bp, Arabidopsis thaliana landsberg
tccctccttttccatacctctagtggttggtgggctagaaaagaggttaaagtatttgagaacccttattaaaagtaggttttgaagaagtgaatcctacacaactcctccagtgagaccacacttcctaatccttctgaaatattgctagcaaatggttaccaagaacccaaacaactgagcctggagggaaggattctttttttttccgaaacagggtttctctgtgtatagtgtatagtcctggctgacctggaactcactctctagaccaggctggcctcgaactcagaaattcgcctgcctctgcctctcgagggctgggattaaaggcgtgtgccaccacgcccagatgagggagggattcttattcaagctatcatgtttgactctgttgccctcttagacctgtgaccatatcataatgcaaaatgcattcagatctgaagtggaaacttaagggttctttggagagtcagctgtgttggatggtgttttgctggggcaaacatgtgaaggagtgttttcctgaagtggacataggtaagagactaaggcagactcctgaggaacatttactgatgt

SEQ ID NO: 7574 - DNA, 2227 bp, Arabidopsis thaliana landsberg
caggtcgactctagaggatccccctattgtatacattccccttcacaaaatatatataattttgtgtttcttctgaaaagctttgtttctcactgttagttggagttggatttgatctcatctatgtatgtttataacctattttcagccaagaaatttcattgtgtaggcaaccaaaaaagatgacaagaaatcttcgccagagtttttattactcactttattgtcaattcataagagaaacatatattgataaatccgtttgtggattagaccgctttttatttactatttaaaaattgtcaattactacatataaataaatttggtatgcggtgggttgttgtccgtggaacggtgactgaaccgaacaatgcggtgcggttcaaatagtaacgaatttttttgcatatatatgtttttgttattatttgaactgcactgcactttatccgcagttgaacctaatggaacctaaactggtttagtttgctaatattatttttattttatttttgaataacttttttttcttttcttttttgtcatctgatcatttttcttttttgctttcgttatggataagctgtaacgcggtttttgttttgaacattaataataattaattctattcttcgaaaaaagaaaaatatataatagtgtgtcgttttccggtggcgacgagagggagaaccggagaagagatctctcgttcgtttttttcccggtaaatccggcgagaaaaagttcacattgaatctacgagaaaatttccttccatttcactccacgagttttcacctctcttgttcaatctctcaacgtctctccctcgtttctcgttttcgctttttccccttttcctcttctattttaccggaatccgagaatttttgatcagatctagtttcagaaataggttagttccaacaatgttgacggaacgaggaaggcgaatttctggtttcaatgggagtttcgaatttagcaatagaaaattccgtggttatggattcgtagatcgatctcaaggtttccatgaaaggagtctttcaagatcatgttctgtttcgaaaatccttcgtatcacgccaccaacctcgtctccaccgtcttcggcttctacatgcgctggttatatcgaacaccgggtctccaagttcgatactctcgccggcattgccattaagtatggcgttgaggtatgtattataatatatgagtgtatatgctttggatgctggattagttttttttccttgtgttcttagaaagtgctatttcaggttgcagatatcacgaagctgaatgggcttgtaactgatcttcagatgtttgctcttgagtctctccgaataccattacctggaagacatcctccttccccatgcttatctaatggctctctaaatcatgggtacttttaagcctctttatcctctcttcttagatgacaaggctgtagtctgttactttgatttttatcttcagtgatggatttattcatatgttacttgagttgtgctactgtgcatttcccaagttcattcaaagaaacatagaccaggttatagaaagaagtttacataagatggaaaatgcttagtgagagttgtttatgctggaaaatgcttaagggagacatgatagaaaaccaagtgggtacaactggtccttgtaaaagagcagttttgacgtttcaaattctggtttcctgcacagccaaaactcgaaagtttctatgcgcaatagtttgtgcataatgggctatgaaccttaagtttcttggttagtgcatacaacctacgtcctagaatttttttcacattgatataagaatgaggacgtaggtaaggggacgagtaaagatgtcgagaattgagacagttaagtagagccttgaatgatcatgatggtagtatactgatttgcattaaagggcatccacatatcaaagtgatcctatccccatgactgacatatgaaatctttttgcagagaggattggtccgagcaagcttcatcctcagctagcaatggcaaccaccaggacgtatttgactccttccagtctttgaggtcgaaccattcacaaaagaagatctctccagccatgaactccttgcaaggttattatggactgaaaccaagaaacagacaaacttttgcaggttttgggatggcagtctacaagaacaaaacttgtcagctccaatacaaatgatca

SEQ ID NO: 7575 - DNA, 1303 bp, Arabidopsis thaliana landsberg
tattcccttcttgagtttactctagagcttctagaatccatctaggcattggttttggtatttgtcttatgccgtgtattctttctttttttctacattgtttttaattaaagaatcttttttggtttgcagtgatcttggacgttggaactgaggaaagaaacttgcaatgtatacaaggacaataagaaggaaccagagatggggttttgtattgcagcaagacaaatgcttagttaggccagtgattcgtgaccacaccggttcccaatcttatagatccaccacaagtatactaacagatcatttgagaagaaaccatcattctcatggtgctattgcctctagagattatttaagttattcttggaatagccaattgcgtcggtttagttctgaaggtgatggaaacaatgctagtgaggacagccgtttccctctgaataaagacaagatgggaaaagagaagagcacggtcggtgttgagcattttgattctcacgctcaacttggactacaagaccaaatagaatggctcaacaatgagaagcgtgcaagtgaaagcagaaaggagtcaccttttcttaataaacgagaaagattgaagaatgagttcttgcggagaattcaaccttgggaaactatacagctctcttgggagtctttcccttactacgtccagtaataaccaaagactgttcccttctgttatcgtgttactttcttctagtcatttccattttttgctaatatgttctgatttgctccagcgaacacacaaaagatactctgatggaatgtgttagctcacatattaagcaaaaaagtatgacttccaaatatggtgctcgtttagattcttcaagtgggagaatattgctccagagtgttccaggttttttgttgactagaatatgcattgcattgttttaatgtcgttgtttttttatatcaaactatataagtggtgaggaaatagagtctaataatgatctgattatacaggcactgagctctaccgagagaggttggtgcgagcacttgctcgagatacacaagttcccctgttggttcttgacagcagcgttcttgcaccttacgtgagattttgatgtttatttgctatgacatgctaccatttttctttctgtttcatgaatgttagagtgatatttgttgattctgatcaggattttgctgatgattacaatgaagagtctgaatcagatcacgacattgcagaatcagaccagtgcacgtaacagtcagaagctgaagaagaaaccgatggggacaatgatga

SEQ ID NO: 7576 - DNA, 1268 bp, Arabidopsis thaliana landsberg
caaatcagtataaggcagttctttgctttccgtattcaagaaagaaaaagttagtcgcatactcttttaaattctagacggctctttcaactatttctggtagacgcttataccatgattgagagtaacaggcttggttacataaagtgtaatcaggcaagtttgcgggcagaaaattacaacaacgtcaaaaaggtagcccaaggtgggaatgttgatatgaataaacaaggaagggaaatgtacttgccatcttcctttactggtggtcctagttacatgagacaaaactacttagatgaaatggctatatctaagcattttggatttcctgatctgttcatcactttcacatgtaatccaaagtggcctgagattcaaaggtatgttgatgcccgtaatttaaagtctgaagatcgtccagaagttatatgcagaattttcaagatgaaacttgattcattgatgacagatttgaccaaaagacacctgttgggaaagacttctacatgtaagttttattacaattaacttaatgtttagtttgattatttttcatatgtttaacttaacaatcagcttattcctgcagcaatgtataccatagaatttcagaaaagagggttgccacatgctcatattctactcttcatggatcccagttataaattccccactacagaagatattgataaaattatatcagctgaaatccctgacaaagaagaggaaccagaactatatcaaaatgtcaaggacatgatgattcatggaccatgtggtgctgtgcacctaaattctccgtgtatggttaatagaaaatgctctaaatactttccgaagccataccgtgaggcaactactattgataaagaagggtttccagtttacagaagaagaacatcatcaagatacattgagaagaacggatttaaatgtgataacagatatgttattccatacaacaagcaccttttgttacgctacagagcacacattaacgtggagtggtgtaaccagtcaggttccggaaggtatttgtttaaatatgttcacaaaggacctgacaaaataactgttgctgttgaaccacctcagcaagacagagtgggtaatgattcagtacatgttgaggatactataaaccaagaacagccaaaaaatgaagtccaagactatttcgattgcaggtaaattttgtaatactatatttagaatcgatgccactgtgttgcagaatcgaaatagttgtttatcgatcaatattt

SEQ ID NO: 7577 - DNA, 2965 bp, Arabidopsis thaliana landsberg
cacgtaggcagaggaaataaagtagaaactatcgacaacataataattgagtgagtacaaaaaccacgtaataattaggtgtacactgtagtctgtagatcgattgtacaaaatgaaaaaactatatgatttaaggaactagatatacatatgccacgactcaagaacagttgctttatgtgaagactatcaattacattatcggctaaatttggcttcatgtgttgaatagatggattgtgtgctcaggtagttgtgtcagttaattataacagtaaaccttcactgcttcacatatataaaatttgggttaaaaaaactttaacattttatttttttaattgacaacaaacaaattctgttacggttacatataatagtgcttcagttaaactccttttttaggcaactctaattcctttatacccttaatccattattattctatcgaacttatctttttaaaagcttccgcgttacgccatcacttctccaccatttaaatacctaaaccactttctttcaaatttcttattccataaaaagtaaattcacaacaaaaccaaaaaaaaaaaaaagagaagaagaattagcttacgtgttcatcacatctgcattacgcgcaaacgaaacagattcaaattctccggcgaagttttcttattcatcaatcatgccagagatcgagattgccgccggcagcggcgacaacaacgacgccttattcggtaaatatgagctcggaaagcttctcggatgcggcgcattcgccaaagtcttccacgcacgtgatcgtcgtaccggccaaagcgtcgccgtgaaaatcctcaacaagaaaaaactcctcacaaatccagctctagccaacaacatcaaacgcgagatctcaatcatgagaagattatctcatccaaacatcgtcaagctccacgaagtaatggcgacaaaatcaaagatcttcttcgcaatggagtttgttaaaggaggagaactattcaacaaaatctcaaaacatggacgtcttagcgaagatgtaagccggagatatttccagcaactgatctccgccgttggttattgccacgctcgcggtgtttaccaccgcgatctcaaacccgagaatctattaatagacgaaaacggaaacttaaaagtttccgatttcggtctaagcgcgttaacggatcagatccgacccgatgggttgttacataccttgtgtggtactccggcgtacgttgcgccggagattctatctaaaaaaggatatgaaggtgctaaagttgatgtatggtcttgtggaatcgtcttgttcgttctcgtcgccggttatttaccgtttaacgatccgaatgtgatgaatatgtataagaagatttataaaggagagtatcgttttcctcgttggatgtctccagatctgaaacgattcgtttctcgtcttttagatattaatcctgagactagaatcaccattgatgagattttgaaagatccttggttcgttagaggaggttttaaacagatcaagttccacgatgacgagatcgaagatcagaaagtggaatcgtcactggaagctgtgaagagtttaaacgcgtttgatttgatttcttactcgtcgggattggatttgtcgggattgtttgctggttgtagtaattcgagtggtgaatcggagaggtttttatcggaaaagtcgccggagatgttggcggaggaagtggaggggtttgcgagagaggagaatctgaggatgaagaagaagaaggaggaagagtatgggtttgagatggagggacaaaatgggaaatttggtatcgggatttgtatttcgcggttgaatgatttgcttgtggtggtggaggcacggcggagaggtggtgatggtgattgttataaggagatgtggaatggtaaactcagggttcaacttattcgcgtttgcgatcagacgtcgtcaacaaacgcggctatttaaaagaacgctatgaagttttctaccgtgctttcaattttaaaacgccaatcgcgtttcgttggttggatttggtttctactacttttgtttcagaattaaaatcagagaaaaaataataaaaattaatgtatgtatttaaatactgcaccaaattgtaggtatctattatgtgctttttgatcaatgtgttactatgtacagcaacaagtctaaaattgcatttgtagatacttcactcttttgtataatgtagaaaatgttcttctatttatagtttggattttccaattttacacatttgtacataactactttttaaaatcaaccatgcaaattgtattaagttaaagtgcatgataaccaaatcagattaataaccaatgaattgaaaataaaaagtagagaaattactaaaataaaataatctctaaatcgcataaactcatctaaactctcaaaaatccatacattacacatttttttttcttcaaaaaggctttcaattctatacatttttctgcttatcagatatagcttcttcactttaatatttatgtatagaattgaaagcgtttttgaaagaaaaactttgtgtaatgtattattgaacaaatgaaatgattgaaatgggagttccacatccagtgaagaaaaagcattaaaaagtatgtatagaatcagggaacttcaaaaattgaaatctgcagctttataaaaagaaaagctattattgtctacttgattggatattacaactcaaaacgagtgaaggttaaggaatcattatcattattaaagcatcatcataagcaccagccttttgttattcttctcatcatttgtttggccaatttaaaattttaattagtatcatctcaccatagtttctgcccaccttttggttttaggtgcaaatgaaaaaactctggcaaattaggttgtttggtgtgaattaggaaagtagaatgcttattgaatattctt

SEQ ID NO: 7578 - DNA, 1405 bp, Arabidopsis thaliana landsberg
  unsure (1)..(1405): unsure at all n locations
catgactgttaaggagactcttgatttctctgctatgtttctttgagttggtacccgttacggtataatcttaggctttttgtcaaactaaatattgattttgtttttgttggtcgattgagtaatcttacttgttattgatgcagatcttttaaatgagttggcaagaagagaaaaggacgctgggatttttccagaagctgatgttgatttgttcatgaaggcctctgctgctcaaggcgtcaagagtagtcttatcactgattatactctcaaagtgagtccctctcaaccttaaatacataattgtcttgattaaacgattatatagtgttcatatgttgagatagatgttattgttctatgaaacagattctagggcttgacatttgcaaggacactatagttggagatgacatgatgagaggtatttcaggaggtcagaagaagcgtgtgacaactggtgagatgatcgttggacctactaagactctgttcatggatgagatatccaccggacttgacagctccacgactttccaaatcgtgaaatgcttgcaacagattgttcacctcacagaagccacagttcttatatctcttctccagcctgctcctgagacgtttgatctattcgatgatataatcttattgtcggagggacagattgtgtaccagggacctagagaccatattctagagttctttgagagctttgggttcaagtgccctgaaagaaaaggaacagctgatttcttgcaagaggtaaatatatatattagaccgttagacctaacttggtattaatatttgacccgaaagtgacttacaaattacatttacgtgtggaacaggttacctcaaagaaagatcaagaacagtattgggttgatccaaacagaccctatagatacattccagtgnnnnnnnnnnnnnnnnnnnnnnagaaattccatgttggatctaaactatctaacgagctatcagtaccgtacgacaagtctaaaagccacaaagcagctctaatgtttgacaaatactcaatcaagaaaacagagcttctgaaaagctgttgggacaaagagtggatgctcatgaagcgaaactccttcttctatgtcttcaaaaccgtccaaatcatcatcattgccgcaatcacctcaacactttaccttagaactgaaatgcacacaaggaatgagattgacgccaacatctacgtcggatcactgctattcgcaatgattgtcaacatgtttaacggtcttgcagagatggccatgacgatacagagacttcccgtgttctacaagcaaagggatcttttgtttcacccaccatggacatacacgcttcccactttcttgctagggattccaatctccatcttcgagtctacagcatg

SEQ ID NO: 7579 - DNA, 2403 bp, Arabidopsis thaliana landsberg
  unsure (1)..(2403): unsure at all n locations
caaccaggcttaaaatcttgtcaatagggataaacctggagacagtttttccattgcaaagcagaagcatgcacaaaaaagttggtacttgtatgattggtaaaacttaaaagcatagatcataatggttcatgataattacaacaaattcaaccattaccacctatcttagagaccactaatacggagtagttcaaagcattaagccatcatggagtgcagacaacagaatactaactaaatggataaagcataccttaaatattgagtttcaagttggatcccgaaggttggcaagattatcacagattctgaagaaatcaaagaaaagctagaattagttaaaacgtgaagctgatatcatttggtaagcctgtaaagcgtgtatcaggatgaaccaggatctcacctttcttgacgaacttgcgactatgtagcataaccaagaaaccacttaaaaggcagccccaagaaagagttctagctggattgtcctgtttcatgtgaattatccctttcaacttaagtgaagaagaaacaaatggaacaacaacaaaacatgcttgtaaagtaacacaaaaaaagaaaagtgcttttatacaaaccttgtcatgtattaacataatgctcacaacagaatgaaaatatcaaactatactccatcaccaatcctaagaaacaaaatggtatgcctttctcatgatatgtactagcaacacttgttctaagcaatgcatcagaatcactcaaatgtcaagcagattcacatcaaaataacaaacggcaacaaccaaattttctctaagagcataattacctttccaagcaaaaagtacatagaactcgccagaaacacaaggaagaaaccaagcccccaacgacgggcataaccagttccgctgcttccgttgataatcacatggtgaatatcaatggcttctctagttgacttacttccactttcgtgtatgtaagtgtatctcttattcgaaacagacaagctcaccatttcaaagctagtttagttgaaaaacagtcaaatgtatcaccgtcgttttactcccaactcatatacgaacctgcccaaggttagctttctcaatacccaagtaacaattttcaaactttgagtctcagtcaaatcggatagcaacaaaacttctctgcggctttccgtcgaacaccatgcgtgcgttataataacccctcttgaaatctcataaatctctctaactatctccacacaacttcctcgaaaacacagtagcaatctatcaaaaaggacgaagcaaggattcacccaacgaacgaaagccacaattcttcgaattgatcaaatctgaaaccggcttctcttaccggtaaagagataaaagacggctctatggtggaggagacaacaaaaagccaaaagagagaaaataatacaaactgtgtggcgtactaaataaaacaccctggcgtttttgttttattcatattaacatcatgccgttttcatctcgacaatataaaaacctagcttatttttaaggaaaggtcaaatcttaattagttttgatttctctctccagtacttctcgattcgccggcgatccgaatctcattcttctgcttgtcggaaaaaaaaacccgtaatttaaagtgtgaagctttcggtttgaatcatgcgttgcaagagatgcaatggaagcaactttgaacgcgacgaagacacggggaattcgtattgcggtggatgtgggacattacgagagtatgataattatgaggcacaacttggcggcataagaggacctcaaggtacatatatacgagtaggcaccattggtagaggctctgttcttgattataaagacaagaagatctatgaagccaacaatttaattgaggagacaacagaaagattgaatcttggtaataaaactgaagtgattaagagtatgattagtaagcttactgatggggaatttggacaaggtgagtggttccctattttgattggagcttgttgttatgctgtggtaagagaagaagggaaaggtgttttgtctatggaagaggttgcttatgaagttggatgtgatttgcatcagttagggcctatgattaagcgtgttgtggatcatctagatttggaattgcgagagtttgatcttgtgggtttgtttaccaagacggttactaattcaccgagattgactgatgttgatagggataagaaggagaagataataaagcaagggactttcctgatgaattgtgcgttgaaatggtttttgtcgacggggaggagaccaatgcctttggttgtgtctgttttggcgtttgtaattcaaatgaatggtgtgaaggtaaagattgatgatttggcgaaagatgctagtgtttcgttgnctactt

SEQ ID NO: 7580 - DNA, 1637 bp, Arabidopsis thaliana landsberg
gcaacgaccaagatggtgttgctgatgccatctaccgctacgcattctgagactccaccaccatatttaagtacaagatacaccaaattaaatttttgaggttaagtaggcattattcttcttctttgtcttacagataaaagacaaacattggtcattcttgtctcattcacccaccttttgaaggaaaatgattgattgcagagtgcgtctcttgttgttttgttcatgttcggttaatctttcattcgtttgcctttgcacctttgcatcttacaacataaaaaatgttccggatctcttgtgaacaaatccatctcatttggttacctgcagtaacatcagttaacgttaaccaatcaattggtgaataagttaccgatgaacaaaagctgttgtaagtttgaaaccattccgaacaatttttatttaaaaagtgatgtaggattcgaaaataattggagtaaagttacacgaatcttgtggctatataaacttcgtagaaaaatgtagtacaaatacttttggaacacagcaattacatatatagaactatgaaatggtcagactttttgcagtaagtggtgcaaagtgccaagaatgcaatcttaaatcttttcctagcttcatcgcttcatcctctgtaaaggcctgatgggtctgcgttttgcacaatccacgggtgttcaagaagcttgtgcaaggccaaacgttgcgtagactccttaaccaacatctgtttgatcagaaagtgtgaaaatcagaattcactcttcaaatgcacaaacacttagagagatttacgaggaatgcgagtagaaacctggctaatcaggtcctttgcagatgatgacacaatgggtttgggagggaacttgagatccacttgaacaatcctgtatcatttgtcgaacaaaacccttctttaatgtacattccactgaccaaacatcatatactaatcccattctacgcttaatgaacatgttaccttttgtatgtctctgaatgctccctggcctcaaaaggaggaacaccataaagaaattcgtagcagagaattcctagactccatatatcgacactcgcatcatgttcaacgctttccactgtgaatccaaaagcagaaaagtcaattagctggttgccgaagaaagtaatttagaatcacacaagagagagagagctttctcttacccatctcaggtggaaggtaatccaaagtgccacacatagtccttctacggttgaatgtgtgtactgaccatccaaaatctgcaatcttgagctcaccctgaaaacatatatccatgaatacataaacacataagctaactgcaatcacatggcgttgatggagaaagataaccagattcaatttgttacctgagcaccaatcaacagattttcaggttttatatctctgtgaattacatgctttccatggcaatagatgagggctctagccaatgacgcaacatactgccacaataaacgtaagggtatgactacacagattcacattaacatgctagaataagttcaattatcactaggactttacagtgctgctcgacgttcgctgaagtacttgcacttctgaagctcttttataaagctcaccccctacagcatac

SEQ ID NO: 7581 - DNA, 2402 bp, Arabidopsis thaliana landsberg
accgtctacaaacagatagccatggatcaccctggcgctaatgttggtaagctctttttctctctcgtcaaatcaaccagtaaccccttattaattttgatgctttgttataggcatgcttgcatcaacttgcatgataatatgatcttgatcatatcgcagtcagttcatgcaaaaagtttagcttagcttcataagttttacacgttcaaaagcattagtgcatgcagggtatagtaacaaaggtctagaatatgatttgatattttgtttttaaatcatcttataatctaattcaggactacaaagaaatgatataaactgaaaatgtatacataatgtgcaggagtgttctattgtggagcaccggtattgacgaaggagttaaggcaattagctttggaattcacacacaagaccagtactagattctctttccacaaagagaacttctaaagacattgaagcttatagctttatacccacaaaaatgctgatagacttctgatggtcaacaaattaatgaaatttgtgggagtaagtatgttacatttgtgttttgaaaattaaattttggtgttatttttgtttcttgaataaaacgtcggttgtgatgactatgtgaaatgtgtagtttaagcgcttttttgtttgaattgcatttatccaatattcaaaaccatgtttaatatcctttatattttcttgctcaacaagactcattttgtcattttatttcaatttcctttttattttaaactatgcacaagaatgggtagaaaagtatagacatgtttttggacacagttaagcagcacaacaaataacgttgattacattgaacattttggccaattatcaattagggtctgcagaagtgcaagtttgtacagaccgtcctcctagtatataagaagagtttatgagaatctcttcagcgaatttaggagaatctgcatgtcttccacgaaaatccttctcggaatatgctatacagagatctactgcaaaagttccaaacggaaagctaaccgtcaaatttgatttctgcatccaaataaagatatgaagaagcataaattctaataaactcgtgaggtcgaaagttgagatgtagtacatttggtacatgcatgtattcggctctcaattcattaacaatgacaccataaacagtttcttagtgacaacaccagaacgagttaaagaatgaaaaatgaatagttttccaaaaactgacctagttttcaaattggtctacattggaacagcttcgatgagcctagagaagtagaactgtgtggtagtgagtcctctcttgctgattttccagccgactttacccaacgctctttccacatccgcctccgagtgtagatacgcccttgtagcttttgatggccctgggaaaagctctccaattctctttaagatatcatagtaaaaagtctttggagcaaaactcagaatcactctcttctctgctaaagaagcaagatgtgcgatcattccgtctgctttgttctgcgggtaatgtatcaacacgtcgagacatacaactgtatcatacttcccagttaggctctccaaatcattcacctcaaattttggtaaattctctgatggtagttgtgcctttgcctatgcatattcaagacaagcacaaagattcagattctaataatgcagttccttaacaaactctatgtcaaaactcaaaacatcttatcattgagcatctagattctgcatttcgatatgaaaaatttcttgatcataattgaccaataatcataattgaatcgaagaagctcaccttcatctcagcttcagcaaccatagcagcagaaatatcggaagcagagacgattgctccttccttagcaagtggaatcgagagcaaaccggttccacaaccggcgtcgcaaaccgtgacaccggccaaggatctatcttcagtcagcataagcatcgtgttctccaccgtcttagcatgaccgagtcgaatatccttctgtactcgattcacttcatcagtctcaccgtagatcttcctccacctctcgaaccccgtgctattgaaatactccctcacaacctccttatcgcctccgccaacttcctccgcctgcaatttccgcctcctctccggatccgttaaggaaaccatcgccgcgagtgctgctacggatcctccaccgagtacggcgattgttgtactgtcgaccccggctaggtcggtgacggatgccgcgacgacggtggcggctctgctccgtggagttacattgaatctagtcgcgttggggaatctgggaagaaattgagagactgaggaagacgatgacaacaaggaaggagcaaacggcattatcgaagtagaggagaaagctaaaacaaag

SEQ ID NO: 7582 - DNA, 1113 bp, Arabidopsis thaliana landsberg
tatgcatagttgtgaaggcaatgtggctctgttttgagaagaaggcaagaggcaagaaccttgagcttgctgagtgaagcattgatgaatttcaatgcatcttggtaagcaccagttagtatatgggcagtattcaaatcgtctaacatctttgattcaaactcagtttttagcttcttaatgatgtcttttccttctgcagtttgttcagattttccaccatcttcagacaatgcgtcttgatatggtgacagaccttcatcaagatcttgtaaagtctgataaacaaaaatcagagattaaagtcagaactgggcataaattatgatggtgtcttacttttagttcacatattcctaatacaaaatactgcaaatggacatgctagttaagtttgatataattttgaaaacaaatctgaagcactgtacctggtaaacatagtataaagcttctgacgaactctctagctgcgaggcagtgaaactcagaggagaccggtactgtgcactcatcaagaagtgcctcagagccaatggatggtagctagcggttatctacacagattgaaacaaaaaatgaaaacctgtcaataattctgcatttagccatgggaacaacatccaaagaaaaagttgattattatactagtagcaaataagaaacatacttctctaatcgttttaaagttgtgctttgattttgccatcttctcgttgttgatagtgacatgcccattatgcaaccagtaatttacaccactatcctcacatgcagcacatgtctgggcgatctcattttcatgatgcgggaattttagatctgcaccacctccatgaatatcaaatttcggagacagataatgaacactcattgcactgcactcgatgtgccatcctggtcttcctggaccccaagggctctcccaacttggctcatgcaggctttgccgcctgcatagaattatgttcaaacttcacttcatcatatactgtgcaagcctcaaattgaatataataaaaagaaaaaatatattcaaaccttccataatgcaaaatcagcagggttacgctttctcgaatcaacagcaacacgctcaccagctcgtgtatg

SEQ ID NO: 7583 - DNA, 1712 bp, Arabidopsis thaliana landsberg
  unsure (1)..(1712): unsure at all n locations
aatcatagattatgtgtgattaaaaaacgtttagtgcttatttacttacattgcacatatattatttatggtagggatggaaagattcacttacgttattaatgctcaaattattaatatcctcaacagaataagtagtaagaatttcattcctttccagttgatcatcgttagcaaattcaagattttcattattcactaaaccttgatcctgctcaattatcacataaaaatcacaacattagcttcatatatgaaaaaataataaagaaggttgaattaattaatatcagttataaggtaatttacctgattctcaacaaaatgggaattaatcgtattgccaagaaatgggttgatgctttgatgatcattgtataggcttagattctctaatccaggaaccaactcatttgtttcctcgtttaaatgacttagtgactgatcctcgaatgatgaaaatggagaagaaaacctcgaagttgaacttccatgattactcatgttgttttcatcgaaattccaattcatactacccaaattttgaccaagagagacattaccattaacattaactctttctctaccaagtccaaccagatttccaacttgatcagtattgataccattgtagttactatgcatgtaactagtaccaaattcaggttccatgccgacaacatcatttggtataccatattgtccaaaagaaggaacttgagatgtatcaaggatgcttgtaggaagcagaccatccgtttgtgaaattaaattgtgatgtggctgaaccttgttgtgtaagaacgatgaaaatggagaggaaaacctcgaagttgaactctcatagttcctcacatcattgttgttgagattccagttcatggcgcctagactttcaccaaaatgcccgttaccattactatcaactattgctccaccaagtccaagcatgtgaccatttttatctatacttattccagcataactattacacatataaccagtaccaagattagagtttatacccgaaatgtcgcttggtgtaccatattgtccacgcctaggaacttgagacatttgagatgtttcaaaagcgcattcactttcttcatttaaaggcaatacacccctcgaaaatccgacgctttctctcataggcgacaagttagattcgggttcgttcaaaccatagatggatccatcgtacatggagtggatagagtcattgttattcaaaaggaggctagattgaccaagagtatcaccaatttgggacttaaacaaattttccttagttagaccgagataattatacgagcattgtgggttgatgttgctagatgattcaaagttggatttcatggctttttttgatatgtcgccttttgtgacattaaccttaaaccttctcatgtgtttcctatacttctgtgtaatggtcaacaattccaatattcgtcatatattttatgttgatgtaagatatattatccaacaatagcattgattatgtgctttgaaattcgattgacatatggttctgaattcaaataatgtttatagaagatcaaacctgtaaatggctggctatttgtgatcttgttatgccttccacattcatatattgtagaatattcttaggcacagcctcttcaaaatgacatcaaacacaaagcangagatnaaacattagcgtgtgcatatataaaata

SEQ ID NO: 7584 - DNA, 635 bp, Arabidopsis thaliana landsberg
taacgatccatataaatatatattgtacatgaattattaattattatacgaaagacatgtaattgaaatacgacttacgttattaatgctcaaattattaatatcctcaatagaataaccagcaagaattgcattcctttcgaattgattatcgttggcaaattcaagatttccaccactcaacacttgaccttgatgctgctcagattaccacatataagtcacaacattagatttatatactgtacatgaattatttatatacgaaagacatgtaattgaaacacgacttacgttattaatgctcaaattattaatatcctcaatagaataaccagcaagaattgcattcctttcaagttgattatcgttggcaaattcaagatttccaccactcaacacttgaccttgatgctgctcagattaccacatataagtcacaacattagatttatatgtgtttgttaaaaaaaattcatatctgtaaagttacctgatttacaatgttcatgtcaggagtaggaaaaagcatttccaaattagcagcagtagaattcaatgtttccccatagagtttacttcacctaaatcatagattatgatgattaaaaaacgttagtgcatatcgacttaca

SEQ ID NO: 7585 - DNA, 1265 bp, Arabidopsis thaliana landsberg
tggtaattaattgagatagataaagataagcagaaagcaaagcaatgccttatagttatggttataagtagcaagcatgggattctacgaggaaaaagattagccagacgtacataacaagtcacatgtcataattaagataataaaataaaagtaattaatatctattgttgtttttctcgtaactaaattccaaattgttgtggattcatcattaaatatttcaaatacttacctttttgtatttatgtatacagaatcaaataaaaataaattcatgtcatctttgattattcgactagatttttatttatacttgtgagcaataaacattagttattcatgaagcaatagatttgtctttttgtttgtttgttatggtagtagcactctatttgtgagtgttgttgtgctgtgtacaaaggctagtttggaatgaatttcatatgacacaaaaacgaaaagaatgatgacgtgtaaagactatatattagtagaagtttagatcagcaaatgtgtcagctgattctcaggaagctctatccgtgtatgtttcaactcttgattaattagaaatatactaatgaaaaaaaaaattctgtcttgggaaccactggagccatcgattatgttcttagatagacaaaaacacaaacgaaaacaaaacagtctttcattacctttcttgtgatcataactgttcaccgtctttaatgcaaaagaacatcaaatctcctgacattttgcttaacgcaaatctcaaccctagtctctcagattaagaacatcaagtctcctaataatattattttgtctttcatatctacagaattgtgtataatattattaaagaagagccaaatctcttttaaagattgactattaagaaagagctaaagatcttgatgagttgcgaaggcagctttccgatattccgcgagtgcccatagtgggaagatgtttctgtacgtagcatagtgtagcatgcatgtattcatgaacactcctaatatttcctgcaaagacacgacaataacaaagaataattaaactcattacatatacacatcaattttatatttactatcgttagaaacaagaaaagtgagttcaggtccatgacatcaatattcgatctgatttttattattacagagtatgaagtactaggcaatagaaaggtacgataaaggaggtaacattattctaaatctcaaaacttatgtatgcttcagagatattcatatatcgatcaaaaggggatg

SEQ ID NO: 7586 - DNA, 2022 bp, Arabidopsis thaliana landsberg
  unsure (1)..(2022): unsure at all n locations
gattcaaaggaaaaggtacggatccttttggtgtcacttggatcttcgcggagaagaagaccgtgatcaccgttgagaacgacgagaacaaagaggtttaaaaactgtcgtcggatctaattcttcgtctgtttctgaaaaaaaaaaactatctattatcctaggtttatgcttttattttgtcttttgtggaatccggtaatcagtaaaccggatcgagtaggctaatgactttcggattctaatttcaccccttttgacaaactctaatcttggtgaaattgcatattaatctcgggctatattatgtttcgttgatgatttcgcttctctatctatcttctataatcgntctgtgtttaatctgtgttctttgtcatttttgttggtttagtactaagggtataatcgtctttttggaatgtaaatgaaatggttagtgattagataagacggaattaagaatatttgttgttttgttgtcagagtgttgaatactgtgtcagaggtagtgaaaccataaacctctgtatttgtgctttgtggtttctctctatcgcttattggttacatatttttcgaaattgcccttccgtgtttgggccatgtgtagttttcgattggtcctctttcttttcttttgaccagtttttggggtttacccataaacgccatttggcagaaaatacgatttattaataacatccgatatttagaataggagtaataaaaaacataaacacacgtatacagagtcttttaacaagttggggcgttggctagaccacactgtttggggagagcagaagcgagttcaggatcaacaccgaaagaaccgagccatggagagttcttgtaaccacaaagacatgcaaaatcagcgtgttgcaaagcggtgcagcaaggctgtgatgggctcgtcggattctccttgctaaccgctggtttgcactcattcaactcatcctggctcatgccgcagagatcaatcgctactgatgtatcgaccaacatagctattatcacgatcatcgccatcatagccatagctgctttcttgctcgccatattattatcctcctctctctttttctatatgtttgtttgtgtttgtggtgttgaaatgaatgtgcatgagaaggtgtatatatatcaagttttagagaaacccgtgaaccagattggattgctccatatagtcacggggatgtgtttttccactttacttttgggagagggtcttttgtcatagaatcataagctttcggattcttatcaattatcaagtatcgattacaccatttccagtccacaaatcttttactacaaatggaaaaagaaaattcaacttgcacattgtatataaaattctcttttaatcgaaaaaaaacacattaataaacatccgcaaaatactgggcctgatatgagcccaagtaagagtactctaagaagtttcacaaattacgaaaataaaacagttaacgagtattactgtcaagtgtcagtcaacaacagttagctactttaaccacaaaacaaatgagaacatcagttagtatataaatgggacaaaatatagaacgaagaataattaaatgaagatagttatcgacttttgaaattaaaaaataataagaaaagtttactgtaccttttagaattcgatcacaaaacaaatgaagaaaagaaatatgaaggtgagaaagatgagcaaaatagcccttgttctatgtcttagacttctttcctttcattctctgtgtgggtagtgtgagaaaattcaaatctctagattctcaatttctttgctcttctatattcaaataaatgttttattttcttttttgaatatcagtcctattactgttagtggtaaactcataatcatggcacatacgagatgattatttggtccacgaaatggtttagtggttttaatctttctcataatccataatccatgagtgatgattttttttacagtgcgtttgaaaagattactattagtgataaacacaa

SEQ ID NO: 7587 - DNA, 1002 bp, Arabidopsis thaliana landsberg
aaaccccaacaaaagaaaaagagcagcaatcataagaatctgagtgaccaataccctatcccaaaagtgaagaaagaaaatccaatctagttcacgggtttgctccaaaacttaataataaatacaccattgcatgcacattcattttaacaccacaaacacaacaaatatataaaaaaaataaagaggataaaatgacaagcaagaaggtggcaattatggtgattgtaatggtgatggctagtttagtcgtcgagaggtcagtggcgattgacctttgtggcatgactcaggcagaattgaatgaatgcttaccagcggtgagcaagaataacccgacgagcccatcgttactttgttgtaacgctctgaaacatgctgactacacttgtctttgtggctacaaaaactctccgtggctcggttcttttggtgtagatcccaagctcgcttctagtctccctaaagagtgtgacctaaccaacgccccagcttgttaagcattatggtgttttcctttgtttgtttattatttaccatgtttaatggaatattctaattaaatataaggatattttaatggattcgcttagattcacatcgagatcatactaaatcatcgcatagttatgattcacacttcacaaatatataatatcaatcttaacctataaaatgaaaaatacttatcacaaaaacgtcacaaaaagttcactaaaaattaatatgaaatagagaaaaaaaagtcaagaaaatccagttgttgcatcaaattcatgaacgaaatatatcaatctaactgcaaatgaaatttgatggttttgactatgaagtatgaactcctcctttttctattcttttccattggctcatatacctttgaaattggtcatttgttatagtctttctatttctaaccttcgttggcaaaggcctaatttgcttttcctaaatctctttaacaaaaagaagataattgtgaattaggtaaaataatgattg

SEQ ID NO: 7588 - DNA, 3495 bp, Arabidopsis thaliana landsberg
  unsure (1)..(3495): unsure at all n locations
cgttgcatcacaatttagcatggcagtttgcatatcatcaactaagaaaatgaaatttcctacttactcaaagtacaagtccaacactcttttcaccgctccaagtcgaattacttccttctctgctgcttcactaccgacagtgagcaagactgaaataaactctacaatctaggaaaaataaataaattcaaattttcgtctattgaacaaatgtagttcagaaattacaaatcataaaccatctagtgaaagatacatcatagttagaaaacaaatcacacaaacgagaaaaataaagtacctttaatctgtgttttccaagaggtggttgcaacttgccatacgttgttaacaaaacaccctcagcagatgaaacattcaaaagcataagtaaatcacctgcacagtagaaacctattacatagtattcatagtagccaagatactaattaacattgcaagccacatagtattcatttggaaaagtaaaatgccatgatgattgtcttgcacctcaacaagcgtctagcacgtctctacacaattaggaaaaaatataaagtttcaccagttttcataccaacaagcaaaaaatgtgcttaagaaatctggttgtaggttccgactcccacaaacccagtattcttccttcccaacccaaccccatctttcacaatagggaatatagcattcaagaagtcaatacacaacaacacacaagtacaactactgaactacataagaatctttaataaccatactgtatttgctcacctaggcttccaagcattccctcaactgtctcgggattagttaccatgcttccatgggtaagttgacgaccatatatatgataagtgcccagtgtaaacctcttaggatcgagtagagatatgcatacagataacgaattaaccagaacagacttaggccgtgaatcttctaaagtatgttttaacaaccttccagtgcagctgcataaaagtgtccaggaatcatagtaagaagtcaattaattagaaattttaagcagtatcaacgactacattaaaataatagccaaagctgagaaagtctacctggggctggaaagttttgtagcaagaccagggggtgcgtatcttgcaacagtacacagaatttcagctgcattggcatgtacctcgggagactcctacaaaaataaaacaaaaatctccaagatatcagtggatagcaatgcattgaatggtagcataaatctgaaataaaggaggaaagccagaagacttgcccttattgaaacaaaagtaatccatgcaactgaatgaaacttaccgaagagccaaacttgtccacaatcatctctaaaacatccgtatcttctatccactgcattgcacttgtatagtttgaatataggtgttcatcagtaccaaccaggcgttttaaaacctaagcaccaagcaataagttagagtctaggaaacaagtattttacagaaaatatacaattttacaacctctcggtatataactttcatggtatacagacaataataattgaagaaattccttgtgtaacaatcatagtttaaacagcaatactcgccatgacaatgatgagagaaatatcagcaataattaccattattactgggttgattactattgttctcttaaacgaatcatattcagtatgttctcaagttgatgtgtaataaacgtagagcctaataaggaattccaacaaggcatataaaagtgcaaaccaacctccataatagatgtaataccaatcaaatcaacaagctgcttcagaatttcttgatgatcctggtagcacaagaaagccaaggttaatcataatgtgaattcttaatatgaattttcaaacggtcaaatggtgtttaaagcatagtaaatttgtgtaccagttatcaatatttgaacaacagggttggatacttggattgaatattgttgattagtaaaaatctcttacaataattaaatagcaaaccagatattcatcaatatctctgactatttcacggcattatctcaagttacgtagaagatccaaagtgtacaagaaattagtaagctaatgattcaataatttctacagagataaggaaaaataataattctagctaagttcaagtcattcttaaacgaaagtcctaatctgggaaacaaaaccaacttacttttataaattgcatgaatgggatcgtcttccgcaccagcagacaaatgacaacctagaaataacagatgtaagagagtacacgtcgaggaaactctatagagccctataagagcgttggaaagttctcaatgaattttctgataattaaaaattgttgaatgctaaataccttgctgaagtacccggcaagtaatgagttatgggtttctttagcttccaaaaacgaaaacaataataacatcaactgcaaaaggaagagatcacgagaggtaagagaccctaaatccataaccatttaccaagtataaatataggagaaagtaacaaagtcaatctctacctcctcatcttctactagtgttttcagtatcatttcaatctcacatgtgaaaatttcacaggcaatgaaaggaaacctacagcagaaaagaatatcaattgtttattcatcaaacaaaatcagggaaaaaaaacaataaacaatatcgttttttttctgttttaatgatatttttcagatcatttatccaaaacacttacttgaatgttcgcttcttttccacgtcctcaagaggctcctctattatgtacctaataagttgttccacttgcactttttctctcaagctgaaataaaacgaaaccaatagtcaagaacgcctgattaagacaggatgtttgataatccaacttttgtgcagaatagggagataattttgttcgactgaatgacagaaaatcatgtgatgcaagaaactggcatgtcttanaataatgtgtaagtagaactgttctagttagccattagccaaactgacatgtcgtaaaataatgcaaaaaactggcatgtcgtgaaataaattgattagccaagctattgaggtggacgtcaaaataagtgacagcattgtcaggtaataaatccaccacccaaagccaatgcactgtcacttgcaacctttacacatgaacaattgcatttcctttcctctcccaaaacggtaattaagcatgaaatgcaagaaaatgtggttacagagcatacaaatttaagagtcgtccattcagggctttgcattcttgaataatttcatcctcgtcaagaagatcctctaatgtgaaactatctttatccaaaattgcttcaacctgcaaacaaaattcgaaatttccagaaagcacataagactatgaatcgcaagcagccagcaaaatattgtagaatatgaataacgtcccaacatattatcagaaacacacaagttacatggaactccacaaagaaactccccttcgaa

SEQ ID NO: 7589 - DNA, 2250 bp, Arabidopsis thaliana landsberg
attttaattcagtatctgtttagaatatactataggcatagccattgcttgtgacttaatgtgatatggttgttgatgtttcaggaacaaacgcgtgtgcttggacttattcagaatgatacagaactttcggggttaaaattgatccaatcgccattgctagacgcagagataagaggggttcccgcacttaagttcatgggtgatctcatttggaaataagatttttttttttcaactttcgtttccagtgcataacaataagttaaattcttttgctgtcctaagatctaaaaagtcttgctgatgagatgaaacaaaataccaatgttattaactttaagcaaagaaagtaatggaagttcttgaaggtttctcattgcttcttctatatgcttctacatttttacttggtgtataaaacagaatcgatacgaaacaggtgataatctatgttatatctaaagcaaaagaaagatgtacaacacgaagaattacaggtaggaaactcttaaactctgatgatggaactacctatgaacagcgtaacagggctattatcttctgcaaacgatgtgttctttcttgtaaaacctttgtgatttctctatgtcctctatagggaagaaattggtattttcgagttttcccagatttgcaggtatagaaggaagaggttatgggaacgtaaagctacttcttttggaaagttaccatacaaaagaaagctgcacagcggctcaagataccggttaatgtcaggaagacgaggcaacgagggaagtgcttgatgttatatccattctccatcagtgatccacaccgagtgataagccaaactcctttatatctgaaatatatacggaagagtaagcaagatggtctaaactctaaagactgcagatatatgcgttgcaatgcagttttataacagggagagatcaagtttgcaacctttgagcgtttgataccacaaatgcttctagagcccatcttgtgtagcacaactctgagattgaatctacgattttgttgtcgtttgtactggtggcaattagagtcagaaccactggaagtaacactgaccactgcacaaagaaaatgaggaagagatgtttttttgggtcaagaagtgaaacagagctttctagtccgagtctttggttctatcaacagcattgatgagacacttactagttgagctggaccaggttcgaaaagtatggccagggtataagctatgccagtcacacagtatacaagacagatgaggacaacataattgtctgtaactgttgatcttggattgttgaagaagtagaacatggatagataaacaagcggcttaacgatggtgttgaagtgatcaactgtgtctttcgctaggaagtaagccaggctgctcattccggctcggctttctctccaatagtgtagtttatccagagagaaagatcttaatgcagtaatcttacacaagagagctgaaaaaaacaaaaaattgttgccagaatagatgaaagaagcaaagttgttgtcaaaatagcttgaaagtttctacttacaaacagcaataactgtatatgtatatcccatggcaccaaacgtttcatcgctcactttagcaagcgttcctaagcagataccagcaagtaaaagtattaggtaatctacagctagtgtccttgcttctcgtagtctttgtttacctaacctgcaaagcaaacacatcgaggttaagaaaaggattctctgtgaatcgattgattttgcaagtatttggaagggatctaccttcctaagaagtatctgtattgctgatacacaccaggaacttctctttcggataagtcacctgaactactgaagttattctgcaagttatctttcttgatttcaacatttgccttgacatcttgccagaactctccagcgaaagatgttccgtcatctcctacaacgctcccgtgagcgcttcctccatgagcagagttctcaccggaagcagaagaagccatcccttcaatgcttttaagcatgtccataggaactggatacccattatgaagcatccatctaactggaagctgcttataagtaactcctgaacttgtgcttggctttagtataccttccaatatgtcaatgtagtaatcaggcggattcacacgttcagggacaacgatcccgagacttgagaagtattcttcaactttcttgactggtccttgataacatattagcgacttg

SEQ ID NO: 7590 - DNA, 1469 bp, Arabidopsis thaliana landsberg
cctataataattataaacaataataatgtatagtgcatacataattatttatacaacaaataatattctaaaggggtctctcaccataaaacttctctggtcttcctcaagattcatctctcacaaatatcttctcctttgttaaaaccctaaagctagagtttatagcttttgagagaacgagaacgagaaagagaaagagaaagagaaagagaaagagagatagatatataaatctgaagaatacatctagctacctatataaatacatattctccaatctttgaaagcagtcttgatcattaaattatcttgccccaatccttgatagttgaatcttcctttcttctctgattggcttagagcttggtatattgatcataccaaagtggtagtgatttattgattaacccaaacacaaaataaacagatttgactcaaaaagaagaaaatgaattctaacaactggcttggctttcctctttcaccgaacaactcttctttgcctcctcatgaatacaaccttggcttggtcagcgaccatatggacaacccttttcaaacacaaggtaatatatctatacatatatgcttctctttttctgtataattatatacgaaagataacaatttgttaatttgtagagtggaatatgatcaatccacacggtggaggaggagatgaaggaggagaggttccaaaagtggccgattttctcggtgtgagcaaaccggacgaaaaccaatccaaccacctagtagcttacaacgactcagactactacttccataccaatagcttgatgcctagcgtccaatcaaacgatgtcgttgtagcagcttgtgactccaatactcctaacaacagtagctatcatgagcttcaagagagtgctcacaatctacagtcacttactttgtccatggggaccaccgctggtaataatgttgtagacaaagcttcaccatccgagaccaccggggataacgctagcggtggagcactagccgttgttgagacggccacgccaagacgtgcattggacactttcggacaacgaacctcgatctatcgtggtgtcacaaggttagatatgtgactcatcactcttttacttgattctttaatgattttgtgatctttatttgagtgtaatgatgaaatgtgcacatatagacatcgatggactggtcgatatgaggctcatctatgggataatagttgtagaagggaaggccagtctaggaaaggaagacaaggtaagtgatttacttccacttaattaggttttgtcttttaagtttcatttggctcatactaactatgttttaatttgtcttcattctttgttcttgatgcgtaaatcttggggactcaataataatctctagtttacttgggtgagtgcatcgaatcgtacaagattaattatatatagtctttcattaaaggaaacttaattaaatca

SEQ ID NO: 7591 - DNA, 2012 bp, Arabidopsis thaliana landsberg
acgcacatgcatgtgttgttgccctttgatatgtactatcatcgcttagccgcttacgatgatagcttatgctttatattttagtaaatatttcataagaaataggttttcttttcctatgaattgtaatgttatccctgttaacgtttgtgaatatttctcaaattaaaattgtcacgtcttcgtatcggctttttactttatgttcatgttggtgtagacgttggccttctgacggttcatgaaattgttaagcatgtaatgtgacttttttaattgctttcagaaagaaaaataaaaattaaagacttgaagcatgctatatttcacgctataataattgaggtcccgatagtcatgtgaggtctatccgtaatacccttatagtagaaagagcctttttaaaaaagttttcaaaaaatattataatctgatttgggcaatactttgcattacatatggatgaactaataagagagaaggtttttaattagtagacttttgtcacttttattctaatcatgaaaaaacttacaacatattttcattctttaatatagtttacaatctaggattggttagaaagaaacaactgagagaagtcaccaccggatgcttttggctagtggtttatcatgttgttctcgtagttgaaaccttggtgagagctagggatgcacattacgtcatatcataaagtattagcaaaggctataataccgagccatgggaggaacactgcctcggccgggccctctcctagttaacaagaaaagaaaaaaacctaaggaaatctgagttgggtcttaatttcctaggttgtcaagtagaatctgacaaatgtacaaaacagagggtacgtgatcgtttaggataagggaagacaaagtaaatggactgaatacacctgaaaatgttagacaattaaatattgaatagacttgaaaattacaagtcgttacaaaggcttcacaaatttgcgatgtatcaatctttttatttattttaataattggaataaaggaaaactattgaatggaagataaatagttcatacagctatatgattatgatcattatgatggcaggacacggaaggcaaaagagatacaatcagtttcacaacaataaatcacgtgtaaaattttatagattctgaaagggacaaagggttacgtaacccatcttctttaaggtggcaagtagcatcaaattcattggttggcaagcattttgtttatgcacgtgtggataaggttttaaatgataacattgacgtggcctattatggttggttaatatctaatgttatgtggaagaagaatttactcaaaatgaatcttgtcctagttattgcagaggtatagaaacaactaccgaatgtgtttaatgatggtctccaggtaatgaatcttccgccttggaacgatttcctgtcaatatgaattttgaaaggacttcaaattacgaatctttggagcagttgcaatagcatgatagagacagtcctgtgagcttggataaccaaagttgagctggacagtctcttaactgctcccaagagagattagtgtttgaagattcaaagaaactctccttaggtcaagaaagattagtgttagaagatttacgtggtggcaatagttactgtttaaggtgttgaaattacgtttttatatatataaaaagcaaattaccccgcgtattgggatattgagggcatatatttaattaatctgtttcataagaaaactaaagacacattttaaaaaaaaattaaagaaccatcataagaaaatataattaaggaaacaccataagtggaaatgacttgtgaggttttgtagagagactgagtagactttagaactgtagttgttacaagaagttgtttccaaccaacaaaggtgtttttgggtttgtgtatacttgtgttaaagtttttcgatcttttttgatcaaaaaaagacttgtgttgagggtttttttttttttttttgatatgcttaacg

SEQ ID NO: 7592 - DNA, 1508 bp, Arabidopsis thaliana landsberg
  unsure (1)..(1508): unsure at all n locations
caccaactattaaaagagagccaagcaagcaaagcattttttatttcaattaaataaggaaaagagaagaacgggttggtgcatcatgggattttgctgctgggagtgttggattcccccaggacgtcttcctcctccaggacgctnnnnnnnnnnnnnnnnnnnaggcatgaagaaactgggtacaggacccccaccaggtctcattccaggaacaagctgctgttggtatccatacccaggctgtggcattgcataagtacaggttaatattatcccagcagtttcaaaatagatttggaaaggctcaagtatgagtatagcaactatagagctaaagaatttaaaaacttttcatgtgacttaaaagcatctgtcagcttgtaattcattatacccaaggtagaaaataaacatgtgcatatctttgtgtaaaatcgtacacggctacttaaagtagagtaacatgaagattacctggggaggaatcatggcaggaggggcctgaccatagaacatttgttgtccaataccaggaccacccgggggatacactggcatgcggggaccaacagacggctgcattgcaactggcctcacttgggaaaactgagcctattcacatcaatgcaaatactcagcagcaggagaaaaaagagatttttctgtgatacaaaaatactaggacatatgttgtttatgctttatatattgttgcacttgattataaagaagaatcagcatcagtattgataattatacgcagtgggacattctaagacttgtacatgatgggtccaattgtttagagttgaaactccaacaggcaaagtaggagtagtaagtgtatcacaagacgaggtgattccaagagaagcaaacctgtagtctgacccttctgtcttccttccgctgtgcaatagccacatagagtggcttgctttcgatcattttaccgctcaactgtgacatctgtacagtattccactgttactaacaatcaaagtcctcataaatacaatcaacaagacgatacaactgacttacagcttcagttgcttcttcgggagttgcgaaagcaacaaaacctgagcctttgcttgttccattaggatcccgcatcacctgtaatatttaataaaagaacttcttaaataatgaactaggagagtcaactcactacaaataaagagagagagagagggacattgaaccttgctagatgtaacggtaccaaaaggagaaaagatctctttaagtttctcatctgaaatgctaggatccaaattcttaacatacaagtttgaactttgaaacttgtctgcagcttccttcaaattctgttcataacggacccttagttctgtttccctctctgacttgttctgggctctaccaacataccactccttatcatcaaatttgtgcccattgagagactccacagccctagcagcatcatcagcattttcaaagttgacagaccccaagcccttggacttcccttt

SEQ ID NO: 7593 - DNA, 2791 bp, Arabidopsis thaliana landsberg
ttctgataatattgaaaaatgaaaaccctaacgagaaatggtttaacatcattttatatttctagaaaaatgtcgacaccgtctatttttttttttcttttcttttgagcaaagacaccgtctattcatttgaccaagagagaatataaattcccaaggtctcttcggccaatgaactcaatattttacaaaattactcaaaaagtggatttattggttcttgtgttcttggctatattctttattaataatatatactacctatttataaaaacttggaccaactcaaaaaggtcacatatatacatccatatatatgagctgcatcaatccgtaaagcttagttaaatcacaaaacttcagttacagatattactttctacaaaaacgatattcatttattacatgcataaaccgacaaacatcaaattgatttatattttattatattttctgcagaaatatttttatgttatagttccagagagtgagatgggttcttgaggttaatttctgcagacattaggacttgactatttattaggcttaagaccattttctacacactttaacatactaatttaataggaaatacacataatctcttatggtattttatttacaaacataactatggtttgttgggtcaaacaatggtaaaattaatgaatttaatcatgagaaaatcgttttcggatgaacaaaaaaaaagttttaaacagaaaataggtgtggaaatcattaatgaaaatattaaccatgagcattttgttatcgtgtataaattaacaataaaaagtgaattatatattattagttaccaggaaataagtttgtccatgttgtaaagaatgcatcaagaaaccaaactcatcagtgggaagaggaagaccagaggaatgaagtaacaccgaatcatcaccgaacattgttttcatgtctattgctccttttgttacttccataggaactccgtttataaacaccgtcataaacccttctggaaaaaaagaaaagaacaatagatacaagaacaaaaatagagatttgagaattagctttcaacatacaaagttagcctaacataaaaatttggttttaaaccctcatagaaaaaatggttggctctttctttttcactttcaaaattttatttatataaaaattactcatccaaatatttatagtttaaatggtttgaaaaatgttgatttagttggaaagtatcccggtttaagatctaaaaactcaatgtgtattacggtgttaagaaaaaatatgagccatgcagatgaatgaatgattcaccttgttcgtattgggagttggagttttgatcagatgggtttaaaactgatgcagcatttgagctatgatgctgctgctgatgattatgatcagattcatggccatacattttgaagagattctccataccattgttgttctcacacccaccacttgaagaagagaggccgaggaaaaaggaagggatttgagatgacgacgatccattaaggaagtaattagctgataagttgctacaacttccaaaccccaaatcaatctcgttgttgctgcaaggatattgatgcatgctcatggccgtcatgtgctggtggtcttcagctcctatggaggtggcggctgcggtggtggctgctaaaagctgccggtgtctccggcgagatcttgaccgtcggttttgaaaccagtagaagacgtttgcgtctcccacagcaccgaatttctcaagcatctttcttatcctcaccgtttcatcttttggtgggttaacagtaccactgttgaagatggattcgagtatcaagatttgctccggtttaggtgaccaacgtgcccggactggttcggtggaagtggaggatgggctatgtgaagcaccttcttgattcatttgctatcaagattattgtcttttttttcttcttttggttggattatggatttcaagaaaaagagaaaggagatgttgtggttacttgagggaagatttatgtaatatgtattgaatatatatagaagagagattctcaatgagttcttttttgttttccttaaatattaagttacactattttagtgctctcacttagaattaaatattatataggacacggtcgaatatgttaacacgtattccgagaggcagagggttaaaaactgttcttgtatatcatttgattgtataacaaaactaacaagaaatgcttccaccattgcattattcgaccaactcacaaacaaaccctggttaacgtttttctcagttttgaatttacaatacaacttttatctgtgttctcggattgataatattcacacccaaaaaaatgtataaaatttgcaaattcgtatagcaaaatatgattatacatgcaattgtgaaaacaccggttattatttgtcttgctttctgctgtaaatatgatcaagatgtttagcaagttattcataaatttatctttattaaatagcaaataattgtacaaacctcgggcgatctggttgctttttagatataaatgtggacaatagattatcgacgtcatgcaacagagttacggaggcaaaaagattttgtttgtcaagtagaacttgtctttgattgagattttgattgatatgacaagtttgggaatacctcatgcacatatataacaacattagccgatcaaaaatctatgtacgtactacgtagagtcatttttaaatatttaactcgaaaaaatcatgtaataattaatataatataatttatttaaatata

SEQ ID NO: 7594 - DNA, 1845 bp, Arabidopsis thaliana landsberg
tcagtggtcataaccgggacaaccactgacagaatcggaacagccggtctgtatttagccacgagattagcagttgaacctccacgtgtcaacacaatgatgagttttgccctcgctttgttagcagtccgtacagcggatgatgcaagactctcgagtgggctcattggaagtggagttgctcggatcatctctttaaagattgtgttgtaatcaagcgaggattcggcttcaatgcagatcttagccatgactttcacagctatttccggataagctcctgctgcactctcaccgctaagcatcacacagtcagtaccatcaagaacagcatttgcaacatctgtggcttcagctcgggttggccgaggtgatttgatcattgactccagcatctgagtggctgtgaccaccggtttacccgcaaggttacacttgtagatcatcaacttttgagccaagaagatcttctctatcggaatctccatcccgagatcaccacgggcaaccatgaacgcatctgtttcacgcaagatctcatcaaagttaatcacaccttcctggttctcaacctacaaaatcaaacccaaagagaaaagagtcagatttatacctcaatatacataaaatgcaatcgccatacgtgaaaattttgaagtacctttgacatgagcattatgcttttagcatgagatccaagaaccttgcggacattaacaagatccgaacctttacggacaaacgaaagagcaatcatatcaatgctgttcggaacaccccaaccgagaatatcttcaatatccttatctgtcaaagtgggaagatcaacaacaacgccaggaagattcacattctttctttcaccaagcatcgccgagttttcacaccggcacctaacagttccagactcaggatcacatgacaagacagctagacttatgcttccatctgcacagagtatggtgtttccgggcttcacatccaaaggcagctttttatagctcatggatatcgttgattcgtctccttgaatgtcataatcagtggttatagtaatctcttgaccttccttcagttgtatagggttcccatctttcaagaaaccagtacgaatctcaggcccctgcgaattcaacaagcgaaatcataagtgattagcctctaaaatgttttctctaggcttgtttaacaaattcagatagtacaaaatccatgatcaagccatggtcttgaatatacatataaactctaacagcacacatcaacaataataaccaaacactgaaaaaaagatttaacatttcacaggacaagagaatccatttcacaagaggcttgcaaaaggaaacacaagatgggaggtttaaccttagtatcaagcatgacagcagcgagaatgccggtattatgcatagcagagcggaggttgtcgagtgtctcttgatggtattcatggcttccatgtgagaagttgaagcgagccacattcataccggctttcaaaagcttttcgatcatggaaacagtgcgagaagctggtcctaatgtgcaaactatcttcgtctttgggatcctcccatcattaggtagctccttcaagatcccttctatgtctatgttcgacatttttttctccttctcaagtttccctgcaacgaaaaagaatttaagcataaaaactcacacccatcaacaaaacaagcgaaagaatcgaaatttctcaaattcgtatacttaaagtctagatttcccgttatttatagacagagatccatgtccgaaccaaagaggaggtattaatacacacgatcgaacacagattcactctcaaccgacatagattac

SEQ ID NO: 7595 - DNA, 835 bp, Arabidopsis thaliana landsberg
ggtctggacaatgatgaagaagcttctaaaagcaggcataaatgtagctcgattcaatttctctcacggaagccatgagtaccatcagaagactcttgacaatctacgcaccgctatgcagaataccggcattctcgctgctgttatgcttgatacaaaggtttatctttctcttcttttgttaaggcttttgttcttgaactgttttttcacaagtgtgtaaacattaattgggtgttgatctagattgtgtttcgttatgattttgctcaagactgtttacactctttgtagttgagttgtgaaatgttcaagtttgattttagctccatgcgaaagaacacgacttagaacatcgttgatcttaagagtgtcgttgttttacattaggcatttagtgttttcatactgttgatggatccctaggtctcagaaacatgtgtttattgatgacgttggctcaaactagcaactgatagatcttatgtgttacttagagaaacataatagttggagtctatgtctatgttagaaccatttcagtaaataatatgagtgttacatcacaggggcctgagattcgtaccggtttcttgaaagatgggaaccctatacaactaaaggaaggccatgagatcacaattaccactgattatgacatcaagggcgatgagaaaacgatttccatgagctacaaaaagctcccagtggatgtgaagcccggaaataccatactatgtgcagatggaagcattagtcttgctgtcctgtcatgtgatccaatcgctgggactgttatatgtcgttgtgaaaattccagccgtgctttggtgga

SEQ ID NO: 7596 - DNA, 1781 bp, Arabidopsis thaliana landsberg
tatccgtaaaagcatctcccgagagtcaactcacgagtgtagacctaagctcaaatgcttttcaaggaccactcttcctcccgtccaagtctctcagatatttttctggttccaacaataacttcaccggaaagatacctcgatcaatatgtggactaagctctctagagatcctagatctatcaaacaacaacctcaacggctcactcccttggtgtttagaaactcttatgagttctctttcagatctagatctccgtaataacagcctcagcggaagtcttcctgaaatatttatgaatgccacgaagttaaggtcacttgacgtcagccacaaccgaatggagggaaagcttcctggttctcttactggttgctcttctctggaagttctaaatgtgggaagcaatagaatcaacgacatgtttccgttcgagttgatatctttgcagaagcttcaagttcttgtcctccactctaacaagtttcatggcacattacataacgttgatggggtttggtttggatttcctcagttgcaaatcattgatgtatcacataatgacttcgtcggtatcttgccatctgattacttcatgaactggactgcgatgtcctccaagaaagataataatatagagccagagtacattcagaatcctagtgtatacggttcctcacttggctactacacttcacttgtcttgatgagtaaaggagtatcaatggagatggaacgtgtccttacaatctacacgggcatcgatttttcagggaatcaactacatggaaagattcctgattctatttgtctgctgaaggagcttcgaattctgaacatgtcaaggaatgctttcacgggctacatcccatcttctttagcaaacctgaagaatctcgagtcactcgacatatcccaaaacaatatctctggtgagattcctcctgagcttgggactctctcttctctcgcgtggataaacgtttcacataaccagcttgtaggttccataccacaaggcacacaatttcaacggcaaaaatgctcttcctacgaaggaaaccccggacttaatggtccttctcttgagaatgtttgtggacatatcaaagagtcaacaccaacacaaagcgaaccgttggagacaaaagaagaagaagaagaagaatcatttagttggatagcagcaggtttaggctttgcacctggagttgtatttggactagcgatgggatacatagtggtttcacacaagcatcaatggttcatgaagactttcggacgaagcaagcaacagaacaccagaactcgttaagtcagccatcgatcatttttccattcttgttgttatgttcataaataatttgttgtatttcatgtagaaaagacaagcatgtaataaaatatcacgttttgaactattaatactaatacgttagtactagtgttgagggaatgcaataagacaccatcagtatgaaaatgcacacgtcgtttgataagcaggtaagtaacaaaaagatcccaaacgaaaatattctccaagtattttgatcacatttcatctcatgtacacatacacactagtttctccccatttttatttttaaaggctttaattaatatcctgatttggaggagaagaacctgctgattcctctagaggctttctccggggtcgcgttggtagatgaacctgaccttgagagctcgtggcacccactcgtgatggcgatgtcgtcgtatcgctagtctctgaatcagaggggcattttggaga

SEQ ID NO: 7597 - DNA, 2048 bp, Arabidopsis thaliana landsberg
aatgaatgaacattttctaagaaaatgaaagaaaagaaaatggtcaatttaataaactaatgaatgaatgttgccaaaacaaacaaacaaaatttaatgaatgaatgggttacacattacatagttttcttttcacttggctcccaatattgcaatacttgtcctttctcattgcacttggtgacaatcttagtactacaacaaaaagattttgaccagtcttctcaatcacacacccacaaaataaaataataatcagaactatccccaaaacttaaacacacataacactacacctatccccacctcaagacaatccctttcttctcccctttctccaacacctaccaaaagcctctctctctctctagttcttgatttttcaagatttcaagaaaacatggctgaccaaagtggtgggttggttatgatgagagagtacagaaaaggcaactggacgttgaatgagacgatggttctcattgaggccaagaggatggatgatgagaggaggatgcggcggtccatcggccttccaccgccggagcagcaacaagatatccggagtaataaaccggcggagctacggtggaagtggatagaagattactgttggagaaaaggttgtatgagaagtcagaatcagtgcaatgacaaatgggacaatctcatgagagactacaaaaaagttagagagtacgagagacgaagggtagaatcgtctattaccgccggtgagtcgtcttcatcttcagctccagctggagaaacggcgtcgtactggaagatggagaagagtgagaggaaagagagaagcttaccaagtaatatgttacctcaaacataccaagctttgtttgaagttgttgagagtaaaacgcttccttcttctaccgccgtaaccgctgtaaccgctgcagttgcggctgctgctgctgctattagtagtggaaacggttcaggcggtggacaaatccataaagtgatacaacaaggtttaggatttgttgttcctaaagtacatcaaatcattcagcagcaacctgttttgttaccacttcagccaccgccgccaccaccaccgtctcagccgttaccacgaccactactactgccaccgcctccaccgccttcttttcatgctcagccaatactgcccacagtaggtaccttctttctctctcttcttaacttctaagtttagtttttattatttgagagttaaataatctgacatttaaagaaaaacatacatttgtaatttatgtctgattacacttgagaaataatatctttaatatacagtttaatgcacactcttatgtatacttttgtttgatacaactcttaattaaacactttattattttcagtgaagaagtacaaataatatatacattacattatctttaatatttttttatattaacaagttatttggtttggattatgtttaataactttgttgaagaaggatagtagcacagattctgatacaagtgagtattcagacacatctccggcgacggaggagaacaatgccgacaaccacaaccgccggtcccagcggcggcggtgtagatgtggaggaggttggacgtagtaagagagatgaagagacgacagtagcggctgcgttatcaagaagtgtgtcagtgatcgcaaacgcgattagggagagtgaggagagacaagatcggagacataaagaagtgatgaacgtacaagagaggagattgaagatcgaagaatctaatgttgagatgaatagagaaggcatgaatgggttagtggaagccattaataagctagcgagctccattttcgctttggcttcttcttctcgccataataatcagcatcaaggaggtccaccatagtaattcaaatgattattatgtagttaatttgattagggaagtgattaaattgtggagagtgatgatcggagtacataaattgataatgaagtcttaattaatcttgttttcatcactctcaatgttttaaattaatttgttgatttcatgcaatatagattgaaatgt

SEQ ID NO: 7598 - DNA, 1466 bp, Arabidopsis thaliana landsberg
agtgatgcaggtagaagagaacgacttcatctcctgttttgttacttcgtctctctatttacatgtggggaggggtaaacctagggtctagagaggagactaaaagacctaactaagcacacattcttctatcacaagacttgctaatcaaaacccaatcttgctctccttttcagttgatattgttgctgcttatcttacttcgtttttgagtaggaggtccaagaggacctaagcgcagagatagatcacattcacacccaccaaaggtaatgccatttgttgcgtcaatgagagacgccggtctactgttcttggacttacacgagtcactgattggcccgaatgaatagcataaagggtaggcagagtacttggagacagggcacttctcttgtgctactgcaagattctttggagcaaagttgtttggtttcatgaatacttgggacaacatgttgtccaagttagttgagtcttggctaagataacatctcgggttaatgttccgttggctccttgaagctctccttggtgtgcaccccaaatgcaatgcagctacataataaacaagacttgctcattgatctgagccaataatccccgaaagctcgaatatacagattgtattgtataccttcaatacaaggctgaagaaattcccctgtttcggtggtctcatcaagtcgtatgattgtgttgatggcgtcgtttgtacggtctaaaagggtcttcatgtccatatactcagcctaacatcaaacccacaagaagtatataaaatattcatattccaaatgaacacattagctacaaatccactctatcaactccataaaatccaaggtttagcacagattaccagagactatcagtcacactgttcaaagagggcaataaaaagcaaaacatgaaaatcgaaatactattgagaaacaatcctttgtaattaaaatgttggaagaaaaacctcagaattggctttggaatacatgatttcttcagctctcaagacaacaacagggagcttctcttgccattctgtgtttttcctggtggattggctgtgaatctcacaaacaatcctacaaatagttcaaagaacaattgagctaaagaaagacatgcacacagacatacacaaacctatagatacacagatagatatccaaagtgagagagagatgatgatgatgacctgaaaatctcttggatgagcaaacccctcatgggttggtgtctgtcactatgccaagctcttctgatacagtcgtacggtcttggccctggcctcggcatcttccaccacttccttttctatgagagagagagagagagagagagagaaaaaaagacaaagtgagattgttgttcttcactagttttcacttctcaataatttatttgagtgtggtgggggagagaggtagtcctgtccaactggtccggtccggtccggtccggtt

SEQ ID NO: 7599 - DNA, 358 bp, Arabidopsis thaliana landsberg
agagcgaatgccagattaaacagacgaaaaagaatgaaagattaaacataaatttatttttctaacctttgtgggatttggaatgaggttctttaagtcaaagaaacggtcattgaagagagctcgtctttcgcgttctgtaaggaaagtcctcgacttctttgatccttttccttcctctgccttgaacctctcgttttttattgggcaacgttccatgaagatggttcaatactctagaagattatcaatttcaagagaagaaacatagtttctttaacaagtctctccctctgcgtgttttgattgaatataacgagattcgcagatggaattaacattttctattttttttttc

SEQ ID NO: 7600 - DNA, 1871 bp, Arabidopsis thaliana landsberg
tttctttaatcagtatagttttatccatttacaaattatgataccacttagacttaataaaatgcatttaaaaattctataaataatttaattgctaactgccataatacacgtgtggcatatggtacgttcactctagtttcaaccgcgtaagaatctgggcttcccaagaaaactcttagaaaagccacaaaaacagcatatgaatatatttgtattcgccttatcgtttagcactaaatcacccgtagaacgagtcttacataaatagcaaatcggccgagagagacgattattcggaagcaaatcaaatgaccccttgtcacccaacactaaaatgtctcctattcttgagtgtattagattcttaattacacatttagtatgaagagtggagctacaatcgttgcatttgtaaaaccaattctttgcatatacttcctcttcgcatatcccgcaacaatatgtcacattcaaatttttttcaccatagcataatgagagaggatgatcatcatatctatgtcttaccaatgtgggtaaagtagcgcatgtgaaacataaattgtagccaccacaatcatcttttcccttgcaacgtagaagaaacataagagccaagtcacaaccttcacactttgttccggctctctcgtctaccagaattacaaataaccaatgtggatgactttcatgtttaaatgcatcagaaattgaagcacaccgcacatcaattgtgatgtaaaggtgaaaatacttcttaatatacgagaaaccggtgcaataacgtccacaagcaaaacaaataaacaagtttgcaaagtctatgccaaactgacctttgtcacataaagtaagtatttgtaggcttatctggtgtcttttcttgagagggagattagcgcatgcatcatgaataaaatcacattgtgtacatttgtagcacaattcagcataaaaaggaagggtgcatgcatagcaatgttctcttggttcctcgagccttgatgatgataatgaactcttgagattgtgttcatggctaaaatgttttattaggttttgatctatcactatgaacggtttgctttcgtctttttcatcttcttcgggtactccttcaagttctctcctatcccaaatggttaaacatgttgtagcacattttgaatgaaagacataagaacaaacaaagcaagaatatgctccgtactctccattaacatgctcataacataccctacaaatccacttcccaggaccaagagaagaaacatgagaaatacgatggtcgtggcggttgatttttataacacgtggtaagaagatgcaagctcggtggattatgaaacaacattgaagacaaagacacgggtattctgcactacacaacccacatgcatgacaagtgaaggggagtttcatcggtacttgaaggagtttatgttcatgggccttagtttgttcaaagatcagaggttttctcgcacaagggatacatatacgaaaagaacattttgaacattgataaagtatttgaggaattctattggtttctcaaagacaacataacacctggtcatgcactttgatgagattgagagggtgtttatgacgagcaggaatcttgacgttgacgcagtcctcatggaaacaaaactcgcagaaattacacttgtagccttgcttgttgtcatagtgatctccgtagcaagcatcgcattttgatgagattcgtgtatattttaaaggagaattatgagcagggcattgtcttagttccattgtatccatggttgcgatgttggaactttcttctaaacctggtctcttttttatggaacaaagttttggcttctcttctcactttt

SEQ ID NO: 7601 - DNA, 1109 bp, Arabidopsis thaliana landsberg
ttgcgaataacgttaaatgtagacatattaactaactaaagttttttgtttttgttgtattaactaagaaacggaagatgtaaataattttgagtatttatataaggttaatagacctgtcggtttacttttgtcagaacgtgcaagtcgattttttaggttcgtagaaaataaaggaacgcatgttctctatttacaatttttttctttaaaaattaattaacctaaatttgatgatatgtcacatttttattggtcaaatggcttgtgctttaagaagataaaggatattctatttatttatataagaaaacattatacaatagctcaactataacatatcatattgttgctttgtaaaaacaaaaggctgtaaaacaccagaaatatatttttataatatgttatgttaccttaatcagtataaattttgttattataaattaattacaagacacatgaacagaaagttaaaaactataaaataattgagtactaatcgtcacaatacacacttatcacttatattgtcttcaatacctcctaaccaaatctttataattaaatccacaagagcagcatatgaatatacttgtatccgcctttttgtggagaacaaaatcacccatacaacggatcttgcataaatagcaaattggccgagagagacgattgtttggaagcaaatcaaatgaccccttgttaccaatcactaaactgtatccagaccttgagtgtattagattttgaaatacacatttagtatgaagagtggagccacattcattgcatttgtagaaccaactctttgaatgtacatcctcttcgcatatcccgcaacaatatctcgcattcacatttttctcaccgtagcataatgaaagaggatgatcatcatatttatctcttaccaatgtgggtaaagttgcgcatgtgaaacataaattgtagccaccacaatcatctttatccttgcaacgtagataaaaccaacaattcaagtcacaaccttcacaccttgagtaaaacaaatcaaaaaatacaaatagccaatgtggatgactttcatgtttaaatgcatcagaaattgaagcacatcgcacatcaat

SEQ ID NO: 7602 - DNA, 477 bp, Arabidopsis thaliana landsberg
ggggcatatgcttgctcgatttgttcttatttttttcattcaaaatgtgcaacaaatacaaacatttgggatgggagagaacttgaaggggtacccgaagaagatgaaaaagaagaaatcaaaccattcgaagtgatagatcaaaccctaataaaacattttagccatgaacacaatctcaaggcttctatatcatcatcgagattagaggaaccaagagaacgttgttgtgcatgcactcttcctttttattctgaaatgtgctataaatgcacacaatgtgattttattcttcatgattcatgcgctaatcttcctctaaagaaaagacatgagataagcacacacaaacttatgttatgtaccaaaagtcagcttggcgcaaacttcgaaaattcgttttttctgtgttacatgtcaacggtattgcacctggtttctcatataatattactggggatgaaaacaacacccaca

SEQ ID NO: 7603 - DNA, 1914 bp, Arabidopsis thaliana landsberg
aataagaacttacaaaaattttaatatatcataattggtaaaacatctacataattgcgaaactatttataatcaagagaacttacaatttcttaaaatagtaacagtagttcgttaaaaaaaaaacaccgacgcaattgcgaaactattttaataattaagagagtttttttttttttctcataatccataattaatttcataaactcatgcaaaaatgagataatatcacatttcattaataaaaataaaaacacttctttctctttgctctcactaaaagacaaaaacaatcacgagccaacacctcttcatcttctccaaatcaatccatcaatggagtcttctcccatctctctctcttcctcctcagatctcacactctgaaaatcccccaaagccatgtcttaccttcttcgctccgatccggtctcacgaatccacccagaacctcaatctctaacctctttcgaccacttcgatctcctccctgactctctcctcctcttaatcttcgacaaagtcgccgacgtcaaagatctcggccgttgctgcatcgtatctcgtagattccactctctcgtccctttcgttgagaacgttctcgtccgtgttgattgtgttatctccgacgatgattcctcttcctccgacgagaatcatcgattctctttaaacactgcatcgatctcagacgccggcggtgctggtggctccttctccgccttgttccgtctcgtattcgctccaattttcaaaccgtttcaaatgttagggcagattctaggaccgaaacgatcgtcttcttcgttcgatgcgtcgttttcagcgattaacgatgagatcggcgtaacgcatcactctccgactcaggtattgaaaaacttcggtgagattcggtttttgaaaatcgaacttcctacaggagaattaggtatcgaggatggtatattgttgaaatggagagctgattttggatctacgcttgataattgtatgatacttggagcatcttcggtgattcagtcgaattcagtgaagaatcatgagaattcggttgatgaagacaatggtaacatacctgagtcgttttacactaatggagggcttaagcttcgtgtggtttggacgataagctcgttaatcgctgcgtcggctcggcattatcttcttcaaccgattatcaatgagcataagtcgttagatcgtttggttttatctgatgctgatgggcaaggtgttttgtgtatgaatagagaacagcttgaagagcttagagttactcctttatcagcttcttctgcttcgaagaggacgcttgtgcctgcgttgaatatgaggttgtggtatgctccggaattggatttacctgatgggacggtgttgaaaggtgcgacattggtggctattaggccgagtgagtctaagaaggaagtttgtgatgcttcttggttgtctgatgcttttgaggaaccgtttgggactgcggcgaagatgttgatcaagaggaggacttattgtttggagatgaactcgttctgatttcgcattatgaccggtttcaggtaatagtacattgtgtcattctatggttttgtgtactgctctgtttggatgtttgaattagcttccctttgtggcattagcaatgatctgaaaatttgattatcatttatgatgcaagaaccagtttgaggagtcatagtatagtgtgtttgccttgtctgtcctcatgttcttcgaattgtattagcttgggtgatgatgtttttgagctgagatcatgtatcactgatgcggttgatttgtgaccaaaatgaataaaatttgagttgcttttcgtacatattcgagtcttatatctggtttagattatggggaaggtgttgacagtgttaatcatagacattttgc

SEQ ID NO: 7604 - DNA, 2455 bp, Arabidopsis thaliana landsberg
ggacaatagggattttagcctagatgtttaggcctgattttgttcttttgcaatagtttaatcacggctagtgaagctggagtaggaccacgacggtcttgtagtgctgggatccggttaatcactctttccaacctaagttgttctccaatatccgatcttctgttgttgcgccggttacgagcttctttgtaggctaatccgaataaatcaaaagggcttagttcaacattttcatatagcctttcaagaaaggtgtggccacagtaaatgcaagctccttctcttctgccttctccttgaagatggattcctcgtctacaagtatgacaccaatgtgtatttttccgcctagtcgtagtcatggatctgcaaaaaggaaaaacgatttttctcgtcaaaccattgtcaaggaccttttagaaaaaagattaaaataactcatcgtttgtaactctactggtgactaagtaacataaattccggacggaacaaggcttcaagatcacaagccaacgaatttcaaagttggaaaatgaactaaattcgaagagatattatgagttaaaagtccgaaactgttttgttatattaatttaaaataggttttacaattttagatatataagccctaaacaactttcacaaatccaaaatggatacactagaagcacaatttgtaagatacataaaacactgaacccttacaaacacatgacaagaaatcgattaaaaggcctttagattcaaatcaaacgcaaatgacgtagaaacaaatagtcaaatacaagtagtgtttaagctccatagcttaatctttgaccccgtgatcttgcttttgcatagtagctatttttgtagaaccaaaattatgcagaaatttttacactgaaccaaaacaaaaatatgcagaaacaagatcatgcatgggttttaacattaaaccaaaaaaagatcatgaatgagtcaaagattaagctatggagtataaacgataacatgtgatcggtggaaacaaaacgaatcatgcaagtatggcttaccggagttaaaatggattgatccgacaaacttgtgaatctccaagtgctgaaagaatatttaaaatagaagaaaaggaaacttttggaagaagagaagtctttaacgcaactgaaaatagagtcgaggatgatatcgacgacgaaacttcaaagacagcttcaacaacgggaacatgtggctgaagcttaacaaaagagtcaaagcacgaaactaacgagaaatttaatgaaaaaaatacaaaaataataatttaatactagtactaattaaaaaatagtgctaaacatctgtgggactatgaacaatgctttttaaaacgacataattgcgacaccaaaaacgcgtttatttagattacctttcaagtaattcacgtgataaatgtaattatccataactttgaaaaatgagtaccccattgttggtatcaggacatgtgtaatgtgttaataatttactattacagtatgctccgaatgtaatgttgataacataactttaaaaaaacgaatatcccatctttatactagctaggccatgtgacgtgtttttcatcaagggtcattatgtcatataggacgacacatgtatagcctagttattactaatttactattaactaaataatcattcagttaatcataagcctatatctttagaattaatatatatatattgacaaattcaatattttacttaaataaaacagatgagttatcaagataaatgatcaaaactattaccatttttttttataacctaagttttttaatgtcgacataaatttctggctttttaaaattctagggtcttcttctcttgccctcttttaattggctcaagctctgtttctttaagttttctcgggaaagttcttgtggactttctgccgaaacttttgtcagattctcaggcgaattttatttcctgcagagaaactttaaaaaaaaaaaaaactacacaactagtactatattgattcgtattcaaaaacctaaattcaaatttaattagggttttgcagatcgaggaattcggattccggaatcgattttccctcgccgtttcgtgatggcgaagatgagaccatctgtttcgttggatacttggagagagtatttccggcgaggagattctgatatttttggtatcattgatcatgcgattatggtagctgctgcagattggccaaaggagtttaaatccaggagagatagaattgctgagcttctcttctcttgtaaagtgagtcgctgcattggttgtgaccaccttgagctctcgatagctggagacgaagcggcggtggagatagttggagttggcggcggcggtgataggggtgattctggtgttgcgacgggtgaaggtgaacaggcgtctgtgagtgttgatgaggttatgaggataa

SEQ ID NO: 7605 - DNA, 1733 bp, Arabidopsis thaliana landsberg
gtgatatattcagatgggggtgacggattcatgccaggacaatatgttccacatcgactctcttgtgcatttgaagccgttgttacgtaaatgttcaagtcctttggcattatcccttcgaaaatactcccactttcacacgcttctacgtatataacctgcattacattatcacaagtatactgatagtaacattcctttgaacaaaataaaacactaaaacaaattaaactgttaaactaaatttcaccatctctttgtatgttccggaagcatgcttcttcttaagcgtttcaataaaatcagctgcatatatgtgaggcgtatttggcatccctgaccaatgaaaacaaaaattacaccgttgtaagaaatcgattacaagcattacattggaagaagttatctaatcggaaacaacacaaatgatcgatgaaattaccaagaactccgggaccaccatgatccgcataatatacgaaaatgtgatcgttgggcttgctagcgatgaccttaccgcttccacctttaacagccttctggtcgcctaggagtacagcgtagaagtttgcagccgtaacgctactaccagtatagtcctgaaaaagatatttcaaaacgtaaataaccgaacaaactattaaaaagggaaaacaactagtggctataagaaatctaggagcgataccaatgaaaggtccacacataaagtttggtttaccatagcaatgtctctacagtcgctatcactataattgttgtgtagtgcctaaagtcaccatctcttacacgatagatccaataatatataattttttaataaattaacaacctaagtgccattgacaaagaagaaaatatcatttaaatgagatactatagagaaaaatttctcgttataacaatttaaaataaagctctaaaacctggttagacgctatttggaccaaaacataggtcacatctagaacattgatattacttaagagaagaatccaaacctagatacagacttattggtcggattaagggtaaattagttcatgcataattatgaggaaagctagataaataaatataccttagggactccggcgtaaacatcgtcaccgtcaggatggttgatgagagtacccggacgaggattaagtgggtggtttgcgatatcatcatacatcaaaacgactatgttttcttcctttaaacctccttttcttagtatttgatatgcgtgacacacgtcagcctttaacacaaagcaacaaaacacttttaatagatatcgaatttataaaaacttttgaactttttcttaaatgacaactagattgagaaatggagaaattcaccatacataggatcttagtcttgaattaatttcatattttgaagaaaataattaaacaaaattttgcatgtcacattaatatctaagccaaaaaaaaagaatcttaaggcaaagtatatatttacaataacggattgctattaaatttgaatcacgaataatataatcaattcgttggacactatgtgtacctggtgtctgtagtttccatatccagaagaaccagcgacgagaaccgcccatcttgtaccgacaccatcttcgtcttggtcagccgggttagcttcctctgtcggcataagaatctttggaaagaaccgaccgcgtgactcggcatgaaccaaaagaactaacagaagaagaagagctggtctgaaatagcaag

SEQ ID NO: 7606 - DNA, 1322 bp, Arabidopsis thaliana landsberg
aggtgattttgaaatagttactacttaattcaaaagcctcatttttattttattacatatattgtcaatttcgtcgacacttgggataaacatgaatattgatgtcataaatttccttttaaaatttatctattggcgtgtaaaactaaaatttcttaaagtgtaattatgaatattcaactccacaattaagatgttgtgtagttgtcttaaacataattacccattaatctgtcgtcaaatatgaattgattgatgttgattattgtgtataactactttatagggatgggaaaaggcatattcataagcttttatggattgtatattgagtaagtgttctatgaatcttgaaatccaacttagaaaaattcctttaaatgcaagtcttctataaatcttgaattggctattgtctatagctattatggtaatgaatgtgacaaaaagaaaatggcggtataatgtggttatgtatgtcaccaaatttatttgttagtaatttttactttatctattaaatttttgatgtttgtttttatactgcttattaagagtgtcagacgggcgagttcgcgctcaaacaggcgctccgtgacggacctcgcttctcttcattccacgacggtctggtccgccaaagactgctgacgacaaaacgaaacccatatccgctctgtaatgcttattgatctaacggaccggccggcatatctaacggaatagaccctcagactggaagtccgattgacatctctaccacttattaattatgtttgttttaatagtatattttgcattcgctacatacattgttttttgtttggtctatttaattcacttgatttgcaattttgaaaaccataggagttttttaagataaaagggttcattttataaacatcttgttggcttttacttgaatgtcaaatttcatcgtaaatgatttatagtttatcatttaaataaatatagtttgaccgaccgtttgatggtttgatcaaatctttcccacaaaaatatatttttcatgctaagaatttaaagtcgacataattttttgtatgttgcctcaagtagaaaactcgaatgtaagactagaaaactagggaaataaaccgagtaaatgttttgaggcgaatgaacataatagtaaaattaatggtaaaagcaaaggtagatttggtcaaagatgacgctagtccatgaaaagtgacgtcagtgactcagagtaaccatcatcactggtttctctgttagatgtgattacgctaaaacactggcatgtcattgtgccaatgtgccattgtcccagaatgcaa

SEQ ID NO: 7607 - DNA, 2485 bp, Arabidopsis thaliana landsberg
tgacgtaatgggctccatggttatcatttttgtaaacaataggtacattcagagcacatgtgccacctctggagaaggactctatgagggactttgactggctctccaacaacatcgcaagcaaggtatccactagtagctactctctctctctttcagcaaatccaattttggtttataatccgagtctgaaacacatgaatgtatgtttcgcaggcatagatggaatgttagccagattcctcttctgcttgtttggtttacaaatcaaagacagaggtctgtttctctagtactaaaagatttattattatattcttcttcgtcacttatctcaaacgcagatcattttacactttgtacttccccttcaataacttgttacttctctcgtttgcttcctgaatttgagtatatcatttttacatctgcttttcatcaaagcataaagcatctttcgaaacaaaaattgaaccgaatttttctgtaaactgatcaaatgtgtgaagaagacctgttatttggaatatttattttgtcactcaagtttgatattcgaagatagacgctaaaattgaggataacacacattatagacaaaaaagtaaagcaaatcacatgtcaacgtccaaagcattggaaccagagacagtatgtgtggttgtcgacccgacacataatccccaacctcttactgaccggaaagaaaaataactacctgatccaccgacaattttaactcctggcaacattcaagcagcggacggtgcggtcacgtagttgagccggccagcttcagtaagagcggtgatgaacagcttcagattcacgagatcgacctctgtgtccacaacggtaacaggtttcttgtaatccaaggattcgtcgtcgtaaatgtcccaccattttttcactaacatttttatatcttccctctccatgttcgcttctttccctgtgtatctccacggcttcgaaccctgtaaaagagaaacaaataaacaaaaaaactcaggactgactcaattgttttggataaacaaggccgtgaacaaaataactcaccgctgcacagtagtgaaccaccttgacttttccaagctctacattttctgggtgacgccataacatcgcaaggacgagattgtacactaaaggaatcggcttgtagattttcttaaagtacatgttcaaaaaatcctgcgaaattaaaatacacaacttaaaacagatgaaaacagagcataacagaaaaaggccagtctgagttttgattttgccttttacctgttcagcgaaaggagtcggaggagtgattttaattgttcgtagtaggtcctcgtaagtctcgaggttaggctcgtacaagaacattccggcgttgaagtaaagagccggtggctctccaagctccgcctttggccactggactttgtcggggcattgttggcaatatctgatcttgtattgcggcgtgtgactccatgttttctcacagaaacaatccatcaccgcgtacaaatagccatctggtaggtcaaacaagtgatcgatgttttcgtaaacttgaatgtctccatctaaatatatcattttactatactccacaaactgcacaaacacacagaaaaaagacagagcattaaccactttttcaaagggagctagacgacgacgtattgctaaacacaacaaaagaggtgttaaacgatggcgtattaaacgtaccttccagatacggagtttagagtagttgatgacgtaataagccatggcgaactgagtttggttctcgggtgggtaaacgggttcgatttcacggacgatgcatccttgatccacaagtatacgacggtgttcctccgggacgtcgggtaacatcgctactacgagtggataagccgatttgactttccttaaccctttggctaaaccaacgactcctttcacgtaatcaccgtttccagcaagaaacgtcacgcaagctcgatcgctgtcttggactgatggcagtgacggttttgttatcgtcacggtggacatagcatcagcggtttgagtaagccccggagccatgtgattagcacgtgatctgctgtgaggatttagagtttatctagtcgtgtgtttgtgtttgctgatgaggacttacggtagcgggataaacagggttaatataggcgcttggatgggttacgatcgtgaaatctgatacgtacacgtgtaagtaggagaacagacggtggtgattggcgtttggtgaaaccgtgaaagttctggaaagtgggaccgtaccggagaaatttaaaccaaacggttatacggagaaaacgctagaagcagctagctagctacggtgttttgtgggaaatcagaacatgttattccctgctacgaggtgcattgtacacttaaactagtcctctttcttgcattttagtttaatacacacctttttttttctaagtcatacttatttttgcta

SEQ ID NO: 7608 - DNA, 600 bp, Arabidopsis thaliana landsberg
ggccttggttgcgttttcaaacttgtggagataaacaatcagcctcggattaaactttctgaagatgttacaaaggttaaatctctctctctctctctcttggtgttctgaacattcaatgtcacattgcacttaatctgattatcattctgattcgtttaggtatcaataccgtgtaaaaagcgaagttacagattatacggcaaagaaggttaccctctggtagatataatgactggagagaacgaaccacctccaaaggtaaaacgaaagataactctctcaaagattttaatctcattaccttattgcatttttacataatatctttcttgatatcaaaggttggtgagcgtttactttgtcgtcacccattcaacgaatccaaaagagcatatgtagtgccacaacgtgtcgaagagctcctcaaatgttattggcgtggaagtgcaggtaaagattttccggtaccgtagagttattaatgacaatgcttttcactgattattgtttctctataccaatgaagatgaagcatgagaagtattaccgcctttgaaagagataagagaccgttgcatcaaacagctcgaaaacatg

SEQ ID NO: 7609 - DNA, 988 bp, Arabidopsis thaliana landsberg
tgcatttatttgatgtccgatttgtccccttatgtgtcaacgtcaatttcttctgttaattatccactaactaatcataatttagttgtcttgaaaagtttaagtttttgagtaattaaaccagccaaaacgacaatttccaatctgaattttatttttgattccttatctatatttatacgatttttcacctttttgttactaaaaaaaatacttttaaatttgagaaaagcttaactgactaacaaatattattttaataattggcgtataccttagattacaaatacctatatttttaccatgcaaatcaataccttagtttagtatcacgctattaaagatttatgctttttctgttctgcacaaacttttttttcttttttgaatcaaccttttcgaattttattcctttatataaaaattgaagtacattttattctctgcaaaaatacaccttcaaaaaaattttaaacccgattagacaatttaaatatttgtacaaaatcgattaatattcctttttcttaataccatacaaaaaaaacaggctttttcagatcatcctctgcatttgcgaatttgcttttggcgaccctaaaaatcatcgcagataattacccatgccgactttacaaagcctttatcatcgaccctccctcttttttctcttacctttggaaggtaattattctataaccctaaacccattaattacatattattaattctctaattgtgatttagtatggataagctcaaaagtacgttttgtttgttcgtaccaattgtcagggtgttcgtccttttgtggagctctcaacggccacgatgatactgtcgtctctagactacgacgaaccgctagatatcacccacgtgtcatcaaatcctcgatcaacatctttaagattcgacgcatcgtcgattaaatcaacggcctcgattggttcagcttcttcaacattcgctttcacagtctctcaga

SEQ ID NO: 7610 - DNA, 773 bp, Arabidopsis thaliana landsberg
cttaaaaagtaaagtacgttgatcaattataatgtttttcagacatgttacgcttacctttcttcaaaagtacgaaaaaggaggagtgacctgattagccagaaaagccggcctagagtatacaattcgagtagactgacgtacatagaaactgatataattcgaaatggcgggtattgataagatttcatatgtagaagaatatcgactataaatgactaactatcactattcactaacatatcccggcattgcttatatgtttaaaggccattcttttctcacatagtaaatttttaaacccgtaagcctaaaaagctaaaacggatgaaacctccttatgattagtgtatagtttttatacgggttaataaaaattaaaataattcaacgaaatataatagacagatcatttctgtaatgtcgcttaccaaagagaaaacaagttttactaaaaaaaggcaaagaaaacctaagaaacagaacaaaatgttagaagtagttgaatttctttctgtgatatgtacaaacttttaattagtcgatcatgttggtcattgtcgtttgcatcatgtggtggactaattgtctcgtccttttttaaggcttgcgtatggatttgaatttttacttattgttgttgttgatgagtttgtgttattgtgttaagtcatattctatatcgtccggttcttccttttaaaaaggaaaaaaaaaacaagtactaatcgatcaacaatacaacacattgatgtatagtacttgtaaaaaga

SEQ ID NO: 7611 - DNA, 463 bp, Arabidopsis thaliana landsberg
tacattactctgcagagcctcttccgcaactgtcttctttctcagaagagaatttaaactacactgaggtatttataggatccacaaggtgaaaacttatttggacactccatatctgtaaacatctgaggtatttataggttcacagactccatcatataccttgtggcttatgtaatcgtgcaacaatataatattgaagaagaattttgcctgacaagtgtaaagagtgttgagtttattgtctatttggtgaacatcatatgagacgttggggaatgttaaagaggttttgtttgaaactctgtcacagctaagcttcagatatggatgaccacaaggatcaccacgatctgctccccagaaagggaaccttgctgtgatgtttccacactcgaaaacagagtcacgtgaaaagagggattgggtacttagaatacaaggaacgaacatggacaatatc

SEQ ID NO: 7612 - DNA, 707 bp, Arabidopsis thaliana landsberg
tcaaaaatataaaaggctttttgggcttttttgcaaataaaaaactaggctggtctaaaattgttgtcgttgtcgtttgttttttacaaaaaaaaaaaaaattgtgacgtagttttgtttcttggttccttcactttaaactttttcagttttttttttataaaaaaaaattcaaacacaaatacgtaatgatgtagacatgtattgtgttacgtttgtattcgttataatttttgtaatttttaggtgtcatatacttataaaatgccaaaagtagtctgatatctatggactatagttgctttttttagtggttgtcatcttagtcttagatccataaatttatttaaattattatacgaagaaggtcggatgataaaagttactattattatgatagtgttttacaataatagtaatcaatgtatatcttgtttgaccgtgaaaagttttagacccaagaaatggaccctgtttgttaggtggtggcagaaatacttaattcctttccaaaaataaaacacgattatttttcttttatacgtttgcataaaattacaaaattacaaaagagaactagtccttgttgttatatgctgtaattctaatggaccattcttatttttattttgtacaaaacataataaaatttataaaaatactgtaaaacattaatgagtgaagaagattcgggagatacactttgc

SEQ ID NO: 7613 - DNA, 437 bp, Arabidopsis thaliana landsberg
ttttcacacaaaaaacaccctacaccaggacccttgtgatttttttaaggatcatcccaactcctcttctgctcttgcacatgctttctctcctttcttatatgccacctgcttcagtgtcttcttcttctataccgttggaatccgctgtctgcgacactctacaccacacccttaaattcgttcgaagtcccctcaagaacctcctcatttaggccttttcatccttcatgcccctaccctcatacaccaagagtccgttaaactccctgtcatactttcgaacccacctcttcaccctgtgtcatctaaagaaaattctcctccataccgtctatcgcctcctactgaaagtacttttcattaaactcatccacgaaatttgcccatgacatatttccctgcctccttctgtaattacactcttccaccacaaa

SEQ ID NO: 7614 - DNA, 2521 bp, Arabidopsis thaliana landsberg
gaatctacccaatgcttttattcctgcattttagatcttagttacggttgttttttggttttggataaaaatccctgtggttttggaggtagtgagtttgattgatgatccttgtgctttatttctgcagaaacttttcgtatccctggcggaggttgaacagtcacctcccgactcaatgcagaatgcactcactccattgatgaaaggattagtcggtggaaaactcttcaagcattcagatgtcgatgtcaaagttgctgtcgctgcctgcatcagtgagattacaagaataactgctcctgatgctccttatgatgatgaccagatgaaggtatgtagttgtttgttatttttttcttgagggagtggacattatgctggttggttactgactcttttcttctattcatgtgcaggaagtattcaagttgattgtatcatcatttgaagatctggttgacaaatctagtcgttcctatgctaaaaggatatctatccttgaaactgtggctaaggtcaggtcatgtgttgtgatgttgctcttgagtgtgatgcacttcttattgagatgctccagcatttcctcaaggctataaggtacactctaatatatccattatgctagaattaaactcattgtttttcatcttgtaatgtaatgtccaggaaatacacatacatggaattgtctacttgtttatttccctgttgttcctttatttccttgtgtcatgtttgattaatggatgttgttgttctcatttgatatcatttcattcatgtcgttctacctatccatggactatgctactttactttatgtactcgcaatatagttcacaactagtctattgcttgttgcttatgtttgcttgtacaacatccaataagtatgtttgtctgatgttgaacttgtttaccctttcagggaccatcattcagggaatatattttcatctatggagaacataatgacccttgttttagaagaaagcgaggatataccttcagagatgctttcaccaatcctacattctgttaaaaaggatgatgaggtaatacatggatggtctactgattttctatcaccaaccaatgctcttttgttaaatcttttaatttatcaacagatttcccaagtatcacggaggttggcagaacaagttctcagtaactgtgctagcaagctcaaaacttatctgactgaagcagtgaaatcgtcgggtgtccctctagataagtatagtaacatagtggcttcgatatgtgaagggacattcagtgctttgcagcaagaccaagttgttgcaaatgaaaaagaagtaagcctttatttctcaccttttttactgccgcactgcctcaacttttttagtgattatgcaggtcttcagttacattagctcttatactgttcttccatatttttcctctccaggatagtcaaggtcatataaaaagggaaacggaagtagaggtacgatagtcattgttgatttgtatgaaaaggatagatgcctttcttcttttagcttttgtagattgttaattgatttttatgttccaattaaaacatgataaacagaaggcagcagaaatttctacccctgagcgaactgatgcacctaaggatgaatctggtaagtctggagttagcaatggtgtcgcgcaacagaatgattcttcggttgatactgattccatgaagaagcaagacgatacgggtgccaaagatgagccgcagcaacttgataatcctagaaacactgacttgaataatattactgaagagaagcctgatgttgaacatcaaattgaggaaaaggaaaactaatctagttctgtcaaacaggcggatttatcaaaagattcagatatcaaagaagagactgaacctgcagaactcctggacagcaaggatgtgttaacttcgcctcctgttgattcatctgttaccgcagccacctcttctgagaatgaaaagaataaaagtgtgcagattttaccatctaagacatcaggagatgaaactgccaatgtcagttctccgtcaatggctgaggaacttcctgagcaaagcgtccctaagaagactgcaaaccagaagaaaaaggagagctcgacagaggaggtcaaaccttctgcttctattgctaccgaagaagtttctgaagaaccaaacacgtctgaacctcaggtgacaaaaaagtctggaaagaaggttgcttcgtcaagtaaaacaaagcctactgttcctccttcaaagaaaagcacctctgagacaaaagtagccaagcagtcagagaaaaaggtagttgggagtgataatgcacaagaatccacaaagccaaaagaggaaaagaaaaaaccaggacgtgggaaagccattgatgaggagtcattacacacttcatctggtgataatgaaaaagtgagtagttccctgacctgaattgattcgaatacatatctgacttccctgtccttgtcctcttgccgatatggtttaattttattt

SEQ ID NO: 7615 - DNA, 812 bp, Arabidopsis thaliana landsberg
gtgcttggaaaggcttcgatgtgaattttttgtttatgagatcaacacgatgtcttggaatgagactgaaatagctcttatttcttcatgcaggccccagaagaagaaagctaagacacgcaaggaacagtcaactaataagcaatcaaagatgctttcaccatttccacctaatgttaaaaaggatgatgaggtcatatatggagagattcttaccattttgttttcagcaaccaatctcttttgttaaattctttccatttattttcctcaggttccccaaatatcaaggaggcaggcagaacaagttctcagtaactgtgctagccagattaaaaagtatctgacagaagcagggaaattgtcgagcgtctccttagctaatcccagtgatgtagtggattcaatatgtggaagggcatttgatgctttaaagcaggaagatgttgttgctaatgaaaaagaagtaagctctctcacatatactagtgcactgtatcaaactacctttattgtttgtagataatatacttgcatcatgtgtctcatacagatgaaggtggtttttgagtaccaatggttatgcaagtcgtctagtttcatttgttctcttacggttctaaaaatttgtgtattctgcaggaccgtcaaggcccaagagaagcggcagtaaaggcatgcttctttcttcctgaaaccagcattgaaactctgaaatctgtcatttgtaaaaagaagatgaatgtcatcctcgcttatgttggaagtagatagttaattgcaatcttattttccaatcagcaggaacaaca

SEQ ID NO: 7616 - DNA, 1586 bp, Arabidopsis thaliana landsberg
aaaccctaaagagtcctgcatccacaaacaaatcccaaaacatgcttttttactttgcttcttaaacatttgatcctagagaaagtggtaaccataagagtataagactactacttgcctggtaatattggcggaaagtagctaaatcggaaagggcctgtttggaagaaagatactagagattcttagtggctaacgacttaaatggtgagctctttccatagtaacgatgctcgagtgaaacaatgcctgcatcaaacttctttgccaacacctgaagaacatgtttaacaaacaaaaccaatgcaaatttcagagattatgagaataaattaatcaatcaaatggatatgtttcacggaaaaatatcttacactaatatagttattggtgattccattgcaaggtccttcgccgcaaatcatgagaaagataggtccgtcaggaactcgtaaatggtcaagatcttcatagtatctctgtctgaatttgcgatgatcctgaaataaaattagaaacagctggaactggtaactaggatactgccactaattctggataacaataacgaaagagaaacagaacctaaactcgactagcaaacgaagttgggaagattgattacagatagagagtagtgatctaaggtttgagtgaaccagagctcatccctcgtcaagtacttgctacttttggacaatccatgagaaatcctacgaggttgcagtaacccattagaaaaacttaaatacgacaagagcaccgtgaaggtggtaagtaaagcaaagccaagctccgacgacatttctcgccgtgaaaatcgatcgccgtagtttaaaacgagtggaccagaaaacaaaacaaaataatgtgattttctctgtttgtatttgtttttaaaaaaaaaaacttgcaaggacaatataatgattagaataatgttttttcccctccaacaaatagtatcatttttttagtaaatgcatggattatagtgcggacttcaaattatctacagaaccagatttttgtatttcttttactttaactttactctttttctgctcattctctctcccagaaaaaaaccacactcatggcgacacttctctcaccttcttcaagctaagttttcattttgttcactgccacagatctatggccatggatatatctctgttcttcattttcctggtcatttacgcgccgttagtctcatacgccgatgaatctcaagccgagattgatgctctcacggcgtttaaactcaacctccatgaccctctcggtgctttaacttcatgggatccttcaacaccagcagctccatgtgactggcgtggcgttggctgtactaaccaccgtgtcactgagatccgtcttcctcgtctccaactctccggacgaatctccgatcgtatctccggtctacgcatgctacggaagctcagtctccggtctaactctttcaacggtactatccctacttcactcgcttactgcacgcgcctactctccgtctttcttcagtacaactcactctccggtaaactacctccggcgatgaggaatctcacctcgcttga

SEQ ID NO: 7617 - DNA, 1431 bp, Arabidopsis thaliana landsberg
  unsure (1)..(1431): unsure at all n locations
tgccccgccaccgtcttcaaaatagttcaaaacatgttcaaccatttgtgctttttaacttagaatagtagaagagtctttagagttaaataatctggtccaaaaccaataaaatcctgtgcagaagttaattttttgataaccactattttcatttttcagtgtttaagtacctaacatatttttttatctttatttaaactaaacaaatttgagcaagataataatttgaaagtacttagataaaggaaaaaaaaatatggcctttcttagttcttacagtaaaaaaaaaacaaaaaagtgaatatatactaattttgaaatatcttaaccggatctagacaatacatatttgattaaatcaagaataaagtcattaatcacactaatcacccattttctccctccccctaaaaaccagccgtatcatatgctcattccatttgcattccctccaaaaagaaaaaaaaaacttcattccttttgtttataactttatattcattcattcacttacaacaaaaccaaaaaccccaaacttcttgattctcccctccgataaccaaaaaatccctattttccgagatgaataatacacgagaagaagtaggggaattcactcaaatcttcaacgctttaatgagtcttatgaggaaatttatattcaaagttctacgcgtcggtccaatccctactaacatttctttcatcatggatggaaaccgtaggttcgccaagaaacgcaatcttgaaggcctagacgcaggacacagagctggtttcatatccgtcaaatatattcttcaatactgcaaagagattggtgtaccgtatgtcacactctacgcatttggtatggacaatttcaagagaggacctgaagaagtcaagtgtgtgatggatctaatgcttgagaaagtcgagctcacgatcgatcaagctgtatcagggaatatgaacggcgtgagaataatctttgccggcgatttgaattcgttaaacgagcgttttagagctgcgacaaagaaactgatggagcttacggaggagaacagagatctgattgttgtggtttgcgttgcttatagcacaagtgtcgagattgttcacgctgttcgagattcttgtgttagaaagagtaaaactggagatggttcttcagctttggagttgagtgatattgaagagtgtatgtatacatcggttgtgccggttccggatcttgtggtaagaaccggaggaggagatcggctgagtaacttcatgacgtggcaaacttctagggcacttcttcatagaacggaggctctttggccggagttagggctatggcatttggtttgggccaccctgaaattccagagaatgcaagattcttgcaaaaaaaaaaaagctccactaaatagtttntagttaaccctaaatgggctt

SEQ ID NO: 7618 - DNA, 935 bp, Arabidopsis thaliana landsberg
tagaaaaagtccatgaatccactcatatcttcaacgctttgatgagtctaatgaggttttttttgttcagagttctatgcgtcggtccaatccctactaacatttcattcatcatggatggaaaccgcaggttcgctaagaaacacaatcttataggcctagatgcaggacatagagctggtttcatatccgtgaaatatattcttcaatactgcaaagagattggtgtaccgtacgtcacactccacgcgtttggtatggataatttcaagagaggacctgaagaagtcaagtgtgtgatggatctaatgcttgagaaagtcgagctcgcgatcgatcaagctgtatcagggaatatgaacggcgtgagaataatctttgccggtgatttggattcgttaaacgagcattttagagctgcgacaaagaaactgatggagcttacggaggagaatagagatctgattgtggtggtttgcgttgcttacagcacaagtctcgagattgttcacgctgttcgaaaatcttgtgttagaaaatgtacgaatggagatgatcttgtacttttggagttgagtgatgttgaagagtgtatgtatacatcgattgtgccggttccggatcttgtgataagaaccggaggaggagatcggctgagtaacttcatgacgtggcaaacttcgaggtctcttcttcacagaacggaggctctttggccggagttagggctctggcatttggtttgggcaattcttaaattccaaagaatgcaagattacttgacgaagaagaaaaagctcgattagatagtttctaaagttaaaccctgcaggaaagaacttttaactctttattaccccctaatccccgtgtttctatgactggaaacgagaaagctcaaaagcaaatcttttttattatgtattggatccgta

SEQ ID NO: 7619 - DNA, 2355 bp, Arabidopsis thaliana landsberg
atttcattgccaccttcatcaaagaccacattagtcaccatgctcaagcccttgagctatagctcacttcatctgcttggaaaccggctttgggtttgtccaagtattagtatctcaataaagcaagtggacttgtaatgttttatgttcaataactcccctgtgtgctcttttgtctacgataataataagaaaatcatctttgcttcatatcatacctcattcaacgagacacgagaacacataatgtataaggcaagagtcttttaaatacaaagatagtgtctccttgaccagtcttagtaggccaaaaaaagggccaattttggaccacatgaagactcagataaaggactgtcggcatgaaagagcgttttgatttgttagtatggtaagacataaaagtgtggggacgaataaattgtactattcgacaaaagaagaaggcttcaaattgaaagaattcattaaggtcattcagcaacagcactaatcttaattattattgagttccttttctgtgtgtttgtcaaattatgactttcatgggggtccaaataagatgaaatagtatgaagaggtagagcatccttaacattttttcctttttctgcttgaaagtggctgcatgatgaaacttggcatgttaataacaaaattaggcatgacaagcacctttacgatagattatagtaatatgttcagaccaattcaggtttctcatttatttgatcttttgaatgtattacaacttacaaacactatagtcagtaaaagcaaacaaactttttttcagttactgtgtagttgggtcacagcctcgcagtaattccccttttcaccattgaagcaaacaatgtaagctggtatcatttgctgtattgatgtgtagcggacctttacacttcacaacctctggaataacacctgggaggaacccagtggatcccttttgcttatgccacaaaaagtactgcgttccttttgctacgccaccaagaattttagccttctaccaccaagaaggcgtgttttggtttgtcctccaactgtccttccagtatcgcctgcttgtctgatatggagggctacttgcttctgcagcctttctgctcctgtagctttctctagatgccctggcttttctaatttcttcctcaagttcataatccgacctctgttacaacaaaaacctgatcagtaaccatttctgtgcggcaggtcctaggatgttctattcctagtaagtgttcataggggacaaacatgaatcgcattttaaggtttaacagcataataggcgagaaaccaaaccttagttgggtcagaaagaactgaatatgcctctccaatcattttgaagagcctatctgcacccttgtgaacctcttctaatatctccttcaaccatggtccttcactttcgcttctgacaagaatctgtgcagcctgagtccacacacatcaaagagaacacatcagctgattgaaaataatgatttggatcattatcagtaagtaaaacacagattactttgtctgggtgatgtctaagagctgctttgcggtatgcctttttgatatcagcagcagagtcagatgtcttcactcccctgcaaattagcaaaacgagaacagaagatagcctcaatatgagcatacaattatactgaatatatgtataaaataaatgataaccaggtctccaataatatgaatgtgataattgactttgtcaaaagtgagcatacatgattaggaagaaatccagatgaattccctctttagatttttcttccatcacagacaaccgttgacgggcctgctttagttctttccctgctacttgcacgatcgacagatgtctctggcgtttttgttttatcactttgctttacgagaatgctgataagtctctggagatcactagctgcttgatcatagtctctgatcatctcatgtaatgtggctctcctgcaaactgcctgaaaatggaagcatgagtcatgttgatttttttaatgaaacctcattcttagaaagtgatggttacatgctgcttcagtccttgccacatttcaagaaaatggactatccatctcaaatgtgagaaaattcttggaagaagctctatacggctaagcaggagtgttcttatttgagaacttgaaagatttataatattttcttatttatgactagaggaaaatattgttttcgcaagatgggtatttcacaaacgaatcttactgcacctgcctatagcaattccaatacaaaagtttataagcattcagttttagctcaaatggttcatgcgagcatgttcacaagttaaaagcaaaagaaagatgg

SEQ ID NO: 7620 - DNA, 1354 bp, Arabidopsis thaliana landsberg
gggatcattcaccagcactggtttggtggtatcttccaagttacctagattctttgatcagtacactctaaccattgacagtgctgatccgaaatcaatctcagctgggaagtcagtacagttcaccaaaagtgtcactcaatggtctctctctttctccatttttcatacacgtgctcacactatatcctttgcattgcgtaagctgttgattttgtttttgtatgtgtattctaggctcacaaaagatggagttcttgtcgagggtttattctggaaagatgttgaagccctagtcaaagagtacacagaagcaggagaaccaaagaagaagagatgatcatctataatgggaaaagtatgttgttccttattagttctaaatgttacattttttttatgactaaaatcgatggtgacttggtttaaaagacgacagagtttttgcctcctaacagaagattcattcttataaattggaaccaaattttcaaatcattccgagatttttacaaccatcgatcttatcatgttctcttatttggaaatgttgccgtaagctagacttgttcggtcttgtctggcctaattcagttattttgttgttattgatcacttaaaaaaatgttatgttgggctggtctggtccaacccaatcagtaataaacaacttaaaatattagttttcaaaaaatccgatctgaactgaatttgtgtctgtccgacattagcttttaaccagagtaacacttctactctaactaggtatgaccaaaatttaaccataaacatattttgaaccataattgtatcgtttttaaactggaaccgaatcgtaacctgtcaattatgtttaaaaccgaatcgtaacctgtcaatcgtaatcgtaaaatggttaaaaaccataatcgttaaccgtaaaaaatagaataattacggttaaaatatatattaattgtaactgtcaattaatcataaccgtattaaaaccatagttaaccgtacggttaaccgcatagttaaaaccttaaaaatacaattttaactatttataatgcaaagataaatatcaaatgttcggataaagattttcaaaaagtaactaaagctgcttattaaaaaatctacaacatacttttcattttcttaaaagcaattaaaaaaaagtcggatgatacgtaagattttgccttcagtattaaatgtatcgtaaccatcaaataactataaacatatttaaccataattgtattcaaatcgaatattatctaatcgtaaccgtcttaaccgtatatataatagttaaagttatgattacaaaaaaatttgtaatcataattattagttaataaat

SEQ ID NO: 7621 - DNA, 897 bp, Arabidopsis thaliana landsberg
  unsure (1)..(897): unsure at all n locations
aagatttcgatgaatcaatcaacacaatgagaagaagttggtttaaaataggtggagtgaaagggatatgtagcacctactatagctcaaatgccaaacaccaagatcacctaagatatgagaactctacaacacatgtgaagctagcagaagaacaattctaagcttttacaaaacagaaggacattaaaataaagttttagttatgaagagaaaatatgcaccgaatcacagaaacaacagtccctggttatgatacaagcaaaaacaagaatgtagcccaaaagcacacaacctaaccatattttctaagcagtcaagagaacaaacctcaagaggataggtgaacaagatcgcgttcttctccttaatgtacagaatcagctgcattaccgcagtcaacaccacatacttgccaaagtcaagaagcaaacaaatcccacatcttattcaaaaattatatccaaaagataaagactttgagaaatttctctgattatacataacattcatacctaatagacattatagtatctcaaaatctaatgcacacaacacaaaccaatcaagccatacacaaggaaacaattatcaaattcaattcaatttcatcttaaccctagcaaattaaatgggaatcaaaaggatataatccgatgcagcagatcaaaaagtctctgttctcaggaaacttcttgttgtagaattgagcaacaagagccaccacgattataatccctcctaacagaaatttgacgttgcttaatctcacatcctccttgtaacctctgctcgtaacgatctacacagcgataaaggacaaaactttgatatcgagaacgaaattgtggggattgattgatgtgtttatgacttacatcngagacggattcatca

SEQ ID NO: 7622 - DNA, 825 bp, Arabidopsis thaliana landsberg
ggaggagaagaagacagaatctaccaacaagaatgttaagaaggccaatctattggacctaccactttttcaagcacatccttgacgaatccgtctccgatgtaagaattttctaagattttccttgttcgttgctccatatttctctgatatgtgaatctatgattcgtagatcgttacgagccgtggctattaggaggatgtgagattgagcaacctcaaactgattttgggaacgattatcatcgttgttgctcttgttgctcaattctacaacaagaaattccctgagaacagggattttttgattggatgcatcgcattatatccttttttctcgaattcaattgatactttctgctttctgcttgactctcatttggttggtttccagtggctaagatgaaatttaagaaaattgagattagagaacttgtaatgtggctcgaattctttgtgcttagttagcattagattttggaaaaccttcttgtatctaaagtatgactatagaagctgatcgatatatgtcttgtatttggataattctgaagaagatgtttggtccttgactatatgacacgtatgtagtgttgaatgcggtgttgcagctgattctgtacactaaggagaagaatgcgattttgttcacctatcctcctgaggtttggtctctgactatttagaaaagttatttcattgagaaagtccgtggtttgggctacattcttgctttgtctatgatgctacaaatgtattgtatctctgcgacttaggcgcataatgtacccttttttccttgtcacttacttttaactggagcta

SEQ ID NO: 7623 - DNA, 601 bp, Arabidopsis thaliana landsberg
gatcattttttcttctttggttcttcttctgcatagttcttgattagtgcttctacgtctttctttaataaactctcaacaagaactccatctttcgtgaacctgaaaaacacacagagaaaccatctaatgagactcatgtaaggaaaacagagcgagcaattgtaagaaagatgccgagagagagaccattgggtgacacttttggtgagctgaactgacttcccagctgagattgattttggatcagcactgtcgatggtgagagtgtactgatcagagaatctgggcaactttgaagataccaccaaaccagtgctggtgaatgatccctgcgtatcaaccatcagattttaagatttttccaaagaggagcaccaaatgatgagctaaacatacatgtttgaacagtagcaaaacaaatgagagtgagcaaatatatatcaaccagagagctttaggatcttgagtcttgacataacaaaatgaagcaatcccactaaccaaattattgcatcaatttaacatggcttcagaaagacaaaatgtctgagctctttttgttatgtttcctagagctaactaaacgagtacagaatga

SEQ ID NO: 7624 - DNA, 577 bp, Arabidopsis thaliana landsberg
ccctcccccagaactgcatttcacggttacctttgccttcggtgaacacatttgtatgaagtacataaggctgtcccgtaacattacccaagaactcgaagtcgatttcatcccatgtctcacctttagatgaaagctgtgaaaacattcttaatatcagattcaaacaatcaatgccacaaaaaaatgaagtagtggagatagataaattttacgtacgtagtaagcagtgacggttcctgctgagtttccggcgactagtttcatgttcatatcgatctttccgaacaaatactccttctttgattgaaaacctgaaccggagattttgtcgagagtgcaagtcaaaagctgtccactctctactatattggcacgaccatttccccaagtgatatcgaaattgtcgaagaaacttcctgcggagaggctgatcaagagcagaagagacaacatcaacagagactgtttggttgtaaaagccgccatttttgttgttggttaaaacttaaaagtatttggtttcagatgggttgaatatgatcgaggtttggtgttttatattaggagatttttt

SEQ ID NO: 7625 - DNA, 1438 bp, Arabidopsis thaliana landsberg
ctctgagtggttttcttatactcaagtctcctttcatatcgcgtgatctggtcttttgctttctttctccggaaccgctaaaaaagaaaaaataattgatgaagctgcagttagtttttgtaagtaataaaatttagatgttctcaagttttttcataagtgacaatcggcttgctatatttgagagttgaatccacatgaaagggaactagcaaaactgatatgaaattcaggttttgttctaagatgatttgtgaaaagttggttgtcacatttctaaactaatgaagcaaaatgtaaataataacttttgactaaaattaaagcttatatactctaatattaaaaagaaagaagaaccgaagcaaagggtttttacaagatggagattcggagtggcgcggacactaagttttggtataataactggagttcaaaaggatgcctacatgatatattgagagacagaggattttggaaataaaagctacaactgttgcggagctcatagctactatgataaggtcattatgactttagaagttcaagttaattattgaaaaagaaaaaaagaactaacggtgatacgttacaatatgatggcatctattaagagtcatcaaaatgtttttcgttgttcttttgtcttttagtattatggtggttacaacgctgcattcaacaccaatcaactgtcaagctgggaatgacatttagaggaagccactaggctatcaactcttgtcaaatgtcaacaaaatgttaaaaactttaaagaaattgtcagataaaaatataaggccttatggccaaaatgttggctagtaagaagtccaccaatgcattagttactgtttagggcctaccaaaactaatcacttttactcgaatttggcttgttttcagttaaatctggtctcaaaatagttacaatatatagaagtgtatattattaagctcttctggtttgtatgatcaaattatatttggaagagctcatatgtattagattgaaagatgtagatacagagagattcatgaagttttagcaataaagcattctcattggatttagacaccagatagtttaacagaaagaccaaactactacatatatttttgactctcttgaggatctcaaactcactcatgcatagtccggaagggcttgtaggttttgacactacttataagtcctgcgatggatccggctgcagctaagagcgagacgatcaagcaaacatagcacatcgttttcagcgcaatccatctagcagagtacttcttaatcttggtttgtgcaatgtgcatctccacagggaaataaaccgttaaaggccagaaggaagctgctccgataagacctaagatcgcgttgaagaaagggaatatcatagctacaacagtggttataaccacataagctgtccctcacacc

SEQ ID NO: 7626 - DNA, 1946 bp, Arabidopsis thaliana landsberg
caaaatcatgtcaaagaactataattgtgaaaggcttaactttcgaacataacatgtatcattgtaaatttgtaatagtaacttatgttagttaaaaaatatagacgtagttacgtacgaaagcatgtactaggaagaaattagggtataaagataagatattaatcgatggcaaagttaatcaaatgattaattagtacaacgatgagcgatagctagagcaactaatttaaataaacctagtctataattatataacggatgcatgatcttaaattcctgcatgcccctcttcttaatactctccttatatgtcctcattaatttccatatacagaaataaatatagaagatataagaactaaattaataaatttattttgagtcttatatggttgagatatagagaccaatatagagaactagaagtgatgttgatgatggtgatgatacattgtagatgggtcttgatgatgatgatgatgccgactcataccttccctctgactgttatggtcatccccttgatctcgacctggacccatctgacccgtacctgctccaagattgagataaaccaatcttgaatccaaattgttattgctccctccactgcttccactattgtgctcctcattcatatgagggtaaatcccggtattgttatcattgttttggttgttgctattgtttccttcttctcgagatatcaccattgcagcggattgaacaagctcgaggcaaagcctaagtttattcggttcaatgtgagtcaatccaggaactgcccccttgaacaagaaatccgaagttaatgttctaaggatatcaagaggcgtgattccaccaactgtcctcacattaggatcagcatggtggtctaacagaacagccaccatgtctggagagaccatctcagccgcgatgtgcaaaggtgttttccctgccggacccgccggataattcacatcggcagctccaagctcaagcaaagcctttacaacttctctactacagctttcaacagcgtaatgcaatgctaacgactcatcaagattgagtccttctcccattaccatcagcttcactagttccacgtctgatgaatccaaagctcgtctcatccttctaatcttttgatcttctaggtcttgagccacgctgagatcatggtggtggttgtgaggcattagagaacggcgagctatagaagatttaagacgaagctcttctattttggtgacgacgtcaatagggagatgcttggcaagaatctctggtgggagacctgatttagcaactaagtgagagcaggtggtccataattgatgcatgtcttgctttcttgatgctattaaaactttcatcacatcttcgatagaggctttctccaccatgcttgccaattgtttctgccaatcatacaaaacaatttatttgataagtatgatataaatccaaagaaccgactttttcagcaagtggggtttaatttccatttttaggttatggatttttttgctattaattaactttcttgtcatctcagatggatttttgtatggtggagtaggttttattccttatctatagattagaatcgaaaccccaaatgaggaaaattgtgggattggataagaaattaagaccaagaaatgaatagatccaactacataacatagatttctacttttaggaaaattctcttccgtgcaataaaaccaccgttcgtctgctttcggaaactttatccgatgaaaattgttccaaagcaagaaacttaaactcatttatacatgaaatcaagacaagaacatatataatttaacaaataaaaaattgttattaaaaattaaaaatcttaagcgaaataccccatgaaagacaataatcagccaaaagggttcgcgatttgtaataatttacccaacccaaagaaagcaaat

SEQ ID NO: 7627 - DNA, 1169 bp, Arabidopsis thaliana landsberg
tttccaactatgaattagttaactgacggaaccatacctttatggcagattaagacaattgaccggaagcaagaagtaccacatgatggtgccatgtgtgatctcctatggtctgatcctgaagatattgttgatggctggggattgagccctcgtggtgccggattcctttttggtggcagtgttgtcacgtcttttaaccactcaaacaacatagactacatagcccgtgcccatcaactagttatggagggttacaaatggatgtttgatagccagattgtgacagtgtggtcagccccaaattactgttacaggtaaataagattctcagagccgtctgtttcagtctatctatcctcatttcttgtagcttgatttttactcctatttcacttatgctccagatgcggtaatgtggcttcaattctagagcttgacgagaatctaaataaagaattccgtgtgtttgatgcagcccagcaggtatgacccttttagtaatatgttacttcccgttctgatctcgttgagcagataagtagactgacatattttctatatgcaggactcgagagggcctcccgccaaaaagccggcccctgattacttcctataatgggcaaaacttcgaaaaccttattcccaaagtcgaactagcgtcaatattcaactccgttgaagaggaagagaattactattcgttcagtgtttaggttgcagtgcagaagaatatacaatagagttttttcaggcgagctctacctaggccacaaagactgatcgaactggggttgtctaaaaaagatattgttgttgttgtttccggttttggtgtaactgtagtcaaaagagtgtttgtgtattggtagttaaagagtgattttgtcctgattcaagtttgtactttcttaggagataagacctcaaacagttttggagctcacagttatatcaatagaattcacagggaagcattaggacaatttgacagccatgtcagatcgaactggttctgatagaaacttgccatgaacaaaaagaaaatcctaaaattccttccttggtaggagatgaagatgggaaatggcgaatattctgccaaatgtttttatttcatcaacaatacactcactctctggtagagtctttgagtatatggacttaga

SEQ ID NO: 7628 - DNA, 1368 bp, Arabidopsis thaliana landsberg
  unsure (1)..(1368): unsure at all n locations
tctaggatccctcaattttggttactttctacattctcaggttagatatccagaccgtataactctcattagagggaaccacgagagccggcagattacgcaggtgagtggagtcttttttagaaaactttggtgcgtgtttataatttcagactacttaagagtctggttttagtaggtatatggattttatgatgagtgtctgcgtaaatatggctctgtaaatgtttggagatactgcacagatatctttgactacttgaggtatacaccctttttctgcttttgttttggagttccgagtagatattatttcggttaatgtaatggaaacttcctatcttttatttgtctaagtctttcagctcttgtcgagaacaagatattttgtgttcatggaggtctctctccagctattatgactctagaccaggttgagacagtgataatacaatcataaggtttctagctataaggatataactgactaatcacttcatacatatcttgtggcagatcagggctattgatcgaaagcaagaagtaccacatgatggtgctatgtgtgatcttttatggtctgatccagaagatattgtcgatggttggggattgagtccccgtggtgccggattccttttcggcggcagtgttgttacgtcttttaaccactcaaacaacattgattacatatgtcgagctcatcagctagtgatggaaggttacaaatggatgttcaatagccagatagtcactgtttggtctgccccaaattactgttataggtaattaattagatagatactcacaaccttacacatgatcttgattcctttgccttgagcgttcatgttacttgtgtttgaatgtggtccagatgcggtaatgtagctgcaattctagagctcgatgagaatctaaacaaagagtttcgtgtcttcgatgcagccccacaagtaagatcctgacctatctaacttcatgtccaaattctggtttgatttgtgagacataacatgactatggatgcaggaatcgagaggagctctagccaagaaacctgcacctgattatttcctgtgagacgcaagtgaatacagaaactggttccttcttctcattgcagagcaagaaagctacccaaaatcatcggtgtatacgttgtaaaaatgcaaaagaatctacaatccatgtgttgccaaagagatctctactcaagggtccgtttgagtagaatctttgtgtcttaaaaaaagcttctttttttttttttccttctcttttgtttgnaatgctacttttacaaaaaggaaaagaaaattgggaaagaagaggctncatggaattttttaaaaccctactggttga

SEQ ID NO: 7629 - DNA, 583 bp, Arabidopsis thaliana landsberg
acaatacagtggatagtgaacttttccgagctgaaaaactcgttcaagacttcgaacgagttaccattgtagaggacgaattgagctcaaaaacaaaaaaatcagatcaaaatctatggagatctgagcttgatagctctgataccatattaagaatgagagaatgagagagtttgttagagaaagtttgttgaaatgattttctcatcaactcgatcagaataatctttacattgctatatatatacatttggtactaaagctaatccacaactatacatccggttaagttaaccaataatgtaaaccaaatataaccaactccaataaaagcccaaaaggagcgaaatatttgtttgcctaaaaaccttgtagacagtagaaaaacctttctttcgatcgatcacatcgtcgtgtttcttcttctctttgataacaatggcttctgcttgtcgtaagctttttaacagagctttcgtctcttccctcaaatctaccctcagatcaaccaccggatctacgtcggctgcgtcatcagccggatttcgtcttccttctcaacccactcgccatttctccttct

SEQ ID NO: 7630 - DNA, 911 bp, Arabidopsis thaliana landsberg
taaaaaaacatatgtaggaaatacaatgagcagatgtgatgcaacttgacagtatgtttactaagtttccaatctaagttgtacacgttttcagtgacttaccccacattagttaccccaatccttaatttccctgatttcgtttcaactattggagctatgacaaaggttcgtacttgataaagatgcaagagggtccacatggtaatggtgaaattatgtgcctgcatcaaccaggtactcatagttagacactaaacctcgaaactctaacattcctccacaaactctgttcacttagccgtataagttctctcctacttgttaagacccaaagagataatcttacagcactgagccacactaagtaactaattcaccggacaaaaaaagacattcaagagtactttactttccacttaaccaaataaactagtctcaaaagcaagaaatgtcataaggccaagattccacgcagctaggaagaagcaaaggtatcaaacacatacagcgtttcattgtagcaatcaattagctcctaagatcaatttagccataaatcaaaagcaagcagaaaagagcaaaaattaaaacaaagaaggagagtaaatgcaaatggaggaaagcaaaaaagtgaactcacaagaaaagtaaagagaaaagcattagagatcgggagaggtgcagcacagtgtaccctgagagagagctcggctactccttgaagttgtgcttagacatgacgtcagcctcgccgccgccaccgtgctgtgcagcgggaacagcgactgaacacattccagcttccaaggacaactaaagagatcgagaaatttgaaatttcacaacaaaagagatgaaattggctgaatgagtaaacgttgcacagatgcaaacctggagaaggagaa

SEQ ID NO: 7631 - DNA, 1189 bp, Arabidopsis thaliana landsberg
tatttgccttggctcaaaggattcctccgatctgtttttatcaaagtcatggaaatcagagtctggaactgttattggcccgttagttttgcgccctgtaacatctcccaacttacaggagagaacagttttttcatcaaggggtgttgcatcctctgcagccgctgctgcctctaaagccaatctcatcatctccaatctttgcttgatatctgttctggccttttgaattaagggtttccgtgtatccaatactgatgcagcagaccaacgtctagttgaactttggatatgaagtttgtaatcctgatccattttggcatctgtattcgttgtctttgatactgaaacagatctcagagggttttcaacaaatccattagcagcagcttccataaaaactttgctcttcttcccaggtctgccgaccttatttgcactcgcgtgagcagacatgctgagctgattaggatatatcagaccacctggtgtgcttttcttcgagcatgtcccattagaaccgtctttgactttatttaatcccgcgctgactactgagttgctgtgcttataaggatacccattagacactgaggacacacgcttcaaatccagattccctggggaggttgttgttccagagtaggagctccattcatatgaaccattcgtaccataatcatatccatgtccttgcccaggatagtggcctaagaaatacgtggaattggtgggcatgcgtgacatagcatcataaccatgtgcaccatagccattactcggaggcgcatgagatggaggcgcatgagagggaggcgcatgagatggaggcgtgtaatgaaatggtgcactaacaggagctggaccagtttctacagcaataaatgctccacgacagttcttacatgaaagcctcttattcacatacttcctcagatactcatactgaactttgcaagaggtgcatacagtccagaaagtatcaagcctttctgaagatggtggaaaccgatcaaatactgcagtcccagtcccagtcccagtcccagacatgtactctgtgctatgcttctgaacctcagtggagtcaatatgcttctttcttttgtaataaaaagtgcttttattaaactcattagacaagaaactcctagcttcagatatgagatgaaatgcaccacgtgagagc

SEQ ID NO: 7632 - DNA, 2027 bp, Arabidopsis thaliana landsberg
gtgcattataactttaccctttgtaatttgatcaacattactatgatcaccagtacaaatcacatctgtgaagctaatttctggtcctgtgtacagactctgaccctgaaaaacaggtcatgaaaaggcaactttaccatgaatcacaagctttggatcattcgagatttaaaagttaaaatgtattatatcttgtatataccagatatgttttattgttttcgagtgtgatcaatgtggagaaagaccggtcaagggtagtcgcagccacggttaatatccatggagaaacgttaataaccgatgaagagcgggatccttcgttaccagctggagaaacaacaggaatacctttattcactgcgtgtaatgctgcaattgcgatgtcgatttcaacatcaagtgttttcagggccgagccgccgacggaaaccgacaaaacatcaacaccgtcgtgaatggcttcatcaaaagatttccagacatcagcaactgaacacatccctccttccacatcccaacatgctttatacatagctatgtgcgcctttggagcgccacctctcatgattgacccagaggagagaccaggcaaagtcatgttagaaacgaaggaaccagctgccgtggatgatacttgagtcccgtggccattatgatctctaggagatagatattctgtagtactgttaatacttgtttccagatctgcattaagaccatcaatgtagtatttagctccaataagctttttgttgcaatctgcaggactgaactggtctgcagatacacattgtcctttccaatgttttggtattggtccatatccatcatcgtcaaaggagcctgattctgaccatatacctgctcatataatgtcggatttgttaacgttctgctaagaaaagttgagaacaaaacaacctaatagagatattgatataataccagagtcaataacaccaataatagcaccactgcccatgttggtctcatgtagaagacttttagaagaagttggagttgaaaattggcctaagtaatcccatgtccgtgtcgtttgcaacccaagttttcggttttccagaagaataataacttcaggatgctctagtagacagaaatatagaaaatagcttagtaaaaatacattctaagttttggaactttaagaactcatgagcaagcgagaaatatgagataaagaacattactcttcaatttctctgcctcggccggtttgagcttagctgcaaagccagaaaacccatggtgataactgtagaccattgacttattggctgcttcttcgctgtaacacaagattcaaaccagaaaattaatgcagtaaccaccttagaagcaagttatacaaccaaaaatattcaatgcaactactcttttaccttccaagaaccgatttcaggatttcaagatgtgattgagtcaccaaattaggatcatcgtgtttcctttcccccaagtaaaatatataaacctattattatcagaaagataatgaaccaatgagcaattacaacaaaaaatgttcctcacatatctaaaacagttaagagtacataccgggaactcggggacaaatggtgggagaggtccaaaatttataccagaggcatcgtccatagcagtgtctggaggagcagcctctggagacaatgccaagtttgatgcctgaggaggatcggcctcgtggggtgttgttccagagcttagctttccattcattataaacacaaaaccaaatgctatagctgcaaagcacaatctaaaagaactatccgttttcaaagtttgaatcatttttcaacgaaagtgttcgttctcaaaagattttccttgttttatagatagatctccattgtttttactttttaagctaaactgattaacaaactttggctccaaaaaatgacagaataaccaattaatacacatactgattgtatcttgcagtaaataaacgttgtaactactaacaagcacaaaaatcaacgtacgaaaatagg

SEQ ID NO: 7633 - DNA, 2402 bp, Arabidopsis thaliana landsberg
gggggatccaccgaatgaagaaacgtcacaggggacgatatgaatttgtccgataggacttccggtggcgcttgaaatcaatctgaagacgttttcggctccgagtcctggaattggtaaccggttcacccaattaccggttttaccgtctccgtcgacggtggctctgacaatgaaaacccttttcgcggcgagagaggaggacggagtctcattaagccggagcgggaagagaagcttagggtttgtaaagttccggttaggaattggagatttgagatgacgaattgggtgtttggggagtagggttacggtgagggagagtgttggattggcaagattggagtgattcatgagttttcaattgcagaacgaatcagactatatgccctagagcgggaaactctatactcggtagatagacactgttaaagtgttaaactgtacttgtgggttttgtcggacgttgactttatttctcacaatgacaaaagtcaaaatataccaaaatttggactccggttcttgtatgaatttaatgtttgctcatagccagaccaaaaccaagacatgcataatttgatattttgatggaacatatgaaaatgtaacttagttttaaagataaaggatacatattactctctagtctctaggagcatttttgaccatttctgaggtgatggaaaatgatggatcaagagctttttgaatattccaggcggttcggcctaagctgccggttgtttctagtattttcccggtggttttcccggcattctctccaaaactgtggtgtgtgattgtcacaaaaatgtgaatatgtgttacaattcaacattttgcaaatgaatactagaacacatcgcaggagcgatacatgaaaaataacttcgatttcaaatttgaggatcacaaagtgtaattctaattacctcttactcacaagtttagtagcagccatggttgtagcagaatgagtttgtgtctctgccgcttcagcagcaccaagtattttatctattggatcatatcaaacattttatcggttttatttcttatactgattttcattccaaaaaattcgaaatcaatgaagataagtagagagtggctattaattgagttatatcctatgtaacttactaaaagaatcaagtgaagccaatataacctctcctggtggagtagctaacaacgccttccctaacttcgacttgatcactggagctatcatcgaactacttaccatatctccaccttctaagacagtgactcctatcgcctcacttgccttccacagcttctccactctaagtatatgttacatccaaataaccatgatttggttcgtaaaaaggatcatgcaagaattaatcaagaatccgagattttcttgtttgaaaaaaataatatagttttgtgaatacctttgaagatttgtgttgagtttattcttcttcttagttacatttttgccacctccatttatttgtgatgtctcaccgctcgtttcctcagcctctttagcaaccattattttacctcctcccttgtgaacctattttatcatgaaactcaattaaaaccatattaaagctacaattacaagcatgtgcgtcttcgttcataataaatgtttgaaatcccatctcaaaaataaaaaggggcatatgctagtatatagaagacatatgtttttcactaaggatcaattgtatttgtataggaagtccatgactcttcataattcaccaaccgtgtggattcatatcaaaatcatctaatatttaaatgcatgagcatcatgggaaggacttgtatatttagtatgagagataaattagaccttcttagagtaagcattgctacaagtgaagattcctttgatgatatgccctgttcctcctgcgatggccttagccacaacgcttttgtattcttcagtcttcggcgcaaactctttccaatcaatttcatcgttcttcattggagtacttgaagtactttgagaattctctcccaataaatcttctggaaactcaagtggatcgccaaaggcgagttccaatggtttggatatatcggcgagatggactctgtcatcaggaatatgcaacaagacttcttgtttcatagtttggggagatgggatttcttgggttgatgacattcgtgcgtttgttctttgtacagtagtactttaagtgtggattatatgtgagtcttgttcgataatgttggatgattgaaggttatggacttataaacttaacatttgatcatattaatagccaagaataaaacgtagaccataaaacatgatcttatagattgataatggagaattagtaaattgctctagttggaactagcaagttgtttgatagaagatagagata

SEQ ID NO: 7634 - DNA, 1718 bp, Arabidopsis thaliana landsberg
  unsure (1)..(1718): unsure at all n locations
taagagccaagcctaaatatctctcgttctaaaactcttctcgctttctaggtcaagataccgtcctccttcaatcctctagattctccaggttaactttgtgattcctttatttactgttgtgaaattgctcaattnnnnnnnnnnnnnnnnnnnnnnagactcataatttcttggtgggtttttgtagaggatcagaaggagcaatcctcagatctggactaccagatcgccggagaccgtctccggagaaagaggagaggtattatactacgagaggtgtagtggataacattgggaaagattgtttagatggaaacatcaatggagaagatagcaacaacaaggaagagagtatgtggcctaagctctttataacattatcaaacaaagagaaagaagaagatttcatggctatgaaaggttgcaaaccttctcataggcctaagaagagagctaaactcatccaaagaagcttacttgttagtttcccatactctttttgtcgtttttagaaaagtgttctgaagattcttcagttgtctgtttatagttttgagaataatgtgttgtctgattttaaacagttggtgagtcctggaacatggttggctgatttgtgccctgatagatacgatgttagggtgaagaagagctctaagaaggtatgacctttttatcaatttcattccagtgatccatcaatagtgattgagattgtatttgctttactttttgttagagatatgaaaatgatgatggtgtgtgttgtgtttgtgttgcagaggcgagcaagagggctaaaagccatgggaaacatggagactgattcagattgacaagttttaagattagtttactagaaatgtttgcgtattgatttaagctaactttcgtgggtttccttaagcaatctttaagaatgtattttagatgaaattattcggttgagcactttgaacacaaggatatatcatttctttgtgacaatgtatgtacctgttgtaacttgtaaccctatcctaatctattgtttcagataatgtactttagtcctatttggcggcacttaatcatgggctcaagtgtaaccaattattgtatgacatatactatcttcattttctttgtgatggaacaatgacaaatctgttacaaaatgcgtttgaaatgagaatcggtcactggatttgactgggaaaagatagaaaagtaatgcaagttctacttaacttttctgaaatcaaacgcatggtgaagggattaagcattcatgaatgccaatacaacttcagaaatctttattgataactttttttcatgtatacatctagttctagtcttgttgagatatatacaggactaaatgagtgttctttttgcaactgatagataagataaaatgtgtattggaggaagcttttcttgttgtagcaggattcagatggaagagcttttccatctttattttagcaactaattggacttggcagcttgaagcatttccacaatcaatgtctttacatccctggaaacaccaccaccattcaagagttaatcagttttggagcactctgatggagaaagagaatcagtggttttaactctagacagaaaccctgaacataactgtaatgcagagtgtcttactttctgtcttgtgcgcgtcttggaaacggaactcggagtttgaaggtgttcccttgaagagtagcctg

SEQ ID NO: 7635 - DNA, 1735 bp, Arabidopsis thaliana landsberg
  unsure (1)..(1735): unsure at all n locations
aagaaactgaaaattgattggttttattccgtgttctagttctatggtacaaagtacaaacattaaacatattacaggcgtgtgaaaaaacaaatgaaaaaatttctctatggactatagaagtctgacttactatcctgcaggataactagtaagtagtaaaatcctttggtggcagaaatgtacaaaaggaacataaaaaaggaacaactggttccttttttcttcagggcataaacgaatcgaaaaatgaggtctcctcgtttggttcttcctttgctctagagaatccaccaccaacaaagttttgttgcgtttgaaggttgctgttgttgttattgttgttcatggcgtaaccaaaaggcccggtattagtgttgttgttgtgcagcatctgaagtgtatatggtgcttgagaagaagtagtgtagttggagtgaccagcaatagcagctggtctaatcgggactgaagacgaatcctgtggtgctctgtttgtggcgtaaccgctaccacgagctgcaggaacatcgtggttgtgtttcccttcgtaggttgtgattactgctctcatgtcgtgtgatgctctctccacatgtttcctcactggacaaccgatggttgtgcacttgtagtagcttctgttaagattcagcaaatgaaaagaaaacaaaaggtcagattctcaagaaccttaattctgagttattgagatgcacaattgtttatgttattaccttggatttgggtttcccttaacgactttctggccgtattttctccatctgtaaccgtcgtcaagaatgtcaatatcactcgttgtctgcactacgattctcggctctctcactgtcttgcttccaccaccattcccaccatttgtttcattgtcccctttcctgaaaacacaaaaaaacatacattttagaactttcatattcaagattgttcaaagagtagcaaatttggagggtgatgatgatctgtaccatctctttgcttcaggttcactcccacaatcttcttcgtctctgctgacaatcgatgagccttgttcgaactcatcgtcaccaacagaatcagaagtagtattatcctcttgttgcatcccaaaggaatcagactgatgaaagctattattggaattaggctgatcagaagaagcttgacgattatgatccaaactggcattgtacacagctgaatgaaaagtcgaagaagacgaagaagatcttctagtagactgaggtttaggatggttgtggcttcctttatacacaatctctgtgatctgaccttccaaagatctctccactttcttcttcgttggacaattagggaaagtacacttatagtaactccgaggattctcacttcctttcacctgtttttgtccgtactttctccaattgtaaccatcctctcctttcctttgctctcttccattgtaagatacagcttgattgtttggacgagtctcggtttggctccattgttctgactggttcttcttctgttgttcctgaaactcaaaacaaagttatagaaaaactcataaacagaggatttgagctgttgatgaagtacatacctgagattgaaagatagaactgtttgttgttgttgtagttgtagttgtagttgtagttgtggtcggagcagaaactcctgatgattgtgtgtggaatgagaaatcgaataagttaaagttgttgttgttgctcntgtctccttc

SEQ ID NO: 7636 - DNA, 2618 bp, Arabidopsis thaliana landsberg
  unsure (1)..(2618): unsure at all n locations
tagagagaacagctcgagatgctttcgatagcttttgcgggggacactgacaaaggaatgctctatgtgttgaatgtatgcaataaaatgaggaagctggagataagggacagtccttttgggaacgctgcgcttcttgctgacgtgggtaggtacgaaacaatgcgatccctttggatgtcgtcttgtgaagtaacactcggtggctgcaagaggctcgcgcagaattcgccacggcttaacgtagagatcatcaacgagaatgagaataatgggatggaacagaatgaagaagatgaaagagagaaggttgataaactttacctctaccgaacagtggttgggactagaaaagatgcaccaccatatgttaggattctttagtctctttgcaccttcatgtgttttcaaacttttctttgtactagtttttgccttttatcaaacttggaacaaatacaaatgtcgcattttattattaccgtaattcagccattgaaaacataaatttaggtaaaataccaatcccgttttccaaataatacaaattacaatgacatccacaagaaacctacttgtctaatccatgctctggatgagtgcactctcaaacaaagaggtaaacattaacagacattgacacacgatagtacacaagacatagagtgttatggcatatgtcttcgattagacacataatgctgcaagtaaacgacgagatccacagagactggcggcattctcagaagcagcattcctccaacaaacagcaacagcaaagagcagcaagactgcaattcgcaacccacaaaaaaaaggattccgtaatcgcaatttgtaagcaacatgattaggctacttgaggtcaatcacaaatctcttactaaaagaaaagctgcagatgatataacattttatctacaaactttatactaaatattctggggttaagaatgtaaaataaaagccattaggtagttcttaagagagtcactagatccattgaaaagtaaaagatcctgtccaacagataaacataaaaatgtgtctatacatggatagctctaaactcatcataaaaagacaagaaccttccttagaagatcagcaaagcactcagagaactaaatctaaggattaatacgaatctcttgctctaaaatttcgataattggccaccaaacaaaatgataaagaagtcaagtcagggttctcaacggaactcttgagtttcacattatggcttatccataaatcaactcaaaggaatctggttctgatcaggatcatagtattcccaaattccataaaccaaaacactagttcaatgaaccctgagcattaatcagtgatccaacataaaagctaacaagattgaccaaaaaaaacacagagaatcgaatcagtgcactcacaacaatgaaagtaaacgaaaattaaaaggcggcaagtggtagagaaagaaacgaaccagccacggatgaaagagaagcaaccagagtcagaatcttggtaatggtgatgatcatgatggcagtggtcgtaattttgcggcggaggaggaggtggtggtccgtgatgctgatgaggataacctcctccggcgaagtagccttgataaccgccttcgtaaggacgtgaagacggtggtggatatcctccgtaaggctgaggtggaggatatccttcgtgatgcgacggaggagaaggatatcccggcggtggcggtgctgatggataacccggaggtggatagtgagattggtatcctaattcgtccgatcaaaaacaggatcttagtacttttagaatagatcaaaataagagaatcagaatttaaggaatcgaagagaagagaatcataagaaggagaagtgattacgaacgaacctggaggaggatacgattccggtgggactctgtcgtagctcattttttttttgtcaaaatcaaatttcacttttcgaatcagagagtttttttttgagattattggaaaatataaatatattttaagtgccaggcttttcttttcatttaagtaaattcacgtgtcactaaaatcatgttgctcacgttcttattggatttgggccgataataatttttatttattcgtttgtttgctattgggcctatccacttatttggtaaacatgaaattctatccatcattcagaaaaacagtgttaagaagaattattttttcaagtaaatgttagaaaaacgagagctacaactaataaagttcccatgcatatactattgcgcatgcattttgatcgctaaacacaaacgctttgttttttttacggcgagaagcagtggaacacaaatgcaaagctatcataaacatccccgccagtgacccggnnnnnnnnnnnnnnnnnnnnntccgatatccgagggtaactatttctcttctctggtgtcttgcttgaagctgagccaaacctcatgctttttccggcaacggtggcagcttttttctccaatctccggcggttgatatactcttccgatataaagacatccatttgataaaaagggatttaagaagtggaaaacctttgagggtgtaatttatggaaatgattatgaaataaagagatatatgt

SEQ ID NO: 7637 - DNA, 356 bp, Arabidopsis thaliana landsberg
ccctagcgcccacaggtgtaccccacctataagaaatatgaactcacagccttaccctttattttcatagctcaacaaatcgcaaactatgcatcagatcatatatctcttcattgcataatcacttccactagctgacccgagatggacaatctcgattcaacaggcctgtttatcaaatggatggctttatatcgggagagaaggtcgaccgccggacattggagaaagaagccgccgccgttgcctgaagaagcatgaggtttggctcagcttcaagcaagacaccagagcagagatgtagttaccctcggatatcggaatctccggcatcaaatttattagaaagtaagttg

SEQ ID NO: 7638 - DNA, 1172 bp, Arabidopsis thaliana landsberg
ccgccctgcccgtagacctcagtgatgacccgcatggagacctcccatcgttttttgttttttctgatgccgctcctgctatcaatactgcaacttctcctccaagccctgtcatattcacatgaggagagcattcaatcaaaggttacttggcatgtgaacctatcaaaccaaattggacttataaaactagaccaacattatttataatccatattaaaacattgtagcattatttataatccatactaaactgaaccaaagccatgttgacaaaaaaaaaacactgaacaaaagccacattcttctatgtttctaaattaaacaaaacaaaaaaacatttttaactgaacaaaaagccacatatattatatcataaaaagaatttaatcaattattcatcaagacattaattattttactattggtttctttttggttgatataacccgcaagaaactttctttaaattcttgttcgaatttgaaaaacttagaaaatcaaagcataaatcatttattatcattttcgttaaaaccaagctttactttttggaattgcacatcgcataacgcaagatttggttaaagaacctattttggcttttgaatgaaccaagattaactatatgcatccctttaaagaaacattttgtcttctcataatatttttgagaactatactatataaaacaccactcaaaacaaacaccaatcggactaatttgttaatagcaagggcgtttaactaagactaagagacataaccacataagacaacatttttgattaaataataacctggacgaggaccggatggtccgggatacccggcgggaggataagcaccgggtggaggtgggtaagcggccggtggatagccgtgaggtggtggaggataaccttgcggagggtaacctcccggtggaggataagctccctgcggtggaggaggataagctcctggcggatacccatggccgtgatgattatgatgtgagaagaatcctttgtcttgttcgtggtggtcgtctttacccatctttaattaaaatcaagaacttgagagataataagatgatatgaatagagagagaatacagatatggaaaaatgaactatatactatgttatgtttagacacatacatgtgtgcgatatttggttatgtgt

SEQ ID NO: 7639 - DNA, 1364 bp, Arabidopsis thaliana landsberg
tccaagttgtaagaagtacataaatataatataacctaattaaagtgtgcatactcgttaaactgccaaatgtcatccatgttccacattagatcttgtgtcacatcatcctcgtacttggaatcagccacgtgacaatcatgcaatgctgaaatgtctgaactgcccataacggccaccatgtactcctcctctaggcaagggaaggagctataaacctcactcacacattgactactaccccctcgtgatccttccaaggacattgtggtttcaagatcagaaaaatccatgaattgtgaagttttcttgagatcttctgacatggaagtggaacaatccatgttgttgaaacccaaatctttgctgtctcgtaaaattggtccaagtaaatcaggagcattagctttaatattgttggtgtatgagttgtctttaatctcgttgatcagtcttggaaaccaaaagctacgaacaacttctatgaacttgtggctattggaatctatgttgagctggcgtgcttgtttctggactctagttctccagtagtttttgatatcgttgtctgttcttcctggtaaatacttcgaaatttttgaccacctaattaagaagcaacatgttacacgttagattataagaaaattataaagctaaagagagcatttgagtaactaacttacctattaccccatttagaatggagctcaaggattaaaagttgttcttgaggagtgagattcccacgctttatgtcgggtttaaggtaattcaaccatctcaatctacaactttttcctgctctctttagccctgtttgtttgtttttttgtaaaaagagatcaaacttttaatacaaaaatatgaagtgggaggaagacattttcaccaattgcattttgttggaatagtacaaagaaaacataaaagaaaagaatattaccagaagatttagcgagcagattccatcggccttcaccgttatgggaaatgtaattggtgagaagagtgtcttcctcgagtgtccaaggccctttcctctgctctgcaccctcttcatttccattacacttcttctttgttatatttgacatattaatatgttctctttctaattgtaattaaaatatttcagttttacgctttatttgtctttgtgtgtgtagagaggggagagagagccgtgagataaaaatagactaagagagaggcttttatgatttgggaagtgaaagtgaattcaatggttgtatggaatttatagactcgtgatattggataatgttcgtactttctttatacatagatcatgattattcaactactagaaatactaaagtatcgacgcatatattttggaa

SEQ ID NO: 7640 - DNA, 1640 bp, Arabidopsis thaliana landsberg
gttcttatatgtcaacaaaggtttgtacctaattttgttgaatcaatgaagatacttaataagtaaatctaggaaacgacctcgaatttgcacttggacgaagctctgggtagcctttccagatctgctatgagtttcagctttctttcaccagttgcttgagaatgaacttccactagctcgagacatgacaatttctccaagaaatgtttcatttgcatcaattctctaaagctaccatagtactcagttatctttaggacttccagaggacatgaaactaggaaagaatactctgacacgcactcgcaaaaaatatcgcctgcacaacgatagtaactctcgtagtgcaagggaccctgaaacaagacgcagaagacttgagattcaaggttctatatgagtatctaatgaacttttgtgtttgcaatatacatacgtcgatgttgagagtctttagatttggagctttcttgatcagcattggcatagaagaccaacagaagttagagagattaacggataaatgagacagcttttgaaacactgggagtgcttcacggaagacataaaacatctgaaacatatatataagaaaaccaaccaactacagtattagaaacataagaactacctagcaagattttgattcttatacgtcacctaatgttccaaaatgtaaaacattttttaaaaagtagttgtaaaaatttaaagatcgagtgaaaacaatagagtaaacttacctctgcagtcatgatagtgtacaagttaagagtctcgacattttttagcccatgaagcagatttattggattaaatcgtttttcatctcctttaccccacatataattttcttccggacaaagatagagcttagtctcaacaagggagtcgagattaacacttagatactctttaggaacataatcagagtaatataagtaggcaagactaggagtatcaaaactaatgctcttaaaatcagaatcatcaaaagcatcccactgtttacgcattatagtaagtctcttaaggctagaactagaaacagtgcgggaccatttccaaagttcccagttgacaccacacacggttagttcctcgagcacgggagacgaagcaagaagcgttttgaacgcacaacgaccaaactcgtagaacctaacgtgataaagagagagagtcttgagcgctggaagtagggcattctcagggagaaagtcaatagcaaacccagaccctagtgagagtttagtaactgtctcacaagtgaaaacttcaaaaggcagtgtatatccttgtttgccatgtacccacaaataaaaatccgcgaccccacgcttgagcacaacacgtagagaacggttgatttgatcaaactgagcaggctctgtatcttcaggctcagtatcttcatcaaactgagcagagtcagtatcttcatcaaaccaccatttcaaggacaatttgtttactcgagaactggctggaagagccattactctgtccacaaaatcagtaagactttctccatccttaaccgaactatcaaaatgaagatctggtacgatggtaaacagattatgccaacgctagagagaacagtagtgaaagcagcctccctggccgagaggctt

SEQ ID NO: 7641 - DNA, 1530 bp, Arabidopsis thaliana landsberg
taagaaagaaaccaacctggaacagattcactggaggaacatatactatataatcagagaaggtagatttatttgatatatattagctaatacttgttcactttctctggaacaagcttgagatgctgcgacttgtgcatagcaagaccagtcatgacatccatattgatatcatctggtttcatcccattaggaagtttaaagttgaagctgaggagaaggttcgcataaggaacctcaagcatcgcggccccaagacgcattcccgggcacattctccggcctgacccgaacggtataaactcgtagtccgtgcctttgaagtcaacttccttctcaagaaacctctcgggcctgaactcatcagggttcggtccccattctttctcgtcacgtgacacggcccacgcgttgacgttgaccgttgttcctgcggggatgtcgtaaccggcgatcttggtatcttgaatgcaagcacgagggataaggagaggaatcactggttcgatccttagggtttctttaactaaggctctgaagtaaggaaggttcttgacatcgtcttcagtaacgaacgttgaacctttctctttcatatactctctcacttctgcttgagctttcttcaacacttgtgggtacttcattagatacgtcatcccccacacaaccgccgcagctgcagtatctgttcccgccactacaatatccttttggagccaaaaaaaaagaaaagaaggtgaaagacaagcaaacggtttcttgaagcgcaagcaacgatttaaaacatatttatacttaccaagatgacggctttgacattatctacagtaaactcagaagcgaaaggttgttctttgtagatccccatcaagagatcaatcatgctctcggtttcgggcttgactctcttaggatcaagcgtctcattgacaacctcttgaatataagtgtcttgtctttcgaaacactctttcatataagctgtgaggcctgataaatcatcaagaaagccacaatatgggaaaaaatcagagaaaaagatcttccccaaaacgctttgagtcccataaagaatcttgatgaacctcttcatctcttctccatcttcattgtacttcttcccgaacgcttgtctacacacaaccgagttcgtgaaggtcagcataagctcacttatatcgactacttcggatttatccgcggccttgttgatcttatccatcatcctcctagcctcttcctctcgtacatgcttaaaggtggccacacgtgttggtgagaacaagtggttcatccccatcttccttatctctcggtaatacggtgtgtagtggtttaatgccatgtcacgcctgccgtaggatatgaactcatggccacgatgtggaggccggtccgcaaagttgacatcttgcgtcttgagaagctctttagctagctcagctgaagatatcaccaccattgttctgcttcctatcctgtatgacaagattggaccgtattttttggcccatccagcgaagaagc

SEQ ID NO: 7642 - DNA, 2910 bp, Arabidopsis thaliana landsberg
gctgataagttgttttggaagttatgcgacgtcgtttttaagattgagaaagttcctcatgagcatctgcattctgattatgcttatgaagaaactgatgtttatatctttaggaagaaggtgaagaagaatgaagctgaatcagtgtcatgaagctagttttggttctgtaatgttgttgttacattgatatgtaatttgtttcttgttatagaattcgaattatctcaactatttatattttcttagatattggctactaaaagatgacaaaggctgaaatcaaatttttgtaacgatttttttaagaagtatacaagttttgttgtgtgtttttgaaatatatacaaagtaagttctcttgcccaaagaaatatgtgaagtaaccaacattgtgtttctatattagactgataaatttgttcacaaatgtatttgtagaactctcaattgggtgattgtatttgcgagttttattccacatagttgtggagcggttgcggttgaagaaccaaagttcggattagaaacagctcgaacaagccaatcccaaatcaaaccgcatacatacgtgatatggtatttctatagtgaaggaagtgtcagggtattactttcacctttcaatgttagctctctactcatatcataatctatggaaggaaaaacaaaattaaaaaataaaggaaaaaaaatgatctatatatcggacatgtaatttttagagcacacatattatcactagagaatcccatctaagcacatgttatgatgtttgtagtaagagttctcatatatatatgtatatggtgtaagacactgatgacagttctcatatatatatgtatatggtgtaagacactgatgacagtaaccaaatctgccgttttgagcagccacattcaacaatttatgaaatataatcaaaacctaaattgttcttgaaatcaaacttaaacacttccatctttctttgttctttgcataataaagctcttcatgagctattcaatttctatcttaatatttctcaagcttaatgggcatcagtctaatcttgtttattacaatttgaagttcatgatgattaaaagggggagctaaaccacattttctatatgctaaggtcgtagctaaagcatctagaatcattttcactaagaaatatattctctcttccaaactaacgtttactcttatgaagattggaaaatcagaagtaaaaaaaaatgaatcgattcgacgacaaaagaaattaataaacaggcttagttatgggctaatttggataatgggcctttatagaaccaaatcagtgaaaactactataaaaaaaagtaagcggttggatttattacatgaactgggcaacggtcaggtccaagatccaaacacaaagcgacaaaacacaagtccaaagaagaaaaaatatatttattttaaaattaaatttgataaatgcaaagcgagagaaacaaagagagagaaacgcgagccctgaatcaaactccctcgattttcacaaaaaccaacccaaagaaaaaaaagaaaagaatctgacaattcaccaaacaactctctcaaagtcttaaattaaaattttttgtcaatcaattcacaaactcaaatatctttttatttttcaatataaattttccaaggaaaaaaagaaaagtagaaaaaaatcatgattatgaaagaaacgaatagtcagaggcaaaacactgttgttgttgttcgttcgattgttgttgctgttcttcttctcacgatttcatctttctttatttcttttaatattaaaattgttctcggtttatattaatgatcttgtcgatattgcgagactaaaatgtttaatgtttttgattttatttgtgaaattcccaatcacattcttagtagtagagagagaaaggttttttctttttggtcttttggtggacagatttttattcttctttacttcttcttcctctttttcgtcaaaccataaacaataatccaaaccctttgttcttcagatatgttcttctcttgacacacacctaatctttctccaccaaaatttccgaccaagtctcatacttttgatctgtttttcaattttctcaataagcccaagtatgtatttttttcttacccctgactcaaatcaatttcatcagtttttgtgatttctagggtttccaattttgtggatttggggattgttgcagaaaatggaaggtgggtctgaaaaaacaacacctgaaggttgtggtggtgagagtaagtctaaacggaaaatgaaaactgctgctcaacttgaagttcttgaaaacacttattcaggtttgtttctgtcttcctccattgtttttatatgaagtttctgttttgtgtttttataagtgaaagttttgtgttttaattttattttcagctgagccttatccttcggaagctataagagcggatctctcagtgaaactgaatctttccgatagacagttacagatgtggttttgtcaccggcggcttaaagaacggaaatctactacgccgagcaaacgtcagcgtaaggagttagtaactccaacggctatggaatcctcggattcacccgtcaatgccggtgatttagtggcgggaaatgagcttgattctagaagagctgctcgaggcagtggcggtagtggtgtgacggttgtgaggcggtttaatgaaccgtcttctgctgaggttagagctattggttatgttgaagctcaattgggagagcggttgagagataacggaccggttcttggaatggagtttgatcctttacctcctggtgcatttggcatgcctattggtatataactactatacaacactatattttgcttcttagtatcgatagaaatgttgcttaattagctatat

SEQ ID NO: 7643 - DNA, 1600 bp, Arabidopsis thaliana landsberg
ccggaagaataataccaacaattaacaattgatttatagatatcctctctgcgtattgtttattgggggttgcattgagtagtttaatatctagtcattgtggattttatcctcgcagtaattagcgtgtgatgagaatgtaaccatttctatgttgaacagttgctatatacagtatcttgggatttgcgttaataggtctctgagagtttttttggtaaggaggagaaaagcatgttagggaccttccttgtacctttttgtgctcaaatgttattttggagctttctttgggtgggatatgtttgtgcacacacggttaacatccatgagagagtacatattatgccagtgatttatctgctgtcacgtttcactatattgatgatagtatatccagtcctcagaacccattaaccttgtttagtcttcttataatgtatcaggtttcaggtcggttatcagagcttaaaactaccataggtgctgggttggatcagcgcaacattcttttagagaccattggagataagtttgagcaatggaacctcaaggtattatcctctttggacctttgttctcgctagcagagtgctcattgatacttattatcagtgacagataaaatcaattatcattattaatcttcacctatgcagattcgcaaagaaaaagctatctatcacaccttgaacatgcttagtcttgatgtgactaagaaatgccttgtgggtgaaggctggagtcctgtctttgcagcaacagaagtgagttactttagttccatatagttaaaatgtttgcatatttattagtgccatagtgagtttaaagttttgcatctgcagattcaagatgcattgcattgtgctgcggttgactccaattctcaagttggatcaattttccaagtcctgaggaccaaagagatgcctccgacttttttccgcacaaacaaatttactactgctttccaggaaattgttgatgcatacgggtaagcatcttttctggagcttcatctgctgtttaggaaagaggaaattggaattaggattggtaataagtaacatttttataggattagcggatacttgataatatatctttgcctcttatacactcaataagatataaatttatgttttgatttcacctgtttctaactttgtattagcttccgttttcttaatatggaataccactgaatattttcaaataagctttttcgatgatcaattcagatgatagaaacaacctttcttgcttactttattttttcttctgcaatatccatttgtgttagtgttcgtctcttgaatttcatggatcttctttgatcactacattgcagtgtggccaaatatcaggaggccaatcctagtgtattcacaattgttaccttccccttcctgtttgctgttatgtttggtgactggggtcatggaatctgcctgctgcttgcaactatgtatttaatattgagagaaaagaaactttccagccaggtaataccctaattgacagcatctattttccgactgagcacagtataagattggtttctgtttcagaaaaaagtggtgtgcaaaatttcaaa

SEQ ID NO: 7644 - DNA, 3555 bp, Arabidopsis thaliana landsberg
ctaaacagatgtgtgcccccctaccccctctaggtggagcatacagaattttttatgccagcttgactcgaaacgatgtgaagccatccctgccaataggttttatgaagataacagctagttgagaagtcgtagcaacatgtcaaggttgaatgcggaattatgcggaattgaacacataatcgtgcaatgttacatgagcctctctctttctttttcttaatcgagtcggaggatgatttatcggtgcgacagcttttgaagttcattttcacggtaggtcgattagtcggacacgtcgctgtggaggttgagggaatcaaaggtgaaggaaaaacctctataattgaattttgattaagctcagggacgatcggaccaatatcggagggaagagatgacaaagcgagatcttgtatagcctgcatctttccttgggctgaaaccacatttgttgggccttgatgaagtatcgggcctgtaatagtgatgtccccattatcttcgaatgggccaattgaaattggagaccaccactctttttctgcttcttcgacgacagaaggtttaagtgatggatatttctgaaatggaaacttagtgttgcagaagaccacatctctggacacaaagaaatttaatgtctctaaattatataattgccaacctttttgaccatatagataaccacgcaaatatacaccgtctactttttgattcaaacttatcactattccgtctatgatgatgtgcataacacaagctccccccccaatcttaaatgatcaaatatgagttgtttgttatgcaggcgctcaaacagagtgatgtagctgagcactgaacttgaagttcgattaatcagattagtggtagtgagcacacactcaccctaaaaatcaatcggaagattggcttgaaatctcaattctcttgcaacattgagaatatgtcggtacttgctttctactcgtccattctgctcaggcgtcgatagacacaagcgttcatgtgcaattccttgctcttgaaagaatgtggctaaacacataaattaagatccactatcacttctgactgttccaactttagctccaaattgatgctcaattagagcaaataaattcttcaaatgatgaggagcttcagtcttatccgtcaacagatataatgaaacccctctctaagtaatcatccactattgttaaaaactaatgtttctctgaatgtaatggtgtacgataagtccccataagtcataatgaattaattcaaaaactcgttaaattttattcatactcaaaagaaaagaatatcttgtttggttggcacggagaaagatatcacacgccatattcaaattggaagaagaaacaaacaaaaattgtagctagtaacccgacaatttttgtagaaggatgacccgtccaactataccacaactcataatgattctcctcttttgttgtgactaatgctgcgaaagtgaaatgttcctactatcttgttcccgctccaatcaaagacctcgtaatgtggtcctgcaccacaagaaagtaatcagatatttgcaacacacattgatttttatccatcaattatgaaatgagactgaaactctttaacaaaaaaacactgatttcaattttaacttcgaactaagcttaaccattccttctttaacagatactatttctctaccatcagccaagataatcgaaactggagccatatctctcacatttgtcagtatatctaatttttctttcaaatgatgagatgctcatgtatccataatccaattggaaaaactaggcttacccgctaatttgtccgttatgaactccttgccaagatgaagaatatgatggatggaatgccattgattgtccgtgataccactcacaccatcatagtttctggtccatcaccacatgaaatgcctgctctattgtgtcctgatttaacacatgaacacgattttcataggtcgtgtttcaacgttctcttcttccactagagctagctacttcacgatagcgaccttttatataccaactccgagatctctcgccctaccactctgggtttccatagcaattgtcggatgaatgtccacatcgattgtaatgcttacacatcactccaatctccttttcatcgcttcgcatttgaaactggttctaacgtgaacgcatatgaacagcaccaacactcactttacgctgttcatcacccacgttagcaccattgcgaatcaaatcatcctctttccttacgatgttgtacccttttccaatggctgcaccggcacgcgagagatgagactagatcgcacagttcaaaacaaagtatcatcaagtccaaaaaagaactaataaaccttgtctttctcacgattttgttcttggacagttccaagatcacattcacattttccacacttacatgtacgtagaggtcaaaaacttaccatattgtcccaaattatcatcaacttgccatagtagttctcaatcgcaagacccctttgcttgcaacaagccaactacgctttaatttgctgcaactttggctcatttataataaaggaccatttcttcagatgatcccaataatccttagccagatctctatgcgagatatttgatcagagggcttaattaatggtcatctttatccaagacacaagaagtgcttgaatggtccaccagtcttccagatccggagatccatcttcaatttgttaaatcatcccatcaaggaagccgaatttctttcgagagcatagtgatgtcttcattctccatgcctactcatcgtaattattccctttcagcaagggatgggaattcacggcaccagagttgtcagcaaaggtcaggttcacggatgggttgtcgttcagatttcttggattttcttttttcaccattgttgatcagaaaagaaaaggaccctttttgtttttacaagagagcttcaagctctgataccatgaaatatcagaggtagacaatttttctgtgttgaattgtgaaacactacatacacgactatatatttgaaaaagaaaagatctggacatatcagatctttacaattaggaaaaaatatatttatacatctaattgtatggagagtcacagatcttacggaattgagataatactcacgcagcttcatgagcaagttattataaccaagctcaaacaattttgaagaaagttacccaccatttaatgagctaaaccggaatgtgtgtccaacgaaagaagattttccaacataacttgtatctgtcaaaatttcatatttctaaatgttttggtataaataattattcattggagttacttattttgttttaacggatagaaaaacaagttaaatataatacttgaattatttattttggtatttaaactttaaaaaatttctgaaaattattaagtttctggaaatttttcaaatttttttgaaactatccaaattacccaaaatatgtattatgaggttgaactttacccaaattattaggggatgaatatgaac

SEQ ID NO: 7645 - DNA, 1174 bp, Arabidopsis thaliana landsberg
agataggccccacgactatgatcggaagaacaattgccgttttgatcttgttttgcaactccgtgtctatattcagacacaaaggtttcagaattctcaagtttttcctcagaggaggtagggttttactatcaccgtttgtgtccttgctacatcccaggaatccacaagggatattagtaatggtgacgacgatggcctttctgttgaaccgctacacaagcttaaaagcaaaggctgagatggcttacaggagaaaattttggaggaacatgatgagagctgcattgacatatgaggaatggtctcacgccgcaaagatgctcgataaagagactcccaaggtgaacgagacagatctttttgatgtggagctcgtaagtaataagcttgatgaacttaagcatagacgtcatgagggctctcttagagacattattttctgtatgagagctgatcttgtgagaaatctcggtaatatgtgtaaccctgagcttcacaagggaaggcttcacgtgccgagactcatcaaagagtatatcgatgaggtctctacacagcttaggatggtttgcgacatggacactgaagagctttctctggaggagaaactttcttttatgcatgagaccagacacgcgtatggaagaacagctctacttctcagtggaggagcttctcttggggctttccatcttggtgtggtcaagacgcttgtggaacataagctattgccaagaattatagctggttcaagcgtggggtctgtaatgtgtgcggttgtggggacaaggtcatggcccgagttacagagcttctttgaagggtcctggcatgctctgcagttctttgatcagatgggaggaattttcactactgtgaagcgggttatgactcaaggcgcagtccatgagatccggcatctgcaatggaagttgaggaatctcaccaacaatctcacattccaagaagcttacgacataacaggacggattctagggataacagtttgttccctgaggaaacacgagccgcctagatgtctcaattatctgacttcgcctcatgttgtgatatggagtgcagtgactgcatcccgcgctttcccaggtcttttcgaagctcaagaaaacatggccaaagacagaactggagagattgttccttatcatcc

SEQ ID NO: 7646 - DNA, 2005 bp, Arabidopsis thaliana landsberg
  unsure (1)..(2005): unsure at all n locations
gaagatgtggttgcgcaaaatgtaagcttgatgtgtttttttctaagcttttttttttcgatttgcgggtgtttacttgctctcanagctccctcatttttagattgtagtccagaagggaagtaagcgaggagtacactttaggcgagcagggcctcgagaaagagtatgatttcttctttaaagtgttaaacttttgtgagatttttcgcaactgaaacctgttaagtttttggttatacaggtgtacttcagatcagatgaagtaaaagcttgcatagtgacttgtgggggcttgtgccctggaatcaatactgttatacgggaaattgtatgtggattgaacaatatgtatggtgttaataacattctcggcattcagggaggatatagaggcttttactccaaaaacactatgaacctgacacctaaagtagttaacgatattcataaacgcggtggcacttttcttcaaacctcaagaggaggacatgatacagcgaagattgttgataacattcaagatagaggaataaatcaggtagctaacataactgatttccattttgtccataatttttatgtagtttagtttgtattgaagctgagccatcctaatattttgtcaatgtgtatgtcaggtatatattattggaggtggtgggacgcaaaagggtgcagagaagatatacgaggttatttcatatcacatattactgaatgctgaatgtagcattagtaattctactgatacttgcttcatattttgtgaaggaagttgagaggcgtggtcttcaagtggcggtttctggcattcctaagacaattgataatgatattgctgtaaatacccattgataattttcaacttaaggtctacttttctctcatgtggagtttcttatacatcttcttcatccattgttctaggtgattgacaaatcatttggctttgatacggcggttgaggaagcacaacgagctattaatgctgcacatgtagaggtcgagagcgtggaaaatggagttggtatcgttaaactcatgggcagatacagtggtaaatattctgtgacatatgttgattactttcttttgtgaatacgaagttaacttgtggtacaaattctgcaggttttattgccatgattgcaactttagcgaatcgtgatgtggtaatagattagtttgattgttaaattgtcactataaactttctttatttgtggtgtctaacaatgggagctttgaaatgtgacaggattgttgcttgattccagagtctccattttttcttgaaggaaagggtgggctctttgagtttattgaagaacgactcaaagagaataggcacatggttattgtgatagctgaaggagctggacaggattatgttgctcaaagcatgcgtgcatctgaaactaaagacgcctcaggaaatagactcttgcttgatgttggtctatggttgactcaacagataaaggtattggtcgaaactcgaaagttaagaaaatggtttctatatgttttccctcaaacattcaagatgaatcttgtgaccactatgttgcaggatcactttacaaatgttcggaaaatgatgataaatatgaagtacataggtatatcttcagactcactgtctctatcttgttaacaacagttaacactcttctgtgcatttcattgacatgtacttgttgaacagacccaacgtatatgataagagcaataccgagtaacgcatcagacaatgtctattgcactcttcttgcccaaagtgcagttcatggagcaatggctgggtactcaggtttcactgtaggaccagttaacagtagacatgcttacatcccaatttctgtaagcttttctcttttacttctctaatcattcttagactaaaatcattgagtcctaaacctttgtggttaaagttaatcccatgattttttacttctgcagcaggtgacggaagtgacaaataccgggtaagttactg

SEQ ID NO: 7647 - DNA, 573 bp, Arabidopsis thaliana landsberg
  unsure (1)..(573): unsure at all n locations
ggggattcatctggtgtttcaacacttatctcaatgtcagttgtcaaaactgcacaaccacacaatttttggaatggtatcaaataaaagacgagctaaggaagcaaaaattgaattctcataatgcgtggagaaaccaaaatgaatcttaagataagaaaattttgaatggtattgaattagtttgtaatgagaacctttctcttccttcttcttcttctctcctttactcttgtgtggctttgttttccccgctttaggagccattaccaattcacataaaacttacaattctgaatttgatcaagaaaactcaaaattaagctagccttggattgaattatatccctaaagacttggcaggggaagtgtgtatttgaataagtggagatgaagggtgaggaagaagaagatagaaggaaaaaagaagagagaacggtgtgtgtgtgtgtgtgtgtataaatgagggactagtggtggtgacaatgaggaagtaaaaggaaataagatacgagaggcgtcaaatagtgatngagaaaatagagatagagatttagagagagagatagaaag

SEQ ID NO: 7648 - DNA, 1643 bp, Arabidopsis thaliana landsberg
tatgcggatgatgccttgggatccacgattcctcaagctgatttggtatggcggataatcctgatggctggtgctatccctgcggctatgacgtattactcaaggtcgaagatgcctgagaccgcaaggtacacggctttggttgctaaggacgcaaagcaggcagcttcggacatgtctaaggttctgcaagtggagatagagccagaacaacagaaattggaagagatctcaaaggagaagtccaaggcctttggattgttctcaaaggaattcatgagtcgccatgggcttcatttgctaggcactacatcgacatggttccttctcgacattgctttctacagtcaaaaccttttccaaaaggatattttcagcgcgatcggatggattcctcccgcgcaaagcatgaacgcaattcaagaggttttcaagatgtgcccgtgcgcaaacgctaatcgccttgtgtagcacggtacctggttactggttcacagttgcgttcatcgacgtcattggaagatttgcgattcagatgatgggtttctttttcatgacggtctttatgtttgctctggctattccttacaaccactggactcacaaggagaaccgaatcggatttgttatcatgtactcgttaacattctttttcgccaactttggacccaatgctacaaccttcgttgtgccggccgaaatcttcccagcgaggttcagatcaacctgccacggtatctctgcagcatcaggaaaattaggagcaatggttggtgcgttcgggttcttgtacttggctcagaacccagacaaggacaagaccgacgcaggataccctccagggattggggtcaggaactcgcttattgtgttgggtgtagttaacttcttaggtatcctcttcactttcttggtacctgaatctaaaggtaagtcactcgaggaaatgtccggtgaaaatgaagacaatgagaatagcaacaatgatagtagaacggtcccaatagtttaggtgatataatacgccttttgtaataattttcgttttttctttctccttgtctctagcaactcaagttgttctttgtgtaatccattgatacctaattaatgctagagaaatcaaaattttcatgagtcgattttaaatcagttcctaaattgaagatttattagacttgaagaagccgtgcaagttgtgcagtatatatgttaaatcacaatttatgcgttgcggggaagttgagaccacagataaaggcttcacttaaagatacattatggcttattaatctctagggtgaaaataacgaagtgctgaagaaaaactctgttcttttaacaaactcccttgcaccgaacaacattctcattgttcatcgacctatggaagaccaaaaacgattgctactttggtaaattttgtaaactttagggcatatgaaagcggtgggtatatattatagtttcacaatggtaagaaaaatatttgggatgttacagtatttttaggcatggtaaaaaggcccatattggacataaaaatatgtaatccctcaaatgaagtggaaattagataatttatttatttataaaactctgaatttagataatttcttatcttttgtttttgtaaaaaagaa

SEQ ID NO: 7649 - DNA, 868 bp, Arabidopsis thaliana landsberg
acgtctcagccgctgttaatggagtcgccttctgcggtacactcgcaggccagctcttctttggctggctcggtgacaagcttgggaggaaaaaagtttacggtatgaccctcatggtcatggttctttgttccatcgcttcgggtctatcctttgggagtaacccaaaaacagtgatgactacactatgtttcttccggttctggcttggtttcggcattggtggtgattatccgttatccgccacgattatgtctgaatacgctaataaaaagacccgtggtgcgtttatagccgccgtttttgctatgcaagggtttggaatcttgaccggggggatttttgccatcatcgtgtctgccgctttcgaggctaaatttccagctccaacctatcaaatagatgccttggcatccacggttcctcaggcggattatgtgtggcggatcatactgatggtgggtgctttgcctgcagcgatgacgtattactcaaggtccaagatgcctgagactgcccggtacacggctcttgtggccaaggacgcgaaactagcggcttcaaacatgtctaaggttttgcaagtggagatcgaagcagagcagcagggaactgaagataagtccaattcctttggcttgttttccaaggaattcatgaaacgccatggccttcatttgctaggaactacaagcacatggttcctactcgacatcgccttctacagtcagaacctattccagaaagatattttcagcgcaatcggatggatccctccggctcagacaatgaacgcaattcaagaggttttcaagattgcacgtgcacaaaccctaatcgccttgtgtagcacggtacctggttactg

SEQ ID NO: 7650 - DNA, 736 bp, Arabidopsis thaliana landsberg
  unsure (1)..(736): unsure at all n locations
caaagagcaagattcatataacccatcgaacacgccatattagttcttccattaagcaactcgtaactcttcttcatcgcggcgataccgtaaatcggttcaagaacagagactacactagctaaatgccaccaagcagtcatgtaaacatgaacacccaaaaacagaacgaaaatcacaaccatcgagaagacagcgagaatcacgctttgtaaatcgatagctacgatcaaaacaacgagaaacaacaagaagacagagttgtacacaagcatcattaaagaaacccaaaggaaggtaatgaacaaacgcttcaaaaccagaggaatcgctgacattgttgaagagaaagaaactggctttcccgtgtaaagcgaagcgacggtgaagacgacggcggctgttgagagaagagagaaggcgaagaggaagatgacgtagatgaattgataaatgagaagaagggtccattcgtgattggttttagattgatctgaaggaggagttgcatctagctgagctaagattggttgggtaaagagggaatgagcgaggattgcgaaggagagagggaaaattagggttagggttatgaggtagaaggtttttggggaaaatttggggattgttgtggattcacgtaatatgccttgaatgttgagaaattgaagctcttctgcagcgagatcgnatgctgagattagggtttgtagagagattggagaagaatgttaaa

SEQ ID NO: 7651 - DNA, 1105 bp, Arabidopsis thaliana landsberg
cttcccagaggtcttttatatgagcaacaggttattaaaacgtgaaaagaacaaaaacaaactttctctttgcataggctgtgtattctctgtgtgtttgtcatagggtttttttctaacggttgcttcgctcctttcgttgaatctgaggctgatttatcacaggaaacagctggctgaaacaaaatcaaagaatatctgcatcagcaaaagaagagaaaagtcatataatcatttcttaactgcagtcaccttctttgcaggaggcttggggagatcaacttgagcacatctttgaggaggatgtgataataacgttgacatacgcctgaaaacagactgtgcaagcccatgactgtcctcaaagatgtaaccttcatactccgaaacacgctctatagcatcaacaagagagtcatacacatcgtgagtacaattatcaggacccgacttgtcgtgcaggtacataacatccaatgtgaagagcttctggtttattggccaatcatgggttggtctcacggatgacctgcagtacatgagaatctgaagagcaaaatataaacgaaatctgtaaaacagattcttttatcacgctgtcgctagaagagatagtatttgcacaaaacaaaacttaccactctcaaaattcgattttgtgctctggaagttttggcttcctgagccgcttcctggaacagaaatgtgagatccgctggaccagaggatctagtagctgacatttctcttaaagaagcagcagcagatttagcatcgttggagaattcctttttaagctgaaacataaaagacctcaactttaacagtcacactagtgaagcttatgcaatacatcaaatatgattctctcaacacatttataagctaccatagtccaatgaacatcacgaattcaaaatttgacatctaaggagcatgcatactcaaaagcaaaagcaacctaacataaagagagctgggggagaaagtaagtcttacccaagcggctgactgggagagggtagcgaaagcaaagcgatgatcggaatttctggagagcttgtcgtggataaagcgagtaatggcttgcttgaggcactcgagc

SEQ ID NO: 7652 - DNA, 738 bp, Arabidopsis thaliana landsberg
ggcactttctttgcaagagacatggggatgtcaagatcatcttgagcacatctttgttgaggatgagttaacaacattgacatcggcttgaaaacagaccgtgcaagcccttgaccgctctcaaagatgtaaccttcatactctgaaacatgttctacagcatcgacaagagagtcatagacatcttgaggacaattatcaggacttggcttgtcgtgcaggtacataacatccaacgtgaagagcttctgatttaagggccactcatgggttggtctcatagatgacctacagtatatgagaatctgcagggcgacatgaacaaaatcagtaaaacatcgtttatttttcaggctgtggctagaggagattgtagtttcacaaagtaaaacttaccaccctgaaaattcggttctgtgctctggaaactttggcttcctgagccgctgctcggaagagaagtgtgagatccgctcggctagaggatttattacctgacaatcctctaagggaagcaacagcagattcagcatcacttgtgaactcctttttaagctgaaacataaaaaggcctcaagttcaattttcaaatgaaacaatcagcacagataatagcgtatagaggatctaaacaaaagtttcataaaccacattttgacatcatttcccacaccacgttcactagtggagcttatgttaaagcatcaaattgtgatttctcacaacacatctagaagc

SEQ ID NO: 7653 - DNA, 1020 bp, Arabidopsis thaliana landsberg
gcaccaatgatggttctttaatactggtcttctgtttagccacattgcgttgttttatgtacatgtcttaaccaattatctgggagatgcagtataatccatcaattggcgcgactggaaataggtcattcaataatcgtctggtatccagtggcatatcaggaaatgaatctgctgaagctctgatcggaagaaaagtgtggacaaaatggcctgaagataaccacttctatgaagcaattataacccagtacaatgcagatgaggtactatttttgttcattgagtgtagattgctaattgggtagatagatggtttgttgtccctgccaatttttatagaagtctctgattatctattggatttgcaatttacgcacttgttttattctcacagggtcggcatgctttggtgtatgatatacacgcagctaatgaaacgtgggaatgggttgatctcaaggaggtaatcgttacatgaacattatcttaatattctttgcctgtggttgcatatgttttcgtaagcgatctggtgtctgtacatactgatgatcttgataagagctgacattattattgtttagataccaccggaagacataagatgggatggggaggagagtggggtagctttaaacattggacatggaagtgcatccttccgtggcaacagaagaggccaaatccatggtggtagagggagaggaccaagaattcatcaaccaagaagggaacttgtaccgccaccaacacaacagaatggtagtggtgggcggagaacttcctctgatgatattgagttgttcaacacagactcgcttgtgaaggaggtacgtgtttttttatctgctgtatacccattaagctcaatgcctgctctaacatgaaatttttgttttaggtggagagagttttcgattctacgcatcctgatccactcgagctcgacaagcccaagaaaatgctcaaggtttgagattaataccttttgtatgtggtataatgttgtgatcagag

SEQ ID NO: 7654 - DNA, 1352 bp, Arabidopsis thaliana landsberg
atgaaagctacctccaaaaacaaatgtaactttacccaaaagacattcttggcagcattttccacaaaaaacttaaaaacctaataatatcaaaaactcgtgaagattacctcattaagatcaacccattcccatgtctcattcactgtgtttatatcatataccaacgcatgtcgaccctgcgagagaacaatgaatgcatcaattacaatatacttaagctatgttcaacgctaaatacagttccaaacttctagatatatcaaagtcatagtatacttttcaacgcctcatatgcacattaacagtaaacacctcctttcttcaattcatcaagaactacactatagagagacttgattaactagagaagtctttcgacaaatgcctaaaccatgatcctagactaatccagagtaccccggctcattctgcctaaactagtgagctatctagctaagcgattcaactagttgcttagctttctacacagttacaatcaacctaaagtaattgcaatgctcactcactagagtaactctgaactaaacggtaaatttcgatcaggctttgaggccttggagtcagatattcgaagtacaggagacacctcgacacacaaacatatataatgctgaacatatgaatttctgattcaatctcaataaaaaggtctcagccatcagaagttacctcatttgcattgtattgtgtaactactgcttcataaaagctgttgtcttcaggccattttgtccacacttttcttccaataagagcttccgcaggttcatttgctgatactacacggttattgaatgacttacttctagtagaaccaatcgacggatactgcacgtgtatcacaaatgatatgatcagtaaataaacagaaaaccatatgcaaatacagatatcctctgcttgttgttctatgaccaaagattaaaacaagaagtcttacggattggaacgtcttctgtttcttccgagaagctgaaaaagtcggactaggatgaacatcgagggactgatgtctaacaacctggtttccacctcttggtctcgaatctctgttggtccagttccatcatacaacacattattacaagatacaacgaaatctagattcatagctttactatcacaaatgatcagactcgttaccttattcttttgataagatcatcattatggacattgttcaacagttgtcggttttcatcatcagatatcctcaattctttacgtaggtttgtcatcacggttgctttatcaaataaaatgaaaccatataagccaaatcctttgtcttttgatggcaaaaggaagaaataggactaacccaagaa

SEQ ID NO: 7655 - DNA, 2029 bp, Arabidopsis thaliana landsberg
aaaggagtttaacacaagtgcctgcggagagataaagaatctcgtttttccttggataatacttgaaatgtccttgtgattatcatagaagacaatatttccttgcttagaaaccgacaccggggtgaaccacctgttccgcctttcccgggaagcaactctattctctaaatctatggagtaagtcttggtccatgtttctacttctgtatccatgctccaaatctctagtttccattcagtcttagtataggtattggctatggccaggcggtcctcaaggttcactatttggaaggtttcttgcgtgacactcatatcaggaactgaaatgttatgtaactcttctttgtgaagatccaaggctagtattgtccaagccctctcagtaggtttgtgtaaccagtagatcgatccattcgcacactccgattttcttacctcaaagaccttataaggaggtggactcaacatccgccattcaccagtttcgacatcaagaacactatactccacctcaggatcacgtgcacaaatttcactgaaagatattaaacacatcttcactactttatagcttccggtaactttatctttaccaaatcccattgcccaatgtcttggagagaaagccgaacctactccaaatatggttccaaatccgaatccgtatcgccggagttgccttgtccaggggttcaaaacgtctatccaacgtggttcgagaatgcagaccaaaccgtcgcaagtaaacgagggttgtgcggcgttgcagtgcagatagacgatctcttcgttccctttgcactgcgacgacccggggaggagcctaggctcccagccgcatttgcagttgtaagcagccaggattttgcgcttcttttgaagactcattcgtctctccacgaacgtcttcgactcaagaattgatctccatcgttttgagacgcttttcgatatgagaatggatttcaagggaagtcgaaggaatatatcttctagaagatcggcaactatgtagatcgaactagggtttttctcttcttcctccattcttggtgactgtttgttttttgattttttgtcaatctttctgttagaaacatcgagagattgacattttaatatatttccttattggcaaataggtgaatttttattaaacttgtgaatcaagttatgtttccatagagttgtttgattgtataaattagactgctcgtagatatttatccaaaatattgttattaaatgggcaataatagaatggtgattacaatgtgtttctttacacaacaaccaaaccaaataagaacaaattacaaataagaattcctttacaagaaaatatacaaactttaaatcaatatttaataacaaacaaaattaagagtattaatcgaatatctttgtgtatgtattgtctttaaaactatgagtatacgacccgaacaaaatccagttctaccatgggacaggtgacgatgtgggtgacgttaagctgcagattagataaaacaattctgttaataaaccataaatataaatcatatactatgttaatcaatgcggagatagatcttactctaagaaacttttccagcaagaatcacttgtttcatcatcaagaaacttctcccagtcctctaggaaatctgaaccggatgagtgttgagctgtactgggatggttcaaactggttgtctcgggagagaccgataccgaaccagtagatggggtttctagtagttgatcaccatagtaacacggcatcataccggttctgatatgatcatttaccttggtggtcgtactggtacccggttttgctgtatttaaactctcttgagaaaccgtaaccaaaccaggaagctggttatcttcaaaaccatcccaaacattttcataagatggaatgaaatccgaggtggcctcaggagtgattccactctggtttatgaaaagaccagccgggggatccggtttaggattcactgaattggtattgaagctattgactaccggtctg

SEQ ID NO: 7656 - DNA, 3121 bp, Arabidopsis thaliana landsberg
tgcatattcaggtatagtactactaatgtactatagtagtattaatttattatttctcactgaaatgattactccaccagataatttaaatcttccagagtatataatattcgcatttcaagatagatctgaaaagtagggcctgcgtagactccgccaattttcatttttcagatcctaaaagtctaaatgccgagccaaagattattttgttgatttcttgttaatcaacgaaaaaaaggagaaacaaataaaagagatgtcattcactttagtacttattagcgtctgtagtttcaagtgtttttttcttccttatatatcggttgaaaaataagcttaggaaacaaaatagaaattttagtaattgagtcatcaatcatcataaattgtgaaatctaagcgctataaggagacaattgttaaccttgtttagatgaatttttgtgtttatggtgaatcaatctttcatggttctttcatcattaggtgttcttaattaataatactttttgtctttattaaactgtcttaagcacttggttttgcaaaataattgtggtgttatcttgtagtttgatctcaaaatactatttcgtataaaaagtagctttgtttaagactttatactgtcaaaaagaatttctttttcttataaattgtacaatttcataattgaacctctataattaaaaagaacgaaaatcgaattatcaaaatgagttgaaaataactaaaaaatacctttttcaaaaataagaactactaattattttttttgtttctatgtttaataaaatgaatttattttgtactctgctaccggccgctaacgttaaaacacagcaccatatatagaaaatagtacgcgtgggccgaaagcaatgccctgatgtgtctgtacccgcagacgtttagattccttttccagtaaaacacacaaaaagtgttgtttccaacttcccataagttaattcatcttagctttcttaaactatttaacgaagttatcatatttttaattgtgtagaagattcgaacttatcacatactccgttgataattaaaaatctgaaagagcaaatgttactagattacatactggttttcattcacaatctcaaaatgtgatcgactaaaacaatctggttttataaaatatagttcaaaaaagattttagtttttcaaaattggaactgatctcgaccattgtagtttgtgtgccaatctgcagttacttgtcacatacaaaacaaaagtagcatacattatttgacaagtctgtctccgtccagtccaatttatagtgttactgtgttagtaatactaaacgaaacttgattctatgtttttccaaatcgaaaaatcaatctggatcacgtaacttgattcaggttcttgtaaaactaaacgtccccaataacattcatgatcatacatttttttctccgcattcattgaatttacgtatttaaacatatttaaatgaaaatattttcagaataattacaaaggacatatcaagttttgtatacaatggatgagaaaaagtcatgagacacaagttacgaaatatgccaaattcacgtgtatttacgtcatattctttttaaaaaaaataaaaactaaagtttcattagttgattttaaatataaaacttaatgaattttcatttaattatacataaaattcatttccttgcaaaatagaccagaggctgatttgacatcttatcaagagtaatataatttccttaaacaggaactaaaagtgttcaatttgtttctcttaaaccttgttggtattccaaatctattttgaacattcacggatcaatcatcatctcgttcacaaatcacagattaactataagagagacaaaaataatgagaccaaaaggacgatccaatcgaagtcccagtctgcgttactctcggacacatatagataagatatgtccacatatcataaagtaattttgctttagcaaaccttcattattatataatactaatccaagtgtaaaagtgtacagatatagaaagtaagcggggtccgcactcaatgccatgatcatgatgacatcatctgatctcataaaacagtacaacacaaaaccccaaaacaacttcttgtgactctctacgtttccttcgtcttcttcttcttctctcttccctatatataaaacccttcatgttgtttagatcaggttaagatcattttgagtctctccaaaccctaatatcaaattctcatctcataactaacaaaagcatcccaaaatttctagtaaatggcggaggaattcgatgaatctgaggtagtgttctccgatggtttaagctccgttctccataaagagaacgagaatcgcctgtttggttctgatatggagaggaagaagacgaggcggatcaagaggacgacgacggagaaggcgtcgttgtcgagctcgcttccggtgagtatccctgagaacatctttcggaggtacgttgggaaagaggaggatgaatactcagaggaggaatattccgaaggaggaggagagatgattccgccgcatattatgatcggacggaggatccaaggaggacaaatggcgttttccgtttgttcaggtagtggaaggactcttaagggaagagatctgagccgggttcggaattcggttcttaggttaaccggttttttggaggcttgaaccgttaccggtttgccatacttcatcatcttttcccaactcttttgtttttttgcatattacggaaaattgctagtggatccccgtgttgtttatttaagtaaagggtggggaaaatgtgaaacaaagctttctccttagtttttgtttttccatattcttttgtttttcctaaattgtaataggaaaaaaggaaatttcgggttaattatgagaagaataacaataattcttgtgttagcattgataacgcaaggcttgtcgagtgtatttttgggggggcttaattgcaattatcacagtgtgatccatatctccgccttagggtgtacgtagggcagatgtggacaaaagccaaacagtggcagctgttctgttgtcattgaccgtgacagtcagtgagagagcgagc

SEQ ID NO: 7657 - DNA, 2122 bp, Arabidopsis thaliana landsberg
tctatgaacgaaaagcacaaactgctatgtattccttacgattcgctttttgatgcatttaggttttatgcaagagggtccggtaacttgttgtctgatatcaaagttttcattttgggaagtgaatgttaaaagattttctttatatgtaaatggattcgtttgtatgaaaaaggttttgaatgaaatgctattgcagtaattgactctttccacttttggtatagcagagaattatcacacaaggtcactgcaaggtgtgtacgagagggctaaagtaaatggtgttgttgtgatattcatcttatttttgacagcttgaaatagaggtacatgggagattaagttgtactgtcaatattttacaagctaatctaagctttggttagtacttttagtccaaatgttggttcttatttcctttcttcttactttgacaggagtttagcaatgcaaggagttcctggatttaatactgttccaaatcctaaccattatgacaaatcaatagtgttagatattaaaccgttgcgaagtttgaaacctgtttttccaaatggtaatcaaggtccaccttttgttggttgtccaccttttggtccttcctcatctgagtattcttctttcttcccatttggagcacaacaaccaacgcatgatactccagatctcaaccaaactcagaacacgcctattccatcatttgttccacctcttcgatcgtatagaacacctactaaaacaaatggccccagcagctccagtggaactaaaagaggtgttggtcgacctaagggaactactagtgtgaagaaaaaagagaagaagactgtggccaatgagcctaacttagatgttcaggtagtgaaaaaattcagttcagattttgacagtgggatcagtgcagcagagcgagaagatggaaatgcgtacttagtaagtagtgtattgatgcgttttgatgcagttaggaggcggctcagccaagtagaattcacaaagtccgctacttctaaagcagcaggtactctgatgagcaatggggtgcggacaaacatgaagaagagagttgggacggttcctggaattgaggttggagatatcttcttttcccggatagagatgtgtttagtgggtcttcacatgcagactatggctggcattgactatataattagtaaggccggttcagatgaagagtctttagcaactagcattgtttcatctggacgttatgaaggtgaagctcaggatcctgagtcattaatttacagtggacaaggcggcaatgcagacaagaacagacaagcatctgatcagaagcttgaaaggggtaatctagcattagagaatagcttgaggaagggaaatggagtaagagtcgtaagaggggaggaggatgcagcttcgaaaacaggaaagatctatatctatgatgggctttattcgatctcagagtcatgggtagagaaagggaaatctggttgcaacacctttaaatataaattggtgagacaacctggtcaaccacctgcgtttggcttttggaaatctgttcagaagtggaaggaaggtttgactacaagaccaggcctgatccttccagatctcacctcaggagctgaaagtaaacctgtttcacttgtgaatgatgttgatgaggataaagggcctgcttattttacctatacctcctctctgaaatactcagagacctttaaactaactcagcctgtaattggttgttcctgcagtggttcatgttcaccaggaaatcataactgctcttgtatcacaaaaaatgatggtgatctcccttaccttaatggggttatactcgtttcccggaggcctgtgatatatgaatgtggcccaacgtgtccttgtcatgccagttgcaaaaacagagtgattcagacaggactgaaatcccgcctggaagtgtttaagaccagaaaccgcgggtggggtttacgttcgtgggattccttacgtgctggatctttcatatgtgaatatgctggtgaagtcaaagacaatggcgaccttagaggaaaccaacaagaggatgcgtatgtctttgacacatcgcgtgattttaacttggataaggggaattatg

SEQ ID NO: 7658 - DNA, 1443 bp, Arabidopsis thaliana landsberg
ggcattccaacaattccaatgaacgagtttcattcgatcaaactaaaatatgtgttacaatttctccatgtgtttttcgacaccaacgagcgggtccttgttgggaaaagtttcaggtttttctgctcctctggtgggaagtcgaatagtttcaggattttctccttgctggagtaaaattttggtaaggaccgttttgacctcctcgacgatagaagtgacaaatacactatcaggactgccagacaaatgagagaattaaaatcatgcaagtaagaggaatttagaaactttaacgacacttaggtcaagatcaccgattaaaaagtagcattacccttcctccttcaaccagaagcgcgtcatggtctcatggctagcaacagactccaatgcttccttccattgaatgatatcgtggtcccgatgaagcctccacaaattccaaagcttgtcaccaaaatctccattcagctgttgcacctgcgatggctccaccttgtagaagattggaatgactttgagtttgccttcatccctaagtttttggattttcaccaactcgtctaagcaccatcttgattctgagtacctgcttgaaaacagcacgagcgcaattttggaatcctcgatcatcttgaaaagtttgccaaaatcttcacccctcctctcatttttgtctataaataagttggccccttcccttaacaaggcagaaaccaaatggcttgcaaagctgaaaccgacatcttccccttgaaaattaatgaacacttgatgttgcggtggtggtgcaacgtgtttttggtaggtcgcgatggtagagctttgccaatcttttccatatttgctctcaaagctattctgtgaatttcttatcatcagaactgcatcggagtttgctttatcatggaatttcttatattttcttggattcagatcatcatcccttcctgatttgctatacatttttgcttcacctcggacaatctcagcctcttctggaattgcaacagccttttcatcctggagaagagcgtcagcatcattgaccacactttcccactcctccgatctaaagtaatgagcgtccataaacgcatatttccgctggacatctttttgctcctcattccatatcactctcttcacttgctcgataatgctagtgattaactcattctcatccctgcaaagggataaaagaaaaccaataagaaacttcaaaggccttattaaggatggacgaaggaccgtcttagacgaagtgtgcatttgcacaggcgagtgaaaaatttaacaaagttgatgctattccatctgttttaatttataagactttctagataaaaaaaaaaaacaataacacagagattaaaaagtggatgatctgcttctttatctctcattttgcatacaccatccatcgaccatctaaaagta

SEQ ID NO: 7659 - DNA, 513 bp, Arabidopsis thaliana landsberg
taaaccgtcacgtaataactggtcatgtggagagaaatcgtggtgtcatagtttctttttactgtttattgaaccgaacatcatgaccggttattaaggtgtatatgggattttgtgtattggactcagttacgtggtaatgactttgtgcggtcgtgaagtgggattggaatgttattaaataattagtttgaaccattcatatcacttttgtatataattttttttagaattggttcttctaagctctaaataaaatttaatgattgaaaaaaagagattggtttaattcttaaaacaaagcttattagtttatttagaaaaagaccaagtcatcgtttagtcattatactgagatttgaaatggttgggtttagattaattcataaatattaatgatggatattgattactggattaatctttgtcaggtaatgcaaccgttgtagatggagaaatatgtcaaccggtctccgttgttgctagtttttaaccggaaaatctaatcgattg

SEQ ID NO: 7660 - DNA, 2444 bp, Arabidopsis thaliana landsberg
  unsure (1)..(2444): unsure at all n locations
ttagatgataagatcttcacgggttaaaagatcttcgactgttcaattgaagacaagagttgaagtattcttgaaacataaccagaccagagaatcgtcttgtgatttcacaattaaaggtcggtttatgaaacgtgcatgtactatctatgtcgcagactctaccaaaatcatcgctcaggtataatcaaacaaataaataagtaatgcgataaaaataactcgaatagattacttacacatatattatacaggtatatgaaggacatgagagattagtggctacaatttatcctaatgtcgactatgcttttattgttacacttatctttatatttgacctcattaatatggggactgggatctgataatagtttgagccttgaaggcaagtgttgactttttataccttgtttattgtatgtgtatgactcatgtgtgttttgccaatgtttgttacgtgaaagcaccattgttttgagttgcttaatgtgagaaaagctgttgcaagagtgtgtaaatctttctgtggacttaattaagtatggttgtttataccattgctattagtatgtcaatctttatcgctgttattaatcaagagtaaacgatttataaacacaatgaaagcgttgaaaataaagagaatattttctgttatcatttgaaagtttacacacaaggcaaagttccgcaaaaacatacaacacattattttcaaaatgttgttcttaaagctttatcacttcctataacctgcttcttggtactggtcccatctctttggccttggtcctcagaatatgcttctgaatttttccagttgctgtctttggtaacggcccaaacaccactgactttgggacccaatatgccggaagcttctcccggcagaatttcattatatcctgagccaacttattctggtcatgcttctcgtaatcgctcttaagtgtcacaaacgcacacggagattcttgccaccgctcgtctggcctggccacaacagaggcttcaagaaccgcggggtgatggtacactacgttttcgacttcgacactgctgatattctcgcccccagagattataacgtcctttgacctgtccttgatctcgatatagttgtctgggtgtttcactgcaatatcccccgagtggaaccacccaccagcaaatgtctctttgttcgcttccggattctttagatagcctttcatcaccatattccctcggaaaacaatttctcctgcggtttttccatctgcaggaacaggttttccggtctgagtgtcaatgacatcaagctgctccatgccagtatagcggacaccttggcgagcattgagcttggcctgcgtctcaggagggagggaatcccactcgggtttccaagcgcatacggtggaaggaccataagtctcggaaagcccataggtgtgagcgactcggaagcccttctggttcatggagaagagaacagaaggtggaggagcagctcctgctgtcatgacatggactgtatggggaagaggaaggatagtgtcttctttaggagcattgacaatagcgttgaggaccacaggagctgcacagaaatgagttaccttgtatttggctatcattgaatacacttccttcgccgtaacctgaaaccaaaatttaatcagctcttcttctgatttatgtgaacttcttttcttaagtgaaaagtaactctctcaagtactacctgacggagacagatgcttgtaccagagagcacagcaagggaccaagggaaacaccaaccgttgcaatgaaacatagggagagtccacaagtaaacagcaccatcttgcatcccccaaatgagaggattgctcaaagccattatatacgcacctcgatgatgaagcaccactcctttcggactagcagttgttcccgaggtataaccaagagcgatgctctgccactcatcagctggtggctgccacggataatttggatctccggttgcaagaaaatcctcatattctatagctcccttcgacaaagcccggttaagtgactcaggagcacaggtgtgatcaccaatgacgattaaaagcgggcgtttgaagctacttccagctttctcctccataagtctcaaagaatcctcagccagagtaaagaactcctgatccaccattataacagagctctgcgagtgactaagaagaaaagcgactgttggggcattgagacggatgttgacacaattcagaacagctccacacattggtactccgaaatgagcttcgtacattgctgggatgttaggtgcaataatagccacctgaaacaataataacatttctggtctagtgaaattactcagattgcaagaagnccaaacaaccaaaccaaaacattgttaattaaaaaaagtcaacaaacatcaacatcaccagtggtcgttc

SEQ ID NO: 7661 - DNA, 712 bp, Arabidopsis thaliana landsberg
gtggggttcaggatgacgttggcataatcgccggtgaaaacctctataaaactttctctcactctctaacgaatcttatgatattcattactatcaattctttatataatatctaaataaatatacttatataaatacatgtatgtatggtgctggtgctctacagctttcttcttgttcctacatacccatcttccctcacctacatcaaacctagggtttcttaactatatcaacaacatatataaatttatatataggttgtgatttattgaagatcataaagatcaaaaggagagaggtattaaaaaatgatgtgtagtcgaggccattggagacctgcagaagacgagaagctaagagaactcgtcgaacaatttggtcctcataattggaacgccatagctcagaagctctctggtcgatctggtaaaactgactttatattaaagtcatttctttaatttcttacaaagcatatataaactagggtttaatatatttatataacaatatataaaacaggtttgattggatcttttggtttcaggtaagagttgtagattgagatggtttaatcaattggatcctaggattaaccgaaaccctttcacggaggaagaagaagaaaggcttttagcgtctcatcggatccatgggaacagatggtccgtgatcgctagattttatcccggtcgaaccgataacgctg

SEQ ID NO: 7662 - DNA, 1421 bp, Arabidopsis thaliana landsberg
acgcataattgactatgaaatgtggcttaaaatgtgtgaaaacagtgagaaagcatctcaaaaattaacaacgtaaaaaatagtttacttattatgttttcttaaaaccttacattaagttctagttgttgaaaattccttataaatatgtcaaatatgtcacgtccttacgttggtcgatgccaaaaaatatgacgagcaaaagttattaactagtataggtttatacatatatatccgtttttacaagcaaaaatagttatcaaattgtctttaattggttacttttaatattttcactaggagcaaaactgataaatgaaattgacaaatatctagtctatatgcataaacacgttacgcatggatgaacaaaaataaacatgtttagatgaattataatgaacgtgagttttccaacattgaacatgataccgaaaaagcttattaagaacgttactgagaatcaaatttacacggaaatatataaacacattaaagtaaaaagaaaagttaaagtggaaaatatgttgtggggtttgcaattggcaaccgaccctaaatgctttttccagcttcttttacataattttaatctctttttgtctttcttacaatttcatcactgatcgatcgaattcaaacccttatgttacgcttgttttttatataactgtctcttcatattctcactccttcttctccctcttcttcctttttctctcttaagtgctataaatgttcatatttgtttctagctaagaagtttgtataaggcagtggacatggctcctgtttcaatgcctccaggtttccggtttcatccaacagacgaagagcttgtcatatactacctcaagcgaaagattaatggtcggactattgagttagagataatacccgagattgatctttacaaatgcgaaccttgggatttacctggtatatttctctctttgcttcttttttttctttttcataagatgcaaatctatcattttttttggtcatccgcaagtatttaccatggaggaaggtataaatttatgattctgcatcgttagtacatcaacatgttgtgtctcatgttaaagaaattttaaatgagaccataccatagcaaccgaaggagaagactctatctggttcttttctaatatgtcataatcatttgattgatatgcttagtgtaagatcatttttttttggaatttagtaagaataacgaaaaatagattcatttttctgaaaactacataatgtgaaactaatgtttgaaagggtaacccttgagagaagagacacttgacgtcctttctttttcgaagatagatgttctttccctctttttccttaacataatataattcccattttatttcacatttttacgtaccaagttatgtatcttttgtcacgca

SEQ ID NO: 7663 - DNA, 998 bp, Arabidopsis thaliana landsberg
  unsure (1)..(998): unsure at all n locations
aagacaacagaagaagtaaaaaaagtaaaaagattgcaaaacagtcggaaggttgaatggctgagattaatcgaacgcttcaatggcaattatttccggccatcactttcttctctacttctttctttctctctctagttgttgttctctctctctctcgcatcctccaattcatcgtcctcacgttcccttttgtttattcatcttccttccttcttcacatttctgattttctctatttggggggtttgtttccacattatacatatctagggttttgagatggttaattgaaagataatggtcgaagtttcggaggaattggcttcacattgtgggtgtttctggcttcctcaggtttaaatctgaggttgatctcttttgttttttggtaaattgtgacatattttggctcgaagaagaagaagaagaggcaatgagcgcatcaaggttcataaagtgcgtcaccgttggtgatggagctgttggtaaaacctgtttgctgatttcttataccagcaacacctttcccacggtattcatcaatcattctccctcctttttttgatatctgattcatttgattctgattgtgccatatatgaattgggatccatacatactaaaaatgttgtatacatttccattggaacaggattatgttccgactgttttcgataactttagtgcaaatgtggttgtcaatggggccacggtgaatcttggattgtgggatactgcaggtaaatgaannnnnnnnnnnnnnnnnnnnnnnnnnnnnnnnnnnttccgtgatgaatcagaggtcgaaattatgtttttggtttatgcagggcaagaggactataacagattaagacctttgagttaccgtggtgctgatgttttcattcttgccttctctctcattagtaaggctagttatgagaatgtttccaagaaggtcagttttgtccgaactggttgatttttaacaatgagagttccaaatttgatgc

SEQ ID NO: 7664 - DNA, 601 bp, Arabidopsis thaliana landsberg
ataagagataacgcaagaatgaaaacatcagcaccacggtaactcaaaggtcgtaacctgttgtagtcctcttgacctgttaacaaaccccacaaacacaaactaagtcaaaaacaaccgaaacaaaaggaaaatcccaaacggtgaaacgaaagaattaccagcagtatcccacaatccaagattgacagtgttgccatcaacaaccacattagcactgaagttgtcgaaaacagttggcacataatcctgaaacaccaatcacaagtcacagatttacgcattataatcaaaatcatcctttataaaaagcaaaaacaaaacacagtagcttcaagatcaatactttggcctagattctcaaagtcttaaaacaaaaaaagttgtaacgaaattgatcaatttctagtgtacagctccatgacctaaaatctacacctgaatccaatttgcaaaaaccttgcagatcactaatctactcttgcaacgagctcaacaaaaaaagaagaaaccgaagagatattgaaataggagaggaaagatttacagtagggaaagtattgctagtgtaagaaatgagcatgcaagtttttcgacggct

SEQ ID NO: 7665 - DNA, 659 bp, Arabidopsis thaliana landsberg
ggtttaattatagaaatgagcgcttcgaggttcataaggggggtcaccgttggcgacggagctgttggtaaaacctgtttgctgatttcttacaccagcaacacttttcctacggtataatgttccttccttagattgaatcatattctgtgttctgtgaattacaagcttcaaaattgtcttctctattgattgatgagaccaaagcttgtggcaatacatgaatcgatccataatttttttttggtgttatgaggatttgtggagctttgtatctcattgaatcttgtaaattcatgtggaacaggattatgtaccgactgttttcgataactttagcgcaaatgtggttgttaatggagccacggtgaatcttgggctatgggataccgcaggtactgactaaataatagggatcttacttagtagtagcggcagctatgggatttggggtctgaaacttttgttttgttgttgtaaacagggcaggaggattataacagattaagacctttgagttaccgcggtgctgatgttttcatcttagcattctctcttatcagtaaggctagttatgagaatgtctccaagaaggtacgtttttgaaatgaatgtctgctacaagttttgatatgaatactgaagaaagtcttttggtt

SEQ ID NO: 7666 - DNA, 716 bp, Arabidopsis thaliana landsberg
tttattgacgggaaaactataaaggactcacgggatgtcaagtaagcaaagagtatagctacatataatactattcattgcgagtcgagtttacctcgttatctgcaaggccatacaaagcaaaggcagcattgtgttgcacagaccccgttttcacatcaagaagatttagtagtgagatgatgcctcctctatgtgcaatgccagcttgattgtgtgcgtcctgcaacattcaaaacatacaatttttgttttatcacaaaaggtctgatttaacaatcatctacaaagagtcagatattaaaagcaacaaaacattcacatgctaattcaaaaacatatatacctgagccaaacgaccaagagcaaaagctgacatttccacgacctgctcatctgatgattcaagcatcttaatcagtggtgtaatggcacctctctgggcaatgtgcacctgcatgatcatgttgccagttatgttaaatatgttctctctagttagaatccattcagttatatcgtagaaaaaaacgagtttgagtgaacataacatgtgctaatattatagtacaacaagaaagagacaatcccataccttgcaatctgaatcaggcgcagcaaattgacctattaataatgctgcttctctctgtgtttccaaacaagtggagctgtagcagatatcatgaaaaacagttacaaaacataattcaaaa

SEQ ID NO: 7667 - DNA, 2382 bp, Arabidopsis thaliana landsberg
  unsure (1)..(2382): unsure at all n locations
atcagaccaacaaaaactctcacaacagtttgattcatctaccaagattatattatctgctagacttcatagcttggttaattataattacagtcgtataggaaacaaaggcaaattctttctcattcgatgaagccaactaagttgtgatgagaacatctagaatctagtttcatcaaaaaaatctagtagttgcatactaaatgaaaagtatcttgaaaattgacaagtttactataagacgcaaaacagcattaccaggcgattactccagtagcaccatggcgcataaaaattaacaaccaaaatttgaaaactgcatcaagaaagtccaatttcattaattcatctttaagccccttggacaggtactcatatatagtatagtatacacaaaatagattaagttgccaacttactgatgtgtaaacttctcaaaagcagcaccagttaagggtatatccgcataagtactattgtcaccatgatcttcgtctccatggttgatgagatgtaaatcagaggtggagtgaaattcctcagcagtggctcttaaatgcggatcaattggaacttttctaatcgttttcgatatatttaacctgtgctgaagaagtttataacaaaacttaaacataggaaatgacataatcattgtcattgcacaacaaaagttaaacatcctagcatgagaacttataacatacatttgctgtaacaataaataatgtcaaaacttttgcttttttttctttccttttgtgtttataaaacagctaagagacaatgtatgcacgcagtgcaaaatgggatcttagaaacagaaatacttagaattggaaaccgaaacttacagttccaaacacgtcactcacgtcaactgatgcgaattcacatgagagggcaggaaagctacaagaaataagtcaaaaccaaacatcaatttatgaagacaccgccactattgtagagagattgaaacacaaacagacaaaagaaaagaacaatggcatgttggcattgtttattataaccaatactaacacatgaattccatttacctgatgttaaaatcaatgtttaagaagtccccatcagagcttttgtcaactattacagatgtgctagtgttaatagccaaataactactcagctcctgaaagttaaataatcaaccaaaatcattggatatacggtatttttcacttacacagaggaagaagcaaaagatacaagaatcagaaaatatgagattgtgaagaagaagaagaagaaaacagggcagagattagtttactaccattccaaacaaaaacaacatagcaagggcagctacaatggataatccagcaccagagagagatgcttcagtcaaatctcttgggattttcctgaagaaacaaatggaactcaaattactctcagctctaactccagacaacacaaacacacaattcacagagtaattatccgtaatccgatgcacagttcatcatcaagatgaaaaacgagaagacagaaccaatttcgaattatcaaaaaggcaaaatcaaacacatacagtcgaaaatgtatagaaaggtacaaacttttgcaagtgcgtcaaaaaccattatcgagagaattatcattggaattgttacacgaaagagggttcccacctgtagaaatcaacggacttgatcttggaggttgaaaccatggctgtaacaaagaagaaaggattctaacaaagaaaaaaacagatcttgacaatgagctctctttctctatctctgtatctaggattttgttcttaaagccgccgtgatcccactttgcttaactatgggaactctacacgaaaaagctcaaaaagacagatttttttttggcaggaagaattctaatcctttaaaggttagatttttattttgttctctttcaggaatcatcatncgaccataaaaattagaaaattagaatatggaaagtgtgaaatctgtcgaatctaatctactacaaatggaaatgaaggaatcagcttcgatctttgaccatccttaaagttcaaacaattattaattcctttaaaaatgatacaattagctttatcataaacgacgtagttcctaaagcaataagaaattgtcataaacgacgccgtatcgacccaacaggattcgggaaacaacaccgttcctatagcaataagaaatggtaataaatgacgccgtaactcgaccaacagaatttcgagaaacgacgtcgtttgctatgttgtaaacgacgacatttgccatagttcgcttatttctttctttttgcgagaattctgaaatctgaaggagagagaaaccaatcagaagagaaaacgatgacgagaactgttctactgagagc

SEQ ID NO: 7668 - DNA, 1159 bp, Arabidopsis thaliana landsberg
  unsure (1)..(1159): unsure at all n locations
tgattttgatcatgtttgaaacaatttgataccagaagatttaagcatgctctttatattttgctctttctatttaagactttggagtggagtatttgatgttgcatatggttgtcaactttccaatataactatctgattcatgtgtcgtacgtaacaccagggtccagggatgattttccattaattacaatactctctcatgtcagaagacgaggacccaacaacaacaacaagcactagctcatcgtgacttgagagccgccctgtttcaccaaactgataccaaagacctcttacttcaactaactcacaacacccgtcgtcgtcctcaacaatctcacgccatccacataaatgtcctacctccatgagcaccaacgcaacaactaccactccacagtctcaccaaagtggatacacaaggttcccacatacgctttacccaagtctgttcagggtgaaaacacaaagaggatgtgcgttaagtatatggaagaattagtttttcaaaggcggacgaagagagtgcacaaaagtcttgtgattttcttaaaatgtttttttttggttctatgttgcacccaaaaaagctctctttctatactattctaagatctcatcaatatcaactttggaatgtgattctctttaaaatttacagcttgtaaggatgaatacaacatatataaggaatcttggtgaagaacaaaatcaaaacccttttggaccatgtgaaaactgtcttatcgtcaattcatcatttatgctcgaatcaaatctttagtgcataatctcataaactcaaaagtacgaagacacaacacatttcaaatatagagtaaagtagtttctttaatccgaagaagttaaagtagagagtgtatttaattaaattttattctcaaagctaatcaaaagtaagcatttctgaatgatctagaaggccataacggctaaggcgtttgctgctattaatttcgtttctgttggaaattgagatctgcaggtagaccaacgggagtagattcaagcttgtgtgaagtatctctgggattttttggcggaagaagcggttcctttacaaaaccgggtggtcgaatatccggtacatcctcatccgctggagtctttngggttcgctacatcatccaaaccc

SEQ ID NO: 7669 - DNA, 1394 bp, Arabidopsis thaliana landsberg
cctatacatataatctacactgaaacaaataacattccaaaagagcgaggctatcatggaacagtagttactgccagaccttcggttcgctgaataagctccaacaagctcgcagctgccctctttgctctatcagtgccattctcagtaagttccgtcaaggctacatcagcaccaacctctcttgctacatttagcctttctatattcccaatacatagataccaaagtattgctgcagcattttcccggttccttggtgaccctgtccttataatctcaaccaaaaccgggatagattctgcttcagctatcgctgttttcccttcttggttagttgaaagaattgctaaaatggccagagcctcatccaccattccgccacctgcatctttcagtaatctggtcagagggtcaacaataccgcctttaaccgcccttgatttgttcccctggtatatgcataagttgaaaatcgctgtagcagcatcttttttgcctcttcgggttccttcctcaagcaagcttataagtgcttggatagctccagcagcacctattgccactttgttttcatctataacagataaactgaaaagggttgcagcagcgttctctctagcttccatgcttccgttctttaggacttctactatatccgttatggctcctgcatcaacaatggctcctttgttcccttcatttatggaaagattcagaagagctgtcacagaatgttcctgagtccgaggatctggtgaggatagaagctctacaaggagtggtatggctccagcctcagcgatacaaactctgttatccacgttcctcttggctagtaaccttaattctccagctgcagctctttgctgttctgtagtaccgttggccaatttctctaacaaggaaaggacaaatgttcgatcacaatctgaagagctgcttcctcctatttttgtggttctacagctcccttgattttgcggtagctcaatgccgttgctttcacaccacagagcaatgagactctttaacacataattaggggttaatccagcatgtaaaagtgtctcctgagatttcggacatgttttatgaccagcatcaagccacttctgaattgatgatctttcatatgtctgcaaggtcgaaaaattcagctataacaacaaatacacaagtgtaataatcaaattcactacaatgcacaacgaaacttgcaaagccagacctgtccagtggagacgataacaggatccttcatcagttcaagtgatatcggacaccgaaaatactctggtataacaggagaacgatgtctcgaaacgattctgctgccagtggatggatcagggtctgaacttaccattgttacaaagtctaccaggttttta

SEQ ID NO: 7670 - DNA, 543 bp, Arabidopsis thaliana landsberg
  unsure (1)..(543): unsure at all n locations
gtttttaagaagtgaannnnnnnnnnnnnnnnnnnnnnnnnnnnnnnnnnnnnnngaaagaatatactcatgtatcgcatgcgattctttcttcagctcatcaatggtagtaagttggagctcttgtgaaagtcttttgaggattatagggtcaggatccatcacattctctgccatagctagatcatggctaagctgtagatcagactcctcccatctttcttttgctctcttgaactgaaaatgcagaagctgaacctacaaattcagagagcttatcattagaattcagattttaatcaacagaaaaatatagccctccttaaatcaatgcattgagaagtacctgttctctgacttcctctgatacctcaatcttctcataaggaatctgacttaacgctgcttctatctccactgtcatgtcacggaacttctccacaagagaatctctatcgaaaagctgccagcagagagaacacgaaaaaggtctcaacttcttgttatcagacctcaattgattcaacccaaaataagagaaac

SEQ ID NO: 7671 - DNA, 804 bp, Arabidopsis thaliana landsberg
agaagtggttgttgtatggtccatgaccaagctcctcacctaagacaaaagaagatgcggttgttgtggctgtcgttgtgatggtggttgtggcggtttccacaggctttcttgaacggtttcttccacggtgaatgtggcggtcacaatacttgtggcccgctacaacatcccttgaacatctccatttcttgccgtcagttctcttacacctccctggctcaggatccattgctcctcttccccaataccctgttttttattaagtgtgtgttgttcattagtaacaacaaacataaatctcactcaagacattggttacgaaatgtacttgtctgattctatctatgttgctaatagatcttctagaaataggcttatcatacacatagggttttaactccttgcaaggttgcagagcagccttatacttattttagatcttggaaatataactccaacaccaaaacaaagggaatcttttttacaaagaaagactatttcaaggataagagaagcataaacaatagagaggagagagagactgacaagaaggttggtgatgaggaaaactatgttgaagaggatggtgaaggaaatgcataggagattgatggatgagacttttcttaataggtaagagaagctcttgaggaacagaagcaccagccaacatgtatctatagatcagtgcttgtagctcaagttcttgccactgtgcccagctgaagaagtttcccatctctacatatatatgtaacatagaaacgtcagattaaatatcagcaaaaacaacttcaacat

SEQ ID NO: 7672 - DNA, 387 bp, Arabidopsis thaliana landsberg
caaacttgggttttatttcaggctaacaacacttgctgcatattcttgaaaagactccacatacagaaaattgagatcaacataaccatttagggaaagaacacaacaaaatacaaattccaaacaaaaaattctcctaactagtcctcatcaatagcttctacaaactcttttctcactagtcaattttttacacaaccaacagtcaaaaaaatatatctctcaacaactcaacaatgtatttgtaataacccaaaactacaaaaacaagtaaaaagaatgttgttgacttacacaactcttcagaaaaagcttgaatcttctgttaactcagacaaagaagagaacccaaacaaagactgatctttagctctttcaatcttatgc

SEQ ID NO: 7673 - DNA, 1279 bp, Arabidopsis thaliana landsberg
cacatacttttgattgagttctttagaaagataacagagcaaagttttgttgattacgaatctttgttctattatctttctggaaaagtcaaccaaaagtatatgatttaaatgacatttccggagttggcgatttttttgtcccatttttgaaagttggcgattttttaatatttttcccataatacattcattattctaccgtatttaatcttctagttatagcttacgaatggttcaaaatgaaaatttgcgtcaaatactagttctttctttttggccaaactcgtgaaatactaactaatctttgtattttgagggtgagatttgaccttataaactgatcactgcatatgttttatgaaactaattaaaattctaaatagaaaataagaactaattaaaatcctttaactagaggtctgtaaccaaaagattgcatgcatattctcaatagaaccaatctaatttttttacaaaaaaaaatgcataggatattcatttggcacttaatttgaagttttagtactttatgatgtgaaatgaacaatccacacttgtagtgttatgaagtattaaacgtatttcttaaatttcttactaacaagttagcctagattaactagttaaatattcttgttaagcctcttttttttttcaaatcactagttgactttaaaatttaagtcccaaccattattctaacaacaaacagtccaaattaaataaaagattacattcacagctcaaaccagtcaacctcaaatttttaataatctaaatctatgtgggtgatgcatgtataatgtataagcctatctgcttttctttatttgttagtttggaaaatgaaaggtttaatatgtgtttggtttgagccattaatgacataattaatgagatcacttctttttcactaaatgagatcacatttagggcttgaataatgcaaaagagccctcatattattaatggctttgtagtagacatgtccttcaactataaaaggaaaaataaaacagccacgattataaacttttgtttttttgataacgacacaatttattcatttatgatacgtcttttatgaaaatacactaaaagagaaacacactgttctttttgctataaatccatggaaggttgatttatgaggaatcatatacatatggtgaactgatgattgcattctacgaatatgatcagtctggtttttagaacatgaaccaattattattatttgacaaagtacatgaaccaattgtagtatatattttca

SEQ ID NO: 7674 - DNA, 2414 bp, Arabidopsis thaliana landsberg
ttcttgaaagagtaagtttacatcaagttgcctgcttgcatatataaacgctctttcaggaccttaacacttttgtttaaggggaaaaagatgactgacccaaatttgtttcttctcagattcttgagatctcgagatcagaatacgatccttctgatatggacatattgcaagcggaaggactctcctctatggaaggactttcttgtgtggacttctcattcccatcaacttctcaagaagagtctcttgagagcgattatcaacatgatacagacatgaagttagttctgttctttttccttgtgttgcattccggctatatgaaaaaccgttgaacttaccctctctctctctctctctctctctctctctctctctctctctctctctctctttaggtaccaactcatccggctaaatccgagaagccttggtgaaaactggaaattgctggaaatgtttgaagacgctgacttggtgatattttgtgtctcactaacagactatgcagaaaacatagaagacggtgaggggaatattgtgaacaagatgcttgcaaccaaacagcttttcgagaacatggtgactcacccgagcctagctaacaaaaggtttcttttggttctaaccaaatttgatctcctagaagaaaagatcgaagaggttcctctaagaacctgtgagtggtttgaagacttcaacccattgatcagccagaaccagacgagcagacacaaccctccaatggctcagcgtgctttccattacattggatataagttcaagagactctatgactcaatcttggaacccgtaaatatgcgtggaaggagctttaagccaaaattgtttgtttgtcaagtgagcttggagagtgatactgtggacaatgcactgaggtatgcgagagagattctcaagtggcatgttgaagaaacttccatgttccaagagatgtctactactagcatagaggccagctcgtcctcttgatattttttcctaaaattctttctttctttgtggaaattacataagtttgtttctctctctgtgtgtatgtttgttgtatatgtagtagtgtgaagatacattcatgtgattgatttttcaggggaaaaaaaatagagaaataataaagtgaattttcccggtttaacagacatttacttatacggttattgaggttgaactggaccggagtagcaataaattatcggttcagtttgggagatcaaaccgtttaaaagaaaataatttgaaatggccactcagaatacgagggtctgaggattgtacctcctttctctgcaaaaacttaaacgttgatttgactcaagcgtcaaggtaaggtactctctcttcatacaacattttagctttactttttctctttactcttctctctctctttctctttctctttctctttcactcgttctctctcactcactctcttcacacacagatccaagatggcctcttcaatggctagcaatgatttccagctccctccacgtttcttcactgttttcgtctcccatttcagctcagagttcatggtaagattttctctcgaggtttcttctttcaggtttatctgttcatgagcaaacgattcttgaactgggtagattctcttagcctagtggtttctttgaactatgtctgatggtttttatgaaacaaacactgtgtttatctgcatttagcttcctctatagattttgctttttctgtttctagggttttgctctgattcctaccctttggtttcctttttctgactaaagatttaaactttctgtatgaatcagcttaatttatggacttaacactggatatgtttggttactggaactaaatttcatcaaagtataaagtagttttgctcagattttgttttctttttctgttgatgaatagaaacatttgttctgcttctaaatgctgaaagatataaaattttgagactggatgctttgattttgtctggttctggaaagttgactcttttaactgtccctacgcttttggttgaaaccaaatcttgttgtgtgtggaaagcctctttaatgactctctccgacttaccttaaagttatcttgttttttttgagtctttacttatctattgagtgtttggcttataagttaaacaatttttctgtgaaatgagcaggtgatcccagtttcctactacgatcacattccacatcgtttccccaagactgtgattctccgaggacctggtggatgctcctggaaggtagcgaccgaaataaaggatgatgaagtgctttcttcacaaggatggcccaattttgacgggatatactcttacgatggagactttttgacctttgactattatggagctcacataatccaggccaggatctttcgcgggt

SEQ ID NO: 7675 - DNA, 1378 bp, Arabidopsis thaliana landsberg
agactacgtccacacgatttaattcatgtatgtgggatttgtctcgccggtttaagttaccgaataattttgatttataaaaaaaagggactaagcaagttttgttacacttgaagataacttatatagtctatggttatctattttctttaatctttatggttagtctttttcgttttttttcagagcaattttatgtttaaccctatataaacagacgattgttccattttatttatgaatccttttggctctctaattgcatatctttgggaaaatgcgttcctcacatctaatgaggtacttagagatatactctgacaactattggtagatcataaaatgattgtagtgaagtaatagagtttgggctaggagaaatcagaggtgtagtttctgacgcttctggaacaccattttcagttcttagattgcgtttacaaacaggacaaaaggatctccaatgtccgagccaagaatcgatacacaccgcatgaaattctgcctcgagtaaaaaaaaaagaacttaagatcaactctaagataattaatcaactcttagttgaacaaaacaaaatggacttactgtgtttgcaaggtaggatcctgagtttttcaccaacgcgataatcatcgatacatatagcacaagtaaccgaagttgaactttcttcaagaacaccgctatatacttcagtcggcatgctttgcaacaagtctcttggcatacaagaaagtccttggccaccatgtggtaaatccctaacactctgtctaatttgatgcctacggacaatgaaacaagtggctagaatagcagacatggcgagtaaagatatgaatgtaatacccatgatagaccacgatgaaatcccgaatcccgggatgagccaaagcttcatctcgtcttgatccgcgtaccctttaagcacctcccctgatgctcttgtaacaagcaagccatgtatatccacaccagatgaatttcctgccactatggttttgaattttttcaagattataacaaccattgattaaagatgtttatatactcacatgaacattgagaacttactaggtactaagagctcatcatatccatcgttatagacaatcgcagctttgtatccagctttctgcgcctttctaaccttttcctcaaaactacagccaccaaggacgatcaatacataagaggacctatactttgatcttttttccgccatgttggttatatccgagcatgcctcaagaggctctgcaacgtacaaaattccacattcccccgagtttctaacaattggagctgtagacatctcaataccatattttttttatagaaaaatgttgtctagtgaacatacaatactgtagaaaa

SEQ ID NO: 7676 - DNA, 797 bp, Arabidopsis thaliana landsberg
atgtcctaggccaccatgatgtaaatccctcacacgctgtctaattcgatgcctacggacagagaaataagaggctaggacggcagaaatgacgagtaacgatacgaaagtgatagccatgattgaccaagatgaaatcccgaatctcgggatgagcaagagctccatctcagctcgactggtatactctttaagtacctcccctgatgttcttgtaacaagcacgccatgtatatagacaccagatgaatttcctgccactatgatttcaagattataacaaccatcgattaaagatgtttataacactcacataaacattgagaacttatgaacttactacgtactaagagctcctcatatctatcgttatagacaatcgcagctttgtatccagcgtcctgcgcatttcttattttttcctcaaaagtacagccaccacggacgatcaatacatacgagggcctaaatttcgaacctttttccgccatgtttgttaagtacgagcacgcatcaagaggctctgcagcgtacaacaatccgtattctcccgatcttctaacaattggagctgaaaacatggcgatacaattttttatctataaaaagtgttgtctagtgtacacacaattcttaaggaaaaagtatgttactgatcgctccaaaaatagagcgatctggtcacttattcagtagtcaatatataattctaatgcaagtcatattgtttagtgaaataaaatctcacactctaagttggagaaattatcaagtgatatataaatgattagtatcaa

SEQ ID NO: 7677 - DNA, 1063 bp, Arabidopsis thaliana landsberg
atacaaaaatctagttttatagttataaaactgaagtgttatgaatattttttggccgttgatatgttatgattttatcataaaactataaaagtttaatatatatggaatagataaccataaagaatgaagttccttttaaggtacggctaagatagtgaatctaccaagccttccttttcacaccaactatagataaaatacacccgacaaaatgattagtggccataatgtgattataatgagcatgaatgggcaaacatgtcaaatttctccattactcaatgtctacataaaccctccaatctcacatgtttaactcgaaacaaagaagaaataaacagagtatcttaaaatgggaaggcagctttacacgacgacggttctctacttagtcaccctactcttcatttgccggacaatctcagccgtccgtttccctccggaacaaccaacaaccgacgacctagatttcatccgtacgagctgcaacacaacgctttatccagacgtatgttacacgtctctagctggatacgcctccgctgtccaagataatccggcgaggctagctaaactcgcaatcggggtttctctctcccgcgcaaaatacacggcggcttacctctccaaactctcgcgtcgctctggcgctgcatcctctgccgccgtcaacgactgcgtttcgaacgtgggagatgcggtggatcagatgcgtggctccctaaggcagctccgagagatgaaccaccgtcgtcccggagctccggcgtttaggtttcagatgagtaacgtgcagacgtggatgagcgcggcgttgacggacgaggagacgtgtacggatgggatcacggaggagatggaagacggagagacgaagacggctatttgcgatagagtcgcagacgtcaagaggttcacgagtaatgcgctcgctctcgttaatacctacgccaataatggagcctaactacctaagctaggtcttgaaaatcctaaagttataaaaacacatgtatatatatatatgtgttaagttgtgtgcttagtttataatgtgtat

SEQ ID NO: 7678 - DNA, 1280 bp, Arabidopsis thaliana landsberg
agggaatgtaagagtaacacgtacgaaaactactaacgacatatttgacttgagtgtacaatccttatgtcttatgtgaacctaagatctatgtgagtgccgagattatcgccatacaaaatatacattttactaaaattacataaatgttttcagttttattatgatgtgttatatacataagtcttaataaaacaaaaaaaaacaaaaaatcagaatgcactaataaaataaatgatttgtaatggcttttgcatttggtatctactagaagatatgagtgagttaatgaaaaatatggaagtttgattaaagactttgcctaaaataataataaatgcatttttaagttattctgtttcctaaacaaaacctagctaagatcttgacccttcaaacattaaaataaaaacactctatgaaaactgaaataaaacttaagttttcacccaaaaaaaggacaatgtaggaaaaatcttcaaatggaaattaaatttaattgaaggaaaataaaataaaaacagaggactaacctgatggaagccaacttccttagtcaaaggaacaccgagttccgacatacaagcatgaatccgatcatcggagccgtacaattccgaatatctctgaatacaacgatcttgcattttctctaatgctttagccaacggatagctaatcgcgaaccctcctcctccataagccatcccgtaagagaacttgagattctgtatatgactctccgacgagcttccgatgtaataaaactgattgtgatcgtactttctcaaaaccttgacaagattctccgggaaaaacacagtgtcgtcgtctcccatcacaatccacctcacgtttttctccaactctgttccgttcaacagcctcaccgtctccgagacgattctcgtgattctgatcgccgatcggagaccctttgggtatctgtactgaaacctagacgtgtcggaggagattctgatcggaggtaatgttttcgaaacgttgtcgttttggttaatgtgttggtctaaccaaacgacgccgttcatttcaccgtttggtttccaccagagcttcacgtagtctttacggtgtttccagaatttcgcagaggcggcgattccgaaaacgacgtgcttgagttcggtttggtccggttcatgaaccgacccggatccggatacgacgggtgaaacagagaatttgatcagaggttgagaagaagaggagatgaaatttaaagggtagaaaacgaattgaagaagagaagagaatgg

SEQ ID NO: 7679 - DNA, 804 bp, Arabidopsis thaliana landsberg
agattgtattccaaatgaccaatgagacagttgattgtgttgtacaatgttaagtttcctttgaaggaaaaaagaccctacttctccagcataatgggcaacagcaaaatctgttcgagagagttttggcttgatgaacctcttgtgtgtcttaaaagtttgataaagcttgttcgcaaatgtttcatgggtcgacttcggaaacatgctgaagaaccaagaaacattgttcaaaataagataaaatgaacataactcaagttacatacacaactcaagttgattgatgttaatattaccaagcttcatcaaggagagccacaattccaccaggcttctgcagatggaaatttttctttttgagtgagaaagatgaaatatttagattgcattgtcatttcggagtcccaatttaaagaccagacaaaaatgtgatattgatcagaaataaccttttcgataagatcgagaacatcttggttatccacaaattcaatgtagctccaatctattgcttcttttgtgtattcctcctgttccatcttgaaaacgtgctgaaaacagcaatagaaacttgtaaaccccaaaagcctaatctgtgaaactcaggggaaatggtttacactacaatcaagaaattacctgattgaaatgttgctgcaacttctcatttgtgaaattaatacagaactgttcaaaactgcaagagatcgctattagcagtggaaacacaaaaatctaacggaagtttagttcttgaacctttggcgcaagtagacaattcccttacctattttggtttta

SEQ ID NO: 7680 - DNA, 714 bp, Arabidopsis thaliana landsberg
tggaactcgcgataaaagccgggaggcaactggataaggcaaccgttagcgagctgttgatacccttatcggataagtctggtatgttatacgatgtggatgttgtgaagatgatggtgaagcagtttttgtcacatattagtcctgagataaggccaacaagaacaagaacagaacatagaaggtctcgttctgaagaaaacatcaatttggaagagatacaggaggttagaggatctttgtctacttcttcttctcctcctccattgttgagtaaagtagcaaagcttgttgattcttatcttcaagaaattgctagagatgtgaacttaacagtgtcgaagtttgttgaattggctgaaacaataccggacacttcaaggatttgtcacgacgatttatacaacgcgattgatgtctatcttcaggtaaaagcaaacaagaagctagtatacattttaagagaaacatctaacactctcgttacgtattgcaggtacataagaagattgaaaagtgtgagagaaagaggttgtgcagaatcttggactgcaagaaactatcagtagaggcaagcaagaaagctgcacaaaacgagctgctttcattgagagtgatcgtgcaaatcctcttcgttgagcaagcacgggccacactagctacaacaagaaacaatatcaccactaatgaaacagcagttttgaaagaagcttt

SEQ ID NO: 7681 - DNA, 1308 bp, Arabidopsis thaliana landsberg
actggtttcttgtggcccaagtcaaattgtctgcgtcgtccttgtgaagcttatttggttctaaaaattcatttgttacatgacattgtataacccaacaataaaggaaatatatataatctttctttgatagattttgtggagtttagtgtggtggttcaatgataaattgattctttgtaatttcatcttctgtttattgtagttatttcttgatttgttccagtcaaataataaaccaaaactgattggaaaaccaaacgataatccagttatacaaaaaaagaaaaaaaaaccctggaaccaacaaaataataatcgattgaatttaaaaaaaaaaacttggtcgatcggaacatctagaatttcttatgacttgaatcatgcttagggattttggaaggcagcaacgcaattcaaaaaaatacgatttgttcaacttaagttttgaaaagctattttcagcagatgaaaccaaaatcggaatcgtcaatggtatttgataagcggctcataagtttggataacaatttcaactgttttaagaaaatctaataccctaattgtttgataacagattttgacaccttaattgtttaataaccttcgcttacccaaatttctcttgtaacacatttattatattaagtaatggtttggtttttaaattaattaattaagtccatggggctatgtcaatgaattgtggaagcccaatatttacattctattattaatatatttgcttggggcaccaaacatatttatataactctgttaaagagtaaatctgtaatatatgccccaaaatgtttttccataatttgatgccccaagcaaatgtttcttttttcataagtgaggcacggccttattggttacgtggttaatattatagaacaagtcctttaaaatgtaaacaataaggtctatttatcttaataacaaaaaagtgtctatttagtatttatcttatccaacattctacaacaatattgttacactaactaacgccgtagcctccggctcgttcttcttcttgaatttgaaccaaatggccagaaggaacatgagggtggtcaagagggcagcagtcagttccaggagttttgatagtactgttggtcccaaaaggcttcctctagtttcatttttctttcctgtgcctggttaattatttgtgttttcaccaagccttggttttgatccttttatctctaggaatagatctttgtctgcttatctatctctttccatcacttccggccctgttcactctacaaaaagcaccccttgtgatattttgaa

SEQ ID NO: 7682 - DNA, 3817 bp, Arabidopsis thaliana landsberg
tcgatctctatcgcacagaagaaactaattaaaattatttgactccaacaggtctccgcttcttcattgttgattttatctcgcagcagcattacagctgttatgttaattccttggtaacaaacaaacccatccctaattgtttttttccatttgctatttaactaattaatcgcctctttgaccattttttagagacatctcatctctccaggtgacagaaatgcatattagtgtgtttaccaccactccccaaaaataaaccaaaaaattttgtttacaaaatatcaaatgcctaaatcagtgacagtattgcctaactcaaatctctctctctctactacaacaaatggcttttcacgactgtttctttagccttctccacgacgtttttggtcatatgtacacacaccaactgtgccttttttcttttgtatattaacatctctctcaagtggcccaggtctttccaacctacacttgtttctccctatttcttcttttccatgactatagcccaaatgtctttcatttagagcagactgcacctttgcccttcttcatctcttgtctcccactcacctttgatgccacgtccctggatctgcatatccacaaacatactccaagttcatttttatattcaagatatacccacaggacaagcaaaacaatctcgaatgtcagagacctaatgatataaaatccccagtcaaaagaaaatgtcagagtttctaaacctaggaaacaattccagtataagaaaaggctctgattcatgacgtggaacaagtatgaaattccatattacctctcattcctactggaacaggaccttccgaatgctgcttatagtgataagagtgtctattgttatatgcacgcggagaatcactccacctattgttctgcaaccttcctgagtcacggtgatgcccactgtatgagctcgattgatgaggtcctttgtgtctgtcatgatatcgtggacctgcaatataaaaaaaagaaaagcattcacgcctattagcatccatgagcaagtgcttgtgtgcgcagatatgcattcatatatgcctattagcatgcatgagaattataaggaaaaaaaaaaaaaaaggtatcggagtccaccatgagaagagggcggatgatatctccaattgtctcgattctcgcatggttcaggcctcattctctcatagctgtcttgataattcctttcgtcaaattccagtgtgtaatgagatctgtgagggtatgatagaccttctctccgcgactttatatggtggtccggctccatatatgaataatgatgtgatggcggaggaggtgggggatgagaagatggatatggcctatgctggaagttagaaccctccccacgtggcatgctttttgacaaagatactcgggaactataagatggttcaggacttccgtaatgcattgggggattcatccttggaggaccggcatgatagtcgccctggaatattaaccacaaattaagttattaactatgtctgaatcctcactttgttaactgcaaaagattctaaaagaagaaaaaggacgcacctgcatgctgggatttctgcggtagtcaaagccatttgagtaggaattagacattgccaactgagcattctgcatagggcgagctggtggagatgacgaggtaacattctgatgtgaagttccagggacaagcagacaatttgcagactctctattatcagcttgatctgtgatcgcactagcactgcttccaccttcccaaggtggagccacgtcttccatttcaagctcaccatcaacatcttccagtatacgggtatgcctttcggtaatggacggtgtgacatgttcttcaaggcttcttgactcgtgttcaggggtgacagactcaaaatcacccccatccgagtcacttccttcgtcttcatccctaagtattggaggtatgcagaatccatgaagctggagagttgaattactgaaacaaaaaggtgaaaaaagttatgaccctagagataaagaaatcaagatcccaaaactgattagactcaactctcaccttccatattcatccaccagtataccctccatatctctaacagggtcatccagcgccctttctgttcgagcggatcgccgagaatagaggcaagcaggaacattactaagcgaatcaagttctcttatatggtgacgaactatagattcaggaaggatccgtctttcaagccaaagcctcaaaacctatataatagcagaaagggtgagagttagtattcataagaaaaagaatatctaactaaaatcgcataccttcaagcactgttttcggttttcttgtgtggtagctccagctgggacagcagcagttaataggcgaggtagcatagcctgaatggatgaaagataaacaccaccagcatcacctgaatagaaaggtagtattcacaaagttaactcgccattgagaacatcaatgatgcaactaagcaaaaacagcatactcaccattcaaacctttggagcactgagcaatagaatccacaaggaaaaataaatccaccctcctttgtaaatttgactcactttccaaagtgtgggccagaatttccatcgcctaattttagacatagagattcttagagcatcattaacaacattagacaaaagtctgcaaaatagtgttttataaattacacaaaagcaccgtgcaaaaagtccctttccacattaaaacggtaagataagataataaggattgccctagtcctttgcttgaaaagagtggctggatgcctacagcatcctaaaatcagtagacaaaacaatatatataaggtgtttctctaattcgtagtaatacataaagttggtattgacaatttgacatgttctcgcaattaactatttgataaatgcaaataggtatatagcatgggacagatccaggtacaatgttttaacaatctataagaagaaatttgtctccgattggattccacctctaattaacatgtggcatccacaaacagataagacaagatcacaagcagagagaacgtttcatacctttgccgaaacgccaaatttcgccaagtccatagccaagcgagttgctcggccaatggtctcctttgtcctcaccaatgagtcaagtgcagtctcaaaagactcaacagtgcattgcacatcagaactaacaactttcttcacctgagttgtgcctgtttcaactttgctttcttctttgacagtgtcaacatttaatgatttgttctcaccatactgaacattggtgctgtaataactgttgttctgcatagcattttcactttctgcggtagaaattcggcatactgagttgcaatttggagtaccccttgcaggagatgaattcaatttttcacgtgaaaagttctcagatactgagatagaattggtggcttgcatctgctccttctgctcatcaacctcacaactgccaatgcacacagacataccatactgttagtcaaccagttccgtgaattggaaaaacttgaccaagataaagtctgaagaaacttaatctaattgatgttttgcttaaactcaatatgcatatcctctacatagactttcaaagcaagagaaaatttaaataggaactgggaatcttcaactgtaaaaggaaaatgcacattataaagaaagaaagaaataacaaagaaatggaattttatgtcaaaaagtgaatagatagattcctagtcatgttctacatcaatctgcctatgaagactccatgcataaa

SEQ ID NO: 7683 - DNA, 1413 bp, Arabidopsis thaliana landsberg
  unsure (1)..(1413): unsure at all n locations
ataccgggtccctctgtactcgaattgtagctgacattccgggcggtcagaaagccaacctccacggatctcttggcaacagttcagacacaattcatatgaacactttggacagcttcgatgcaagtcaacaattgatgttgcacagtggttactagagcaacaaagacatttcagtgatatataagatagatgtcatgtaactcttcaaacacatgcaacaaaaggatgatacttaccagaagacacgctcttcatttgagcatagactctcggatatatcaacttgagaagccattgaatctataaacatatcaatatgttatcttgtagcaagaaaaaatcttgtcttagtagtaaaagggagaaccatatataccttgaaccttagcctcggtttcgatttcttgatcttgtgctttgcataactttttcaggaaaggaagcatcgccacaatcaagaagcgaagatgataaaatctttcgtatttatcgagctttctcttagatgtctgcaagacaaatagatacatctctattcacaccaaaacaaaaatcgaacttgcggttcttgatctatataaacaaccaccacatattttgttaagaatgcaactcatacctcgattaaaccactagagtgcaaacatgtgcagcagttgcaagttcctcggcaaaagggacatttttcaaggatatcatccgtggacaaatggggatacctgtcacaaatcataagattgtaattgacgatattgaaacctataggcagtgtcattaaaatgtaagaacagaaactaaccatttctttatgcatggaaaacaatacaacctcacttcacaaaaggtgcaaatgaaaagatatcttctttcccctttagagcattgatggcaaattgcaagctctcccaaatttgcctgtgtagggaagaaaacaaatcagaaaaaagttgaatacagtttcatcacatgatgttttctcattgtgtaagaacaaatgctacctttaaactccttgtcatgcttctgcagtcattaaagtactcggttttcagataagaatccgaaagttcagactcagaacgcgaactcaaagcgctaacatcaatctcgttgttaaccaaccaagtatccacactgactgatttcttgctcctgcttcgagatgttgccttgctggaaggaactagttggagttgttgttcgcatttcttttcatcatcaacaacaacttcttcttctttccatgtagttgctctctttttaacagagctcctctgcttcttctcattctcttcacacttgttctcatcatcacatttcctctttcttgaagatttcgtctaatatcatcagctttagaccgttaccgtctttgattagccactcgcttaggccattccncncaaatct

SEQ ID NO: 7684 - DNA, 1294 bp, Arabidopsis thaliana landsberg
gcaaattctcctttaaaaatgtcccatagtggcaccacttgtttcatcataaaccacaatctcatcactcacaacctcttcttcctctaaaccattttgctcctgaagctctttctcattctgttgcttatgtttctgtttcaaatctgcaattgcagacctttgctcctcacttagtgttacttcagcagtatgcatcagaatattaacctacaaaaacaaaaaaccgttatacacctgagaaaccgtattattatttaacagtactaagtaacaattctgaaacttacagcatctgacatatcacagtgaagcttagtgactgaatctcctctaccgagctcatctgaagtcccatatgcaacataagtttttggaccaagatctggtttaagaagtccttcaggaagttttgtagcaatgttgagaattcctgatctaggatcgctgtattcttgaaatggtaatgcggaaatgaactcatcgcagtgacgaggtaaaaggttttcaaacttgtctgaaggaggccaatccttcagcttcagcatctcaggccagaagttttcatatgttcttcctttgctatatccttcaaagaaacatagagtatttatcttcacctgaaataacaagaaacaaaatgagctttataacctcttatacagctatagaaactttataagaaaatgagtttctacctcacaattagctaaacaatcgatagctttgacatcagacatattagagctaattgctgaatcaacattctcacataaagcccgctacattaccattggctcccagcttaaaccagctgatgatgttaagagcaatatccgacaattcactgggatcaccttttgaccaatgctcttggacatgcagtagttctacttgcttcaggacatcccgagaatcaggagagtaaacgtaattgtcactagatccgtccctcgaagcagccttcctcttcgtactactcatatcagaagaacatctacaatatgacattggcggtttgatactataagaggctaagaatgtttcatgccttttgctccaaatctgacatccaagtcactggtaagattcgcttaagctccagcaaagagtccccgcaatctcctagctcttttggcgcacaccgtatgcttccattttcatcagcattccacttgatcggatggagttttaggttcatcctcaggaaacagaagaatagctcggtatgcagcttcgctatgtatatacgtggtcctctgtactcggattgtagccgacatccgggcggcca

SEQ ID NO: 7685 - DNA, 1127 bp, Arabidopsis thaliana landsberg
gttcatcttcttcttcagtaaaattgcctcttttgagatctggtcttagataattcatccatctcaatctacaactcttaccacatctttgtaatcctgcacaaagttcaatcaaaaatcaaatctttacctctctgtaaatataaagaaacagaggatgtatgaataagtaccagcggcgcgagggagagatcgccagcaaccttcaccgtgtttacggatgtaatcaacaagaagctgatcttcttctttagtccaagctcctttgttcatgtgagctttctcgcagcatggtgatcttcccatctttgttgatctctatatgtatatatgtatctctctactctacgtgtatttggaggaaatggtgttttattttttttgaaggaagagagttcctgtaggatggtgttttcgttttgaatgttatttataataactacctaacattattttaataccaaagttaaaaataaaaatgtatctaacaaatgaaatgatgtgttcgtttttttgtgcctaaagaatattgtaacaccaaccagaaaacacaaatttgattgtagtacactcacaggaggaacgtgggtggagtttcctaactttttttgtttttgttttctgagatgtagatcgtacggttttggttattgactttttggctctttagaatcatctcatctgccccaaaaaaatatcataatcattttacaaattccacaattcattgcaacatgtactgtttttaaccattcttattgcatataaaaaaacatagtcacgcgtaactttcgtataaaaagatcgattataaaagagaaaataactaaataacggtttaagtaatcactaatcagttagtgaataaagtgtttttaacatcatcaaatttacttcttagtttctgtaacgattttgtaaactcgttttaatatcaataaatttgtttagcggaaaattaaaccaattttttttgcattattgaattaaacaattgtttactgcattattaacaaaaaaagtacttaaacctaattttgggaaaatgttaaaaagaacaaaaaaaagtagatctgggagaaagtaggtagatagattgggaagatgagtaggtagctgtctttttt

SEQ ID NO: 7686 - DNA, 3626 bp, Arabidopsis thaliana landsberg
cacttattaccatttctagagtgagagtgcaaatggacacaacaagagaatgtactactaggttgttaaatggagtgcatggaaatgcaaagcggttgggaccaagggttctactttgatctgaagaagattgaaggggtctgccgctacttccaagagctgtgtcagagggccttttggtcagtgcgaggggctggtgccaccttgccaacagaaactacgcttctaattcaatttatcggcgtccatatttgttccaaaatccgtgactagtctacatatgtagtagctgtactgattaactgtgtgtgagagcgtgcacatgctagttctttgatttggtttaggcaacagaaacttcagagttccaaggaatagataatgagtatgaaaatggatgtctaggagttgtttacttttgagtgttctgtacaaaatgcatataaacgaagtacatataccagcgtgacaggttgagccaaatttgcagaagccaatgtacaaagttctaccttaagcatagagacaccaagaactgagagaatactatgaattcactcacgactgcagctggggagtggagacccagaaacggaaccacatcaacgtgcagccaggtctcaatggctgatcccaccactgcacctgccactaatcctcctgccgtcaacgcagctgctttccctgtatcaaaacacataacaacatcagaggtgctcgcttgtggaagaagatggaagttatcatttacctagcttgactttctttttggtcataaagtatagggaagccccaaagctgctagccaatataagtccgggcacatcagcaccagcataaggcatcccagaagattcaaaggaactcccattcacataagtcaaaaccatcatggctccatagactccagcttgtatcccgagatcgctcgtggaaggcatatcaacagagacaggtggattcttcatccactgagtcacagtacttgttcccagagggttactagatttaacatcagcgtagcgaatgttgttgcttacaacttttcctgctcggcgttggtttaggctctgcatcagcagcatgtcatatgcagcctcagcctgagaaaattacagtgaggcttaagaacaagaaagtctatctctttccatggaagctaaaactagtaatggaacaaatatagaaaattagcgaatttgttgattggagagtgaaaattgaaaacagtcacctgagagatggcgttggggtcgtccttacgagaagccaggatcgatttcttggcacgaagaatttcgtcgaaggaagctccttcggagacaccgagaaccttaagcgccgtctccacagacatatcgaagggtggagaatcgtcggcgcgagaactagctctaggcggagcgcatcgccgccgtgtgggtaagagaatcgcggcggagcgccacagctgagtcttacgggaaggaaattggagcttggtagggagatatagggggtggagaggaacatcggaggaggctgagctaaggcggttgggtcgggcggcggagagagctgcggttgccatttctgtcttctgttggtgttgttgttgttcgtctccaccaacaaaaaaaaaaaaaaaaaacttgaggtaactgtgagatttgagggatttatgatctttctatttccaccgttagattgagtctatattgtacggcttgtacgatagccgtcagattgaaacggcggacggtagatagacctatacgaacgattatcttgtgtcacacacataaatttgggtccaatacacaattagaagcgtggaagcaaaagaattcggcaatttttttgtacttacctcaattactattgaatctttgataataaattgatatttgattggaaaaaaaattgatatttgataagtatgtcaaatggataatatttggttttggtttcggcatgttatttattttgggggccatgtctttctattatttttttgtccatgtctttctatttctattattgtttgtgagataaatgttaattttatctattagtaatactgaaaaataagcatactctgtagtatgaacaactgcataattaagtagaaggaatgcaaatagattttaggcaaaaaaaaaaaaaaatacagacaaaatttggtttatgatgtctttgtggccatggcacccacacatcacttactcacaagttaaacacaaggaaacaaaagaagaaagattgtgaggcagtaaagatgttgtggtgtgggagcctgaatctgataatagtacaaggtcccgtgcgccggagaagactatgtatcatagcccaaggcgatggaggagccacctcagataagaagaagaaggttgttttaaaccaaaaaaaaaatgaagaagaaggttgttgtcgtgggttctagctgggctgctcttggtgccgctcatcatctttgtaaccaaggttactttcactttgatattctcatctccaactccatttgctctttttgtatttacttggagattttgttagggctttgatgtcacagttcttgacgatggtcatggtcctgttgatgttgggttccaaggtaacccatttaattaccttttagttttacgttacacaactaatacatgtgatctgtgcaacaagggttttggtatccgaatggaaacatattttccttggttgatcaacttggactcaaacccttcacaacctgggaagatttacaggtactcatatatttcttctctgtttcttatgaagcaagaaacctataaggatgaaaatgtttatgtgttttaaggttaagtttcctgtatttcaagagcttcttctatacagtagtattctcaagtaagtcaaatatttcccctgtttctcaaatattcttcatgatcccatttcttaccattgttatttctgcagttttctcggctctctttagcagacaagatatcttttcttcctcaaatataccttgagaaagttaaggtatatttaccaagaaattgttctatgtcttgttttcttgatgcatttttattattgatttattgggattcccagggacctaaataccaagaaatagtcaacatacgtcttggggatggaactactcgacgtggtcaagttcttgaagttgatggcgagaaggctgttgttcaggtttccaactattattttcctcattcaaaataatgcaacacggccttttctttatagtactgtggtgcttgtctaggtctttgagggaacatctggaattgacaacaagtacaccaccgttcaatttacaggggaggtatgttactactctcttctcttgttgcgtgatatatttggtttactcactcacttttgccaatataggttttaaaaacccctgtctcattggatatgcttggccgtatctttaatggttcagggaagcctattgaaaatggtccacctatattgccagaggcttacttggatatttctggtgagcactcactttagcctcctcttgacgcattcttttcgctgatttttttctattttggtctctccaggaagttctatcaatcctagtgagagaacctatcctgaagagatgattcagactggcattt

SEQ ID NO: 7687 - DNA, 1620 bp, Arabidopsis thaliana landsberg
tggttgttgagatgaggaccatgtgtcctagcactatttatttactaacaccgaaaacctaatgaaaaaagtaggtgacgtagtgaacgagatatttgttgaaacttgctagttgcaactatatggtccccattataacctaattcaagtttctagaagcttttgcttcaaaaaacatataaaaactatgatctataccaacatgtaaaaatggataacggttgatccataagaaagagtccaaaagggaccaaccatgttcacatttcactcctacatttatacttctacattttataacaatattgtcaaaataaaattcaaattagctcatttgcattcctagacaatggtgtaatattcttatatatttccataaaattattttggaaaccatgtatcgttttttttctttttcttcaaaaggtaatatgaacaaaaactaaaacaaaaataccaaagaaactgaagtaaagaatttctatatttatccaaaaggactcaagcaaaaaaaaaaatgaagtaacaaaacccattttttgggatttttttgacaaattattacaacagtgacaaacgcgcctccatcaccgggtcgcaccacggtttagaatcagccgatgacccgactccgactatccgacccgaccaggatccaaacccaagagttaaatccaaattcagctttatatgtcctgaattatcactataataacactccccattctgccggagatcctcgtccgtcgtcgtgccgctagtcgaagctccgttatcggaggaattttccgtcttcggtttaacggctaaattggaaaaagaatactcaacggcgtcgttttgaataggaacaacaacttgagacgacaccgttttggattcgttaatctgacgatgagtttgtggatcaataccgtgactaagaagcttcctcttaatatgagtgttccaataattctttatttcgttatctgttcttcctggtaatcttccagctatcaatgaccatctgcaaaacaaaacatttcaaattcatatgaataacaatagcagaggaaagctttaacaaaaacagaggaaacaaaaaagtgaacgactctgtttcctagaaagtcgaaacttttttcctgggaaagatcaaagaagaagaaagagcaggaaaacaaagtgacccagtttctattttctctctgtttcctagaaagttgaaatctttttcctagaaacaagagtagggagaaaaaaaaagtgactctgtttttctattttcactctgtttttttagaagaagagaaagagaggaaaaagttatcgtacttgttaccgagtaagctatggagtttgatgatgatttgatcttcatcatcagtaaaattaccacgtttaagatcaggacgaaggtaattaatccatctcaatctacaacttttaccacaacgcaacaatccagcggatttaggaagagaacgccaacaaccttcaccgtgattacggatataatctacgagacgttgatcttcttctttagtccaagctcctttgtttgtgtgagctttttcacaacaaggagatctttccatggtgaatgaagaagatggtgtatgagaagagagaagagat

SEQ ID NO: 7688 - DNA, 2282 bp, Arabidopsis thaliana landsberg
tgtctttatcgtgtattcagaattaatataagtcccattgcaagaaacaagtggctcatcatatataataatttagtaatatacgcatctatcgatccttcagataactctatatatgtcatgtcctttaatgaaaagtgggcggttaagtcgtcttttcatttaatccaatctagacttctagatctttgacacatatatgtatgtgaccacctcatttcatttaaaatctttaagcttctgtttcgttttgatttataaaaaatctcaaggctaagtagtgtatgatacttaagtataaaacttaatagctcaattatcttgtaactaaaacttgaaatgaacttccaacagaacaaacatggaatagtaaactcatgataatctatttatatttgcatgaacagatgccgaaaaaaatcatgtgtccagtgcttcgttcataaatatggtcggaagttttgtatatccttaaaaaaaaaaaaaaattacacaacccacatatgttgactttcgttccaacctccactaccatccttaattttttgaataaagaaaatatatgtttgagatttagcatatgtgactgcgagtgacgaaccgacgattgcatacaaaaatgatattataattctaattataattaacaagaaaaataaatagtattgttgtagagaaaaagttaaattattgctatttcttgacacatttaaaagtggtaatgtaacatacccactaacgtttgtgcagttttttatggtaaaatatggaaaattttcgtcttcttcctaactttcatagccatcagaaaaaatcagactgacaattcaattcaatcccttcgtctcccatatttcctcacatcaatttatttgtcgttgcatctaatacacaaatattaaattaataactttttatatatttcatgtttgcagagttcacaaaaaaatccatctcttgttactactctgttccaatttccaaacccaaattttagtacacaaaagccaaaatctggagatcaatctatcagctgatcctcaacttttgtacctttcatggaacaatttactctttaaggtacaaaaaatttgttttttttgttacttaattttatccgttatgattttatttttatcactgtcgttataaagttggcatctttgctaaaacaaaaccgttgatttgctcatgtcgtatatcccttgaatctagctgatagattctttgtctattcccatcgaattgtttaaaatttccaggtttagagaagatgggtggtgaaaagtttggatttttgatttggattttatcgattctttgcttaatcttcctctgctatggatacgtaccagtggataattacctcatcaactgtggatcatcaaccaacgtcactgtcactagtcgagtgtttatctctgataaccttgcttcaaactttctaacctctcctaatgaaatcctcgccgccagtaatcgcaattcaaattcagatatttaccagacggcgagaatcttcaccggaatctctaagtatagattctccgttactaaaggtcgccactggattcgtctccatttcaatccttttcagtaccaaaacttccaaatggtctcagctaaattctctgtttcttcagaaacacatgttcttttgagtgatttcactgtgagttccagagttatgaaggaatactctctgaatgtagctacggatcatctggagctcacgtttactccctcgggtgattcgtttgcgtttctgaacgcgctcgaggttgtttcggttcctgatacgttgttcagtggtgatccttcctttgcaggcagtcctgggaagtttcagggcttgtcatggcaagctcttgaaacggtctatagagtgaacatgggcggtccgcgtgttacgcctagtaacgatactctttcgagaatttgggagcctgattctgagtttctagttgagaagaatctagttaagagtgtgtctaagattgcatctgttgattatgttcctggttttgctacagaggagactgctcctagaactgtctatggtacttgcaccgagatgaattctgcggataacccgtctagcaacttcaatgtgacttgggatttcgatgttgacccgggttttcagtactttctacggtttcatttctgcgatatcgtgagtaaagctataaaccagaattacttcaatctttatgtcgactctatggatgttgttgagaatcttgatctgagctcttatttatccaacccattgagtggtg

SEQ ID NO: 7689 - DNA, 629 bp, Arabidopsis thaliana landsberg
gaccgatgctcacacggactttattactaccctttggcgtctgcgtgacaaagtccatcgaatatgcaccagccaaagtgttatccacaagagtgctaagatcaatatccgtagcagcaaccattgagtcaacataaagattgaaatatagctggtttaacgacaagctaacgatatcgcagaaatgaaagcggaaatagtactgaaaacccgggtcaacatcgaactcccaagtcacattgaaaatgctattcgggttatcagcggaattcatctcagtacaactaccatagacagttcttggagcagagtcctctgttgcataacctggaacaaagttaacagttgagaacttagacatactcttagctaaattcttctcaagcagaaactccgagtcaggcacccaagttctcgttaacgtatcgttgttagacgcaacaagcggaccacccatgttgactctatgaatggtttcaagaccttgcattgacatatccggaaactgcgcagggttgcctacaaaccttgggctaccagtaatcaaagtatctggaatcgatataacctcgatagcattcccgaacgcaaacgaaccactagagggagtaaaggtgagcactaaatca

SEQ ID NO: 7690 - DNA, 1678 bp, Arabidopsis thaliana landsberg
attggcctgaccgtggcatcgtgggctaatcaacatattagtcaaagaacccaaccttggacgaaattagtctcacctgccacgttactctttgataccgaagacccttcaccttgcacgtagtaatgttgttgaaacctaatccaaataccaaacaagtcttataatcatatcttatttctatccatttatttgtaagggccgggaaaaatgatatattcttaccctatttgtaaaaagggttcggtgttgcaatccaatacattaggatgagaaggctctaccggaaattcagaattgtttggatccccggccaccgatgccgccgagtttgcccataagtcttgaaaggttttgaaagcatggccttccgtttcaaactattgaaaatttatgtttagttaagatccaaatgtcataattaattatatgagaagttataatataattttgcgatgtctagaaataaaaaccttaatcttgagttgtttgtttatgtctcctagttgcctctcctgccatttcaaacatagactgattgatatgcacatacgttttgcagtttggtatgaaacatttttatataacttgcctttttcctaaggtcttccatttcttccatcataacttgtgtctgcatattttagttgaatgttttagttatgaaattattttaaatgaaacaagaccagtctagatcatgtgaccttgcgctgtcgagtcgcggtaagagcggcttcgagctgcctctcgagcgcttgcagttccttcacacccatttctccaagatcttctccaagcaaattcctttataattagcaattatcaacaaccatggatttgtaactatacatatataatggaagatgacaataacgatttgattttcaaggggttatagaaaactcttaattactagacctgttagtacgaacaagagattcgtatttggatttaagctttgtcacctcctgacaccaactctgcagcatatagattatatgaaatgcatatatatagtaacaggagaatttgagaaaagagagttagctagaatcattatcagaaacaataattgtaaattattcaaagtacgtacacacacttgcctgtgtagtctcttcaggcttattattgcttagagagcagttgtaacaacgattataccgttcgattgtgctttcaattctacaaattcaattaaaacaaaaatgggagatcattagctcaattctacaaattaagattcttcttacgacaagaactcaagttatatatcttacacactgatctaaaagggaaaaccctagtttggtttttttttttttttttttaaagctagaattaaacccatttgaaacctatcatctgtaagattaaagaatcaaaggaattcatgaatgggaaatcaacaaattataacgtacggaaggacctattagcttatgataaaggatccaagagggagacacgatataacgatgaaccctaattaccacaggataaacgatacaaccattaagaataaccacaagatcaaaacatgatccgactcttgaatcgtacgatgtaacaagtagcaaatgaacccatttattactcaattttcatataaaaaacatagctttattggatgaatcttaatatatatagcacaaaagttggttcaaaggagcaa

SEQ ID NO: 7691 - DNA, 945 bp, Arabidopsis thaliana landsberg
ccttggcaagctcggtcttaccaacacctgttggacccatgaacatgaaactagctattgggcggttaggatcagaaagaccagcccttgaacgtcggatagcatctgctactgattttacagccatgtcttgaccaataactctatggtggagcacttgttccaacatcactaacttctctctctctgattgctgaagattagatagtggaataccagtccacttgcttactatttctgctatgtcaagatcggtaaccacttctcggagtagtgactgtccagactgtcggaaattcgtgagattcttctcagcttcttctaattggcgttggagggacaaaagtgttccatacttcagctcagcagctcggtttagatcatattcacgttcagcagattcaatttcgaggttaactcgatcaatctgtaaaacatagaacatagaacatgttacggaggacattaacgtcgacatataccaacaacgaaagcaaccaccacaagtactaccactaaaagtacgaatttagaacaagaaactgcagtgtgtcttgtataaaattatttttatgagacgttaagtcgaaaaggcatagtgattgagaaagattttacctcttccttaaacgaacgtatttttgtcatgagcgacttttctttctcccattggacattgagttctttctgtttctgtttgagcgtggacagatcattctcaatcttctgtagccgttctttagatgctttatcagtatcatttttaagagaaagcttttccatctccaatttgatcacagctctatctattccatctagttcagttggtttagaagtgatctccatcttcagctttgcaccagcttcgtcaacaagatcaatagctgaaaaaagaacattcatcttagaaaaaaatactatgggcaaacactttccaagaaaact

SEQ ID NO: 7692 - DNA, 474 bp, Arabidopsis thaliana landsberg
  unsure (1)..(474): unsure at all n locations
ctttttcattttatccacatactttaaacattgatgatcttttttatacacgatacatgtacatatgcataataaatggttaaaatgtggttgagtagaagaacattgcatcgccaaataaatggttaaattggagatggaaaattttattgaaagatctactaatattgttaatcttgtttcttttgtcttttgactcactttagtactttgttattggtaaggtgannnnnnnnnnnnnnnnnnnnnnnactcttatttaggagctatggatggagcaatggatgcaagcaacctcttgaaaccaatgcttggacgaggtgaactgagatgcattggtgcaactacactgaccgaataccgcaaatatatagagaaagacccagctctagagcgtaggtttcaacaagtgttatgtgttcagccctctgttaagatcaatccgattcttggggtaaagagctgaagcacagg

SEQ ID NO: 7693 - DNA, 1545 bp, Arabidopsis thaliana landsberg
gtgatctctctgaaacccaaagagaagcttatttctgcttttatagggttgctccaaaaatacggattcgctgctgaaccaaacctcggcaacaaggacgagtgactttgcttccgccattgttgctcgcgaagaagctatcactgcaactaccacacacaacttgatgcgcacaaggaagaaacaccacagagacttcatctttcatacagattatgcattctcgatcatagtttgcttcattgtcataagacccttcaagcttatcaatttcttcaagcagcttagcaatgttttctccttgagattttttgggtttccaagcgttgttggatatgtggcttgagtcactatctgaagaggctttgagtcgaccgagttcttgctccagtctttggtgatcgtctttgtgtctttggaagtctagttcaattttgagtcgtaaagtctcaagctttctcttgttgtgaccctcagctgcttcttttgagcgttgttcttcctccatttgagccagagcctcctcttttgccttctgctcttgcctccatttcgcctgcaaataacatatgaacaggtaaatataaaaagaagttgatagactaaccatcattccatgtttaattgaggtaaagtaaattgatatttcaattatcagtcatcaaccacagtccaagtaagcaaatctagagcaaggttttgaacacaatgtgcagcaacatagataacgtacccgcaaggcgcaaacaggtaaaacgtcaggaacgaaaagaaaatatagaccaccatgtagagagaaaagctatccagtggaacatatcaataggtatagcaaatcatttggcttctacaactcgagacggattctccaagattatattcatatcaaatccaggttccatctaccctagcaaaatatgtggcagacacagactatacctcttgaatgatctttgaagtcttatggcatactaccatctaagacagaaccaacttcgcaactagatgtgtgcctcaaatgataacgtacgtaaatattttgaatcctaagtaaatgtacttcccacaattctagagttaaaagtatagaggatctagagaactttcacagtataaatgaatataatatgaaccaacgtacctcaatctccttttcatactctgtgatttgagctaaagtcttatatagggccttaatcttttctttttcagctgtaatctcatcctgcaacttcaatatctgtttctcccatgccacaagcttcttcaagcattttttctccttctttgatgcttccatgcacgctttaagcgattctgatgcacttaatttggatccctcccgctctgctcgaatctctgcattttgattctcaagctttcttacaattacattggccctgtcattttgactgcaagcttttctgagttcaatttccttgtcagtaaatcttttcgcagttgattcttcaacagcctgtttcccctttttcagcagttggattccttgtctttcactacttcatgtttaagctcagctaattc

SEQ ID NO: 7694 - DNA, 1784 bp, Arabidopsis thaliana landsberg
ataatgtataaagtagagtacttgagtatgttaaaaaaagactaccagagttaaatgacatcataaatgaaactaaaaacagtttgagtttcaatccaaaaatagagtacttgagacttgagaggtagttgaaaaagagttaattaacatcaatgaaatgaagttataaacaagtttgagtttcgatctaaaaactaggatttggaactaaaatttgcctctgaaattattggagtaaaacggtgcaacgacggcgagtggcagatcctttggtagaatagaaggaatgaccacgtgtggttggttgttgtcatcactattatgatttccctcgtaaagccatatttcattatcattgtccccatcttatttcacttcatacatacctagaaacacaaaaatgtctacttacacacatttcagcatatatatcacattttgtatatacataatttaaataataaaccactccaacttttatgaattggaaagggaacataatcaaaaattataccaaaccagagtttctaaaggataaacattttgtggtaaagataaaactaaatagaagtcatactttaaagaaatggagaatagcaattgatttaacatgatacaatctttttttttgaaaaaacatgttacaacgatgaaatagataaagatgtcaaagtttatgctgacaaaatcttttttaaaaagagggtaaaataagtttaacatgaaggtatgagatcaaaaggttatgagtaaaattttctttctatgaaacagcttaacttaataaaatacatatcaaattaaaaaaaaaagacattgacatatatatcatcgatgtaacacatcaaccaccatctttcttgagagttttcttgttcgtgtgaggagaactaagatgtgttttgaatggaaggaacgaagatgtgagttttaaacacaatcacaatgttttactatggttttgcttatgttttgctatggttttacgtatgttttccttatgtttttaatattatcttttaaatatagttcttccaaaaatttcactttcccaaaatatatttaattagtataagaatttatagtttcaattttatagtacatgcccgcctattttatagtatatttaactgtgactttgattatctatcatgtcgtcagtccaagaagccatgttatctaagtttctaacgcaaagcttaacagcttcctcttcggttcacctgaaccgtcaatttcgacggcgatatgttgttgcagttaaacttcaccaacccgaacaagaaaatcagtgtgatgtttgagaaagtttcggtaaaaatattgtttaccgacgaaatgattgccacacaaggtatcttgccgttttcgctaagaaacaacacgactaggctacaaacgatccatttggttgcaaagccgatcttcttgcctataaatgatatggttgagctcagaagacaagtgacgagcaacatgattgaatatgaaatcataagtagattcagagtaaaagttgttattgggtatattaactattcgtattggttaaaagggagttgtcaacttcagttgaccagtccgccagccgatgacttactgtctcggaagtatacactacaaaaatatgatgaagaatgtatgatgggtgatatatatataaatattgatatataactcataatactatttagattatgatgtatatctaattagctttcctctatctatccaaatatgatttctcttcttataaaaatattggtcttcatatatgattaaat

SEQ ID NO: 7695 - DNA, 803 bp, Arabidopsis thaliana landsberg
atttttaccaaaaaaatgtttatactttagaaactctggtttggtaaaatttttgattatgttccctttccaattcataaaagttggggtggtatattatttaaagtatgtatatacaaaacgtgatatatatgccgaaatgtgtgtaagtagacatttttgtgtttgtagatatgtatgaagtgaaataagatggggacaatgataatgaaatatggctttacgagggaaatcatacacagcgatatacttgtgtatttatggttgtatgggtcaaagcagacttaaatgtttggttttcttttactagctatattcatttgactcttcgaactttgtgggtgtttatgtaattcgaaaagcattcaatattcttcatatacactcttaagaggaaacgaactaaaagctttattctagacccgagtttttattttcaattccctagttggataattctttttactaacatatctataaacttgaaacctataattactaattaaatttattttgggaaaatgaacataagcaaaacataagcaaaacataagcaaaacatagtaatgattttttttaatgtaataccaagtagtttagagattataaattttttaaaaatataaatataaaaacctggttaaacgtttttctagatacgccacaacatgccaatagctcttatcgaagtgattatgtcctaatcacatttatctaattagaagattcatgcaacgcctacgctagaccgtattgaaacacatcctttacacgagacaattggtaaatttttcttatttggg

SEQ ID NO: 7696 - DNA, 2883 bp, Arabidopsis thaliana landsberg
aatcctcccaaagccgggaagataaacctacgattcaagtaaattactattaaatcagtgcaatctaggcaaataactaattttctatcttctataattgatgatacataaggcattgctaagagattaagtcattaggcaagatcattacacaggcaatccaaatccattactcaggaacagttaaattcaaattaacgagaaggatcaatacgcacgggagtatcacagaagaccaagaaaatgactctggtgcatcagaagcaagcgaatcagctacttctccactgtcggcgaactctcctcccgtctcagctccgacctaaccatgaaccaaaaccggaaaaatcaaaacttttgaattttttttagaagaaatcaaaatcagagaaaattgcttttcacctggaatatatgtctgtatctagtagtgactaaacccggtttggaaacgaagcaagtacgttcctttaaactaaggtaagacgagtcaggcctcgatttaaaacacgagcagaaagtacgaggagaagggttcttgaagtggtctcgttttaacgctctgattgcgaaatgtgactgaaccgagacagcgaaagccatgatcggatcggagtgagacaagtgaggattctcccgctaattttggtcgcttatctctcatcttcgagattttgactcctgatattatttttaaaaaatcgattctttccattaatgtgtggttgtgtttaaagcaaggacacgattgtaaattgacgttttagggttttttgtttgtgtttggcagagtaaactatttatagcgagacaccacttactcttccgccatttgttaaacctctaaagctcgtgagaaccaaaagcttgaatcaaacgcttttgaaatcatgggtacattttcaattccgtttctttctcgttcgatttctggcaaagatataacctttctagcatcaatgtcgagaaattcttcttcaatagtggtgtattgatgacttgttgattctctgttttgcaggtatctctcgtgattcaattcacaagagacgtgccactggtggtaagcaaaaaatgtggaggaagaagcgaaagtaagctttttaatcttcccctgcttaaatattgaatcatagagtagattggaatcaaaatgaatcatgagcttgtcttgttctttaattttggttgtttctacatgcttgataactttgtataacttctggttgaagcaaaattgatgatcacataaactaactttggttatctcttataaaggtatgagcttggaagacaaccagctaacactaagctgtcaagtaacaagacggtgaggaggatccgtgtgcgtggtgggaatgtaaagtggcgagctttgaggctcgatactggaaacttctcgtggggaagtgaagctgtgacccgcaagactaggatcttggatgtggcgtacaatgcatcaaacaatgagcttgttcgtacacaaactcttgtgaagagtgctattgttcaagttgatgctgctccattcaagcaagggtatctccaacactatggagttgatattggtcgcaagaagaaaggagaggccgttaccactgaggaagtgaagaagagcaatcatgttcaaaggaagctggagatgcgacaagaaggcagagcacttgactcgcaccttgaagagcagtttagcagtggaaggttacttgcatgtatcgcatcaagacccggacaatgtggtcgtgctgatgggtaaacaaaaaaatcttttggattgaaatcatcacatctttaatcagtgttttctctgagttaagaaggctgatcttggtgtattgtgtaatttgaaacaggtacatattagaaggtaaagagctcgaattctacatgaagaaacttcaaaagaagaagggcaagaatgctggtgctgcataagatacaaaactttcgattgggattttacttacgtttttgatcttgaaaatttgaaaagctttattcattcttttgttgagttagagtttgcattgagagatcttcatgtttatggattttgatcatttatagtcaaaatttctcaatttccattcaataaatcccttacaaaagaagtattattggtggaacaaatccaaaatacgttctgcaatttctgaagaggttaaatcttcagtgcatcttctagaagttgaaatctcctgttgcctgcataaatttagaggatacaattagccaaagtgaaatcttcacattttttgttattgtgtagaagttagtctctaacctgtgagaaaagaacatttttgccgtttatttgcataacacccgcattgaatttgcactcccacttgttcttggaacgcttcacctgcaacaccgtaggttgaagtataagtttcaactttcaagtccatcattgttagtaaatatgtaccactagaaaactatatagccatcatcattaccttatcaaattgacacatgaccaaatgttgaatgttcatatcatcatcatcgatatcatcttcctcatcatcatcatcctcgttcaaaggctcttcattctcatctacatcgacaatagcttcatctctcgctccatcttgctgaggaatataataaaatccatcactctctttctttggagacatcttcttctcaggtaaaggaattgcatccggagtctgaagagtcgtctgcactatcacaggtgtggtgggaatcgaagcagaagatgtttcgattgttccgctcatggctcctgcttgtatcatcttcgttttccacatctatagacataaagtcttttcaattaagtttcagaaaaatcctctggaatcatcctaaaaacccttaacttacaagggaagttaacaaaactat

SEQ ID NO: 7697 - DNA, 1383 bp, Arabidopsis thaliana landsberg
gttgatgatgaattaggtgaagaatcaagcatgaatattgatgcgcagagaaggccatggtgtccgtctaaaaaacaagtgttcggtggttcgtgtggaaatgatggagcacaacaatgtctaaataacttattaagtacatgggatccaagtgtaaggcttagcccagtctcctgcaattgcactcctcaacctaacaacaatattctttgcagttgtcctaacatgatttgcccatagaaaacgtctatttaagacccaaactgttgttctaaatcatttttatctgtatcaataataataatatatgtttcagtttctcgtgaaaaccccgaagacttgatttcagtataaatgtggaaacaagttgttattttgggatattagtatgtatttgtgtgcaattttaagtacttgttgtcaatgatcaaatcttcggttaaaacaaatcgaaaatttttttctggatattcgcttcgtgcccagacctagttgtcattatttaggaacaacaaaatttaattgctaatttggatttatcttgcgtccaaattctagtacgcatatgattcaaaaatcgtccaaaatggatgcaattcagtctagtcaacgtgaataaaaaatatctctctttttttcttaaacaccatgttttgttttgtgaactatatagctttgggtcttaaacatcatctttttttgttagggcaatgacatatatcaaaatacgactccaaatttttacaggccatgccagattcaaatataatatatgcctggttttgtgggcttagggttcagactaggccgagttagcccgattgacatgcctagtaattttttaaatttattcttttaattttaaatctatcttttggaaaaaatctaataataaatatatatatatatatatatatatatatatatatatatatcaaaagaatgattctaaataaataagtaatcaatacctattttacgtgatgatttatccaattttggtttgttaaacattaatatcacaaatgaaaatgttgttaaatatagaaaaaaatcatgatatagtttcagataaggcgataagggccacactttagtgaattttccttgggcctctaatatgttggatctgctctgtgtatatatgtaaaaagtaagttcgttcttgggacagtcacaagctcttaacaacacataagcaaagaaaagacaaaaaatagaagaaacttgccagaaaatatgaagtttgttgcaatcttcttggctacttgtgtctcattctcccttttcccaagccacctgtcacaaggtcttctaatcattccaccgaagttaccattttgctcattgaaatttggttgacctaaaccagttcgatttaac

SEQ ID NO: 7698 - DNA, 2134 bp, Arabidopsis thaliana landsberg
gggtgcgcggtcttaccaggtggaaaagtgcctaactgtttcatgaatcaagcttgtggaagttccgtatctattcctttacatgagagctattattctgaagaatttcttggctttaaggcttgcattgtgcttgaaactccgcctgacctgaattttaaacaatcgtggatttgggtacgctgctatttcagagacaaatgtgtcgagcatagtgtccagttttcctgggactcgaataagatggatcacctgcttatgatcaactttcggctccctacaaaagaaataattggatgtccatctcaattggacaccgatgacttgatgtttttttttaaccaccatatgtattaagcttgtaattcctacgtaaatccttctccatgctcagtccaaaggataaaaggatgtggtataaaattttgggatgtctctcccagagttctatctcaaagtgagcttgatacttacttctcctggccaggtaacttctaacattttacaactgtaattttatcctaattcataatggactagaacatgactaagattagaccaagactaaagtgataaatgactatcaatttcatagtttttcatgccaaccagtttcttcttcttcttgcagttaaaggtgaaggtgaagctgaaggtgaaagtgaaggtgaaagcgaagacgaacaagaagaagaagaagacgaagacgaagatgaagatgcatatttggagattgaggatgactcgagcttgtcgtcgtttgtaggtattgagaacatcttacagctctagttttctactgatttaggatcaacttgggattagaccatgaatatagactatagtctctaacggtgacaccttcatgattttcacaggtggaggagaatattggtgaatcttttctaaatacaaacaccttagttcggtgactctttgagtttgacggtgaactttgaggctatgtatcagtgctgagaattggctcaggcaagagttcttctactggattcaataaaaaccatcatcttttggatttaatagcttagcttctctatttttggtctcaaaaactaaagtacaataacgtgtttatacttaataatgaaccacacttaccgtattattgatttcgatcgatcagttacattcacagatgaaacatgttgcggtagattaccatttcataaatcatacaggatcaagttcaaaacagcaagttactgaatccacatcgtactcgtcacacgttgcactcttagtgctttcggcagaccacacgagctacaagagccaggcagtccttttatccataaccaaaacaaatatgtgaagaatttttgtaccatctctatccaatactatcttaaaaaacaatgtgtaaacaaacaaacaaaaattatgttagcgttcgtctagattataaacaaaaattatgattataaagattctttcatctaaaagagtaactaatctaatagaactcttatgtttgctttaagttacattgtacgtaaaaaaagagagacctacaagtgtgtgtattgtgtaatgaatatactttagaaatccttaaatcaactaatccgtggtatgaataaatgatcttgtacgtatatataaatatatcttttgctcctagatcaagatgatggtgaactttgtctgccttcaaaatctctcctaataatctccagaaccatctcgttccatgtgtccactggccctggcatgcaccaatgcaaacagtcttgtggaggaggctgaccgtctggtccacgttttgtgatctttttcgggtcaggactcctgtatggaccaggatgaccgtcgtggcgatacccgaaagcctcagtgatatccattagcttcagcttcttcgatctattcccgagcttatcatccgcgacacgacggtgaaaccctgttgcttgcttctcgtgcattatctctgtgaacccgtttgtaactaaattcccaggaggaagcggctctactttacctgtgcatgatccaccagtgttccacgcaccgccttcataatgatcaggcgaccaagtacgtaagatggtagacccgtgtagtttgggtgtttaccattgcctttatgattgtttctcagagatccaaatgc

SEQ ID NO: 7699 - DNA, 386 bp, Arabidopsis thaliana landsberg
ttaagagggttattaaaatgacaacttctatggtctcttccatgcctatttctccttcttcttcttgtatttccgcatatcaataatgcccttggctcacaaatggacctccaagcactaagtgagtctttttcgtttttatacgtttactagttaagtttatttagtgttgtttagtcctgattttggttttggttttttcgagttaacaattttcaaaatgcaacaacaaaagtaaaacttaacctaacctaaatcttttggtacaaaagagacaaaccttcctgatcaagtaacggacaaactcggaagacttccggatgcatattgatcttattgacgatccttcagatgcagcgcaagtcacaagcgcaatatgggattag

SEQ ID NO: 7700 - DNA, 545 bp, Arabidopsis thaliana landsberg
tatctaagcgcaggccttatctttctgtggacatgactgaagttttccctcttctcgctggcttcctcgtatttttctttctttttgataaagacgtggtcttcttctttacagacaatcttggcttttccttttcttgcgcgttgttcttcatcactcaacgtagccgccaattcatagttcatggacatcgtgtttctctcagccgcgtgatcatcgtcgtttgtcgtcattgtgatctgaacccttactcgagaagcttgaggaaggaggacttttgagagagaaagagaatgagaatgagtgttattaaatagttaaaatcagttctggaatggtaacattccttttttacctttcagcaaataggttaattactgtgattaatcattaattatgacccacttgccttctttttacatcattgtatttggagattgtgtgtattatgcattgaatggaaatctatgagcgatggcaaaaatgtataattgtccattttttattttttttataatcatgatagtttttacctttatataatt

SEQ ID NO: 7701 - DNA, 722 bp, Arabidopsis thaliana landsberg
gacttcctggtgttctcttattttaccagactcttatgttgatcaagagatcaaagattacggaggtgagttttatgttaatactgttgttagtgattgctttaacacagtctatgtttcgtagttctctgtgtgttctgttttgtgtcataatcgatcaagactaagcttagaactagaattttcatatatctactctcaattaagcacaaaatctcaggcgttgttaatgttaagactgtggagtgtggaagtagaatccgtttcctgcactcaactagacataagactcttctgtgtcacttttgtgtgttccatgagttgttccctgtagagaagccaaaacattttgattccagccttaagtgtcatctttgacaccgatctttagtctgtttgtttgatagagaagctgtttgtttgatagctgaagctcgagggtcaaatctttaaactagcgtctctgttttggtttacttgttaagttcactgcgtaatcaaactcttcttctaacgtattgtgcagctgagctgtttgtgaatggagaaatagttcaacgtcctccagagagacagagaaagatcattgagttaacgacccagagaaccaatgataaaccaaagtaccacgacaagaccagatatgtccgaagaagagagaacatgcgttgaatccaaatctgatatcagaccatacagaagttgctggtcaatgttcatgt

SEQ ID NO: 7702 - DNA, 513 bp, Arabidopsis thaliana landsberg
acaacataagtaattaaacgcagcgatagtatctcgaagaaatttagatatattacgagagaagggtatcaaaatggttggttaattaccttgatatgagccaaatagagatacttgacagaggagaaagatgtcagaaacttgtcattcgggtaaaaaccacagagggaaacgatggccttttcaaggcatggcatattctggatggagaaattgcctcctaaagagtcaatgatgctaaggtaatttaatcccggggaatctataaccaatgacctaccagaaccatttttttcaagtgattgcgaatcaatgaaccttgtcacattgtcactcttatttcggatcaccaacaaatatctgagaacagggcaactcaataaaagcctaacatgagaatcttggtctttatacaccacattgacaaggagcagcgattgaagggacgggaggcaagccgcggaaggaacatcaacaagaatcttgcccataagattcaatttcacaagcgtt

SEQ ID NO: 7703 - DNA, 1823 bp, Arabidopsis thaliana landsberg
taaagagatctcatggaactggatcaacaaaatgttcaagatatttgtggctgcccatggcatgaaggggaactacacggtctgaaatggttgattttctggctgtgccatatactagaggtccctaacatggcagcaattctaatgatcccaaacacaaggtgagtagcaagaattttttgtcgtctgctcgaggttagcgagaggcaagcattcacctctcctcctgagaggttgtgtgaccatgtcatgactgcaactcgagcgaatgttttcaaatcacttcatgtgtagagaaaatattgaagaaaagatgttatggttcgttctacttaattgttttgttctttgtaagatattggatcacatttaaggaacacattttggtctgggatctgtttctctaacttttcctaaatactcaatggaccttgtgagagattgttcttacttatggtgtagtatccatattttacatacctcactgaaattataccaaaatagaatctagaaaccaatattatgcttactatatgtagcactaaattctgtgttcatttcaaaagttggagttggatacaaacactagctagcaaggcagagagtccgggagtcgatgagaatggtaattcttttgaccatacaaccaaattgctacatctcgcatggcatccaacagaaaactcgatagcttgcgccgctgccaatagtttgtagtattgtacatgtactatgcttaaagaaaaaataaacaaacatagtactcaaatgaagaagaagctttggcacttgtgaaactgaagggtcagagaatgcttatataacaacatccatcatcagcatcttcatatgacagctaaaaactatgctctcaatttgcatcatccttgacgacttctttttttcttttggggacattcacttagaaaaaattgtttacgaattaattaacaattaggacgataaaattgctatatttaaagctaatgtctttattacgtaacttcaaaaattttgggaaaaatatagagcgacttaattttgtgtctcgtagcattactccaatatgatttggttgtggaaatatgcttaagggaccacattgaatctaagccgtccatgcgtcgaaacgcagccacaaatcgtagccgtagaaatgacgcgatgatgggaattgagaaagggaagtggagtgttagtcccacgtgttggaggaaacagaacacacgcacgccaaatggtcagctcttacggcatcttaacgctacgacaatatccttaatctgtttccatcgacacacgcacggttctgattcattctcaattctcaacggctacgattcgaatattctgaggtgtaatgatctatctcatcgagtgcaagcatacatacttgcttcacaagaacgctaactactatttgtctacttattcttgagccagagtgggtttttgaaatgatggactcatatatgacttaaaacaaagaagatattttcaatcttttttagctagctaattataatactatatgcttatttactgcaaattaaataatgtataaagactaatctattacttataattttctttaatttatgatttctacgtgtagggcttgtgcatggataagaagactcatgggaaatgggcgggacttgggagagaacaactcttttctgacgtttccgttgtcttttgtttgatgtcttctttggttaggtttaattaagaattctttttttgtcggcatgtctgattaagaattaaaatgagaattctcttataagcaaaatatttttagcataaattttagtctttgt

SEQ ID NO: 7704 - DNA, 1729 bp, Arabidopsis thaliana landsberg
aaaaaaacactttgtattagtccattgatactacttgatcatatgtaacgaattaaattctggtcgactggtcgttaaatttagagtggaaggtaacgttcacatgtttaaaaggtccaaagtcaaaaggtacatgcgtggcatagatttgccaataaattaaagaaaaaaaggtaaattcaagaaaggcttatcgagctaatttaagcccaataatactgaactatttgggcttgagtcttaaaggcccaatttgtggaggaggcgtcatcgtcttcgcttttccttttcccttgagaggtcgtcgacgaggtttaagatttttaagaatgttgtagtagcttcgcgaataatctcaggtcttctataaaaccaaactagcgattagccgactcttcctctttattattacaaagacgaaaaggcttcgagttttgtaatttcttcttctgttacaagttcttttcactgtgaaagtaattcttcaatggcgaaagacggacctaattgggatggtttgcttaagtggagtctctctcacgccgacggtactcgacccactcgccagttgaggtacggacattcatcttgtagttggttttttaggttctgtcttttgatttgtctgaaactgatgggatgcttggtgggtagtttaggtatctgtgtggctatgattgagctttcacttgaggagatgaatcttatgagtgaattcgaatctgggtttgtttaaagtagttttcttttttgaagatatctgttcagttcatcggtttggttaagattcaattatcgaattctgctgttgtgtaggtgaaaggttatctattttctcgtttttacatgaaactctgttaattttttttaagggaattcacgatttgttcatgtcaaatcattctgtatgtgttttattgtggattgttttgttgatttgagttgttttaatgagacagtgaggaggatcgaaaatggtttatggaggctatgcaatcgcagactgtagatgtagtcaaacgcatgaaggagattacactagttatgcaaacacctgaacaagttttggtggaacatggagtaacacctgaagatatccaaggtgcgtaatttgtggctataatacatagcttagatctttatcttttgccattgtgtgtagggtactaattgagtttattattctggtagatttgctggatgagctgcaagagcacgttgaatcgatcgatatggctaacggtacattatctctaacttggactttgctttttttttttttttttttttcctgttctggttagctcaatttgaacattgcttgtaacaacttgtttacttactattgtgtagatcttcattcaattggaggcttggttcctcttcttagtttccttaaaaactctcatgctaatattcgggcaaaagctgcggatgtcgttagcacaatagttcagaacaatcctagaagtcaggaacttgttatggaaaccaatgctctggagtcattgctctcgaatttcacttcagacactgatattcacgctcgaacccagggctcttggcgcaatatcatgtaagcctgcttctgatagttcatttttagtaaagattgagatgatcaaaagcttttgtgatttctatctttacttggtttgtgatactaaaagagacttatcttttcaatatgggatgtagctttgattcgccataacaaaccaggagtaac

SEQ ID NO: 7705 - DNA, 777 bp, Arabidopsis thaliana landsberg
aaaccaaaccacaaccggaactgcatcagcggctccaacctctgatttcctttccgtttgactcgatagtatggctaatatagagagtgattcatcaaccattccgctttcgggttctcttagtaaccgcattagcacgggaactaaaccggctctcacagcttttcctttgtttccttgaaatatgcagagattaaacagagcagtagccgcgtcttttttgcctctctgtgatccatcgctcagcaaggtcacaagatgtgggatcgctcctgcggcacctattgtcactttgttctcgtctataaccgagaggctgaaaagtgtagctgctgcgttttctctagcttccatgctacctttctgaagcacatgaacaatacctggaactgctccagatgaataaacaatcttccctttgttctcttgacatatcgagaggttaagaatcgatgtcacagcatgttcttgagtccgagagtcattagatatcgtgaggagattcaccagaagaggaattgcgcctgatgcagcaatggcgactcggttatgattgttttgtttcgctagaagacggatttctcctgcagcagatcttgggtcttcaggctgttgcgatgtgagcttaagtagaagttcttcaatcttgttatgttcatcatcaggggctgaggacgaagatgaggctttactactcggttgagaattgttggaacgctttgggggttcaataccattggactcacaccattgagctataaggcttcttaggacata

SEQ ID NO: 7706 - DNA, 692 bp, Arabidopsis thaliana landsberg
tgtaaatataaaaaaatgttggaaacttattttttcctatgattccagtcggatgattgagtggttatggatagcgccaccaaaatatttcataactttgatgtttttatgagttacaattgatgtataaatcatttataataagtacgttatgtttcatcgtttgtaataaattaggcacacattaaattctctaagctatgtctaatattagtaaattacttttcgttttgaaaatcgtgaattagatgattgagttgttatggagatcgaaagtgttgagctattttggtgttttaagtgtaataatttatggataaaatgtttgtaataagtttggcaacttttaactatgtctaagattggtgattttactagcagtataaataagtgagatattatcattaaaaatcgctctagcggtttgcatagtataagcgagcttcatctggcttatttacctttgcaatatcctcttttgtttccgtacggggaggatggtttctggttagtgatggaaatcggatttgttgatacgagaggaaggaagagaaaaacggtcactatgagagagttttgatgaatagagacgatgcaaattttatgctaaaatattcacaaaaagtgtgtgatgatgatataattttagttggttctaagttcttaacctttattttggtggaaatattttt

SEQ ID NO: 7707 - DNA, 1542 bp, Arabidopsis thaliana landsberg
agtctctcgctttctctcattgatatattgtgggcagttcactttgcgtccacatggtaatcttggggtagacagatctagtatccctagtcgattaacagctttacgagtgatggatgagcttctttcagaaattcctgaaatcagcagtaagaccgaagaaatcaagcagttatggaatggacaacacaacaagatgatgatcgaagagccatggctgggtgaaagcactgttccaagctgtcttgaaaacattagaagagacgacatggagatagttcttttgggcactggttcctcccaaccctcaaaataccgaaatgtcacggcaatttacatcgacctattctatagaggcagtattctcttggattgtggggaaggtaccttaggccagcttaaacgaagatatggtttagaaggagctgatgaagcagtcagaaacttgagatgtatatggatctctcacatccatgctgatcaccataccggtcttgcaagaatccttgctcgcagacgtgagcttttgaaaggattggctcatgagccagcaattgtggttggaccgagatcgcttaagaactttctcgatgcatatcaaagacttgaggatttagatatggagtttctcgactgcaggaacaccacaacaacatcttgggcttctgtagaaaccagccgccctgagaaaaataccagtagcggcaatgcagagggttctttgttcagtaaaggaagtctaatgcagagtatatataaaagaccgagcagcccactgacagacaattcttcagctttaccattcttgaagaaactgaaaaaagtcctcggcgaaatggggttggagcatttgattagctttcctgttgtgcattgccctcaagcctttggggtttcgttaaaagcagcagaaagaaaaaacattgccggagatgagattccggggtggaaaatggtttactcgggagacacaaggccttgtcctgagatggttgaagcttcaaaaggagcaacagttcttatacatgaggtgcttttctatataagcaaaactgtgtaaaacatttacatctcattcttaaaatttaccatcttttcaaacttataacaggcgacgtttgaggatgcgttggtagaagaagctgtggctaaaaaccatagcacaactaaagaagcaatcaaagttggatcttcagcaggtgtataccgaaccgtactgacacattttagccagagatacccaaagatcccggtgattgacgaatcacatatgcacaatacatgcattgcctttgatatgatgagtatgaacatggcggacttacatgtgctttcaaagattttaccttacttgaaaagtgtattcagaaaccaagtgggggaagcagaagaagaagaataagagactgatgatgatagcttaatgcgcgacaaagtccgaagctttttcatgaatgagtatatagattagaatgtactgatcagtcccctgtcgatgactgcgttgtattgtctttagagtaagatcaatgtaattgaggt

SEQ ID NO: 7708 - DNA, 506 bp, Arabidopsis thaliana landsberg
  unsure (1)..(506): unsure at all n locations
ttatatgggatcattctgtagatatatttatcagaatataaaaaacatattggaaactaatanatttttttcaatgattccactcggataattgagtagttatggatagcgctaccaaattatttcataaatttgatatttttatgagctacaattgatgtataaatcatttgcaataagtacgttatgtttcatcgtttgtaatacatcagacacatgttaaattccctaagctatgtctaatattggaaacttacgtttctttttggaattcttgaatcacatgattgagtggttatggagatcaaaaatattgaatcgtcttggtgctttaagtgtcatcgtctatggataaaatggccctaataagtttgtcatcttttatattcactaaactatgtctaagattggtattttatttttcttatcgtgatattatcttggctgcacaagacgcgggcaattcacctatttggtcaaattactatctattttgttccctatta

SEQ ID NO: 7709 - DNA, 954 bp, Arabidopsis thaliana landsberg
aatgattctaaattctttactctctaaactatttctacacatacatcattttaatatgaaaaaatcctcaaattcatgatctaaccaaagcttcttggaatctaataacaataacaaactcaatatatgcgttttgcacttctaaacaattgtttttctatcgaaacttttcgttaaggtatttacggttttttttatggttgtatatttttgtcatatctttttgttaaaataccgcatcttttggtaaaaattatgtaataattcaattatttgaatatattatcataataatttaatacatatatactaggttgtattcgtttccattggattcggttcagatacttagaaagagagccgacaaaataaccgaacttcaataggtatcagtttggttcggttccagttattttacccaatacccaaaaaaacgaaacacccaaatatccgaaactttttgacaaaattgtaatgacccaaaatattgggttagaggttaggacaaatgtattgggctcaaatgaatatttgtatagggttgaccaaatatttttggttccattcgggccctatgtatattcggtttggttataaccaatattcaatggatagtgtgcctcaaaaccattcggagtatttagtggtatctagaaccaaaccctttttcggttctgtttggtttggttcttcggtttcgttatttattcttaggcttaataagtacaatcaaatatgtatttgtatcttaatatatagatacaaatatttgttgaaaatgagtttttacgcgatatcgtggggttcatatcctaataataatcataattataataataataataataattatcctaataactattaatattaataattattaataatacggaaaaatttacatcaaatttcccacattttcttccacatttccttaataaaaaaaaatacccc

SEQ ID NO: 7710 - DNA, 979 bp, Arabidopsis thaliana landsberg
tttagtctgcggttgtgtctttattgttgcatctattcatttaaagttacgtctcttcattagatttctttgcattttttgtttctattttcgtataaacaaagttgtttattcaaaagtcggttgaactctatatttgtctttcttcctaaccatatttttgttcattcacacatattatttgcttaatgatcaattcaaaaacattaatctggaaaacggctccacattctttactctctaaactatttataaacatacttacatacatcattttaatatgaaaataatacctctagttcttgatctaaccaaagttttttggaatctaatagcaataacaatctcaataaatgtttttgcatttctaaacggttgcattttttatcataacttttcgttaaaatatttaatgtttgttttacagtcgtgtttttttgtcgtatcttttcgttaatatatttatggttatttttggtggacagttatacttattcaactttagtcgtatcttttcgattctgaacggttacgtctttttatcgcaacttttcattaatattatttacgattacttttgcggttgtgtcttcttgtcgcatatttttgttaaaatattgcatattttgggaaaatttatgtaataattcaaatatttgaatatatttgtataataattaaatacataaatactaggcctgggcattcggttcttctgttctatagcctcttaagatctatgagggaaccgaaaaagtttcggtttggttcagatacttagaaagaaagccgagaaattaccgaactctaatagataccggtttggttccggttattttacccaaaataccaaaaagaaaaaaaacgaaataaccaaatattcgattaacaaaattgtaaaatattaaaaaattaacaaaactctattgggttataggtttgttaaaaatgtagtggctaagatgtagttttgtatagg

SEQ ID NO: 7711 - DNA, 1841 bp, Arabidopsis thaliana landsberg
cggccaacctttttttttcctcttaaaatttcacattctttattcgagattatactacttataaagtataatatctagctcattcaaacaaaacaaaaagtgctgtaaggataacactatcaacgcgtgttaagaaaagtaacacttttgaacttctttttaccattgacaaattttaatagttacaaccatgtcattgctttatttaacaattttaaaaaggaaatctaaaatgtacataaacctttagctaatttacaaatatatcatattcttaatgcatctacaacaaccatattatgaactctaaatactaggatttgtaaccggattcggtttatttggactacaaagagtaaaaatggactttgtccatctcatctagccaatgttttataagattctatattgtgtgcatcatgcatgtgtctctcttgctcacaccctacatctacccatcgtttcagccacaattatgtatatattttttttgtcttcaacattttagctcatatgcaccaaattttcatgaaaatgtttgtttatcaatcatattcatcatgtgttgttagccattaatttcgaagagattgcaaatcttgaaaaaaaaaatggaattatgtgggggaaaaagtaaagaatggcacatgaagagagttttgcgtaattcccaaaagtaaagccagaaagatttttctcccaccccatgtgcttactctccccagtccccactttttcttaattaaattcatatttctttcattttttttttcggcttttaatttcttagcatactttaaaaaaaaatattgtcacactttttaggccgattttgactgagttacacaggtcaataatgctcccaattcggcggactatagttattttagtggacatttgtgttaactaattttgtggcaaaaagaaattcggaacaaattaaaccataactgatttagactaaattatataatgtaatggccattatgtattaactaaagacaaaagtaatactacgatctacgataatacaaaaaaaaaattcagaatatcgcgtcattatcaacttgacaccaacttgtgagtctcccaaactcaatgattatgtggtcattatcggtggtgtttttaaaaaatactatgaaaactcgctctcactaatatcaagtggctcacacacttgattcactaatcactggtttatcactactactataatgtttcgggctagattttctatcacgtgccaaaaaattccttcaaacaatttagcaagctaaccatcaaatttaattacgatttttttctttcatatccacgggtcggatattcaaacttaattatgtgtaatacttatatgaatgacgtaaataatctatgcacatctcgttttactgttgtgtgttgctttaaaggctatcatggataacgtatgtatatgcccttcgagaaaattttgaagagatccattcaacaaaacatgcatgacattttgaatatatcccagttattaaagactcaataattttcagaagtatattttgggtataaacaggtaaccgtacatattgctacacttgctattgtccatctataatgtgaaaatatcaatttaaatattactgttcttatgtagtctttagttcatgtagtatttgattatctggagaagaaaaaataaagatgataaataaaaaaattgtcggcaatagaaagatgagtttaggtcaaaatagttatgtactatagttattaccgacgtaaacactgataaattgaaaatgatgcatcacttggtttttgccaaaacgttttattagaccaatcatgtcttcaatgtt

SEQ ID NO: 7712 - DNA, 889 bp, Arabidopsis thaliana landsberg
tattttttcgttttactaatgggttgtttttttggatcacagtgaccaaagcagcttaccaaacgcgacactttaacctctatatataaatctccgtctagattccttccttatctctctctctcctttcattttcactacttcttcgtctctctctctctctctctctctgtatcccttgtgtgtcggtgatcagatctcgtgccgacgaaaacgtgcgtctaaagcaatgctgttcgcactctgctatcttcaattcctcgatttatcttgaactgcgattgtttgttgttgtttcgatttcgttgggggtaattgggtgaattagagaggtgaatgagaaattcgcctgcgattctgtctctgtcggtgatcgattgccggagcagaaccaggtcggattctagcttcgccatttggagtagtggtcgatggggccaatgcggctgatctgaatttctatttccctccccccaattcagatcgaattctagggttcttctaattcctgggtttttagtctgtgtttcaattgagtcacgatgcagcaagataatcgcaaaaaggtgaaacaaaaactcttccttttttccaattattccatccgatactatctgttctgtctgagatatttatgtgtgtgtttcggttaatcttgtttgtttcctgttactgtctttaatctttttgccgttttggacaactctgtttatgatcaatgaacgttacaagtgtcatcaaacaaacaacgcataattgtcatcattcaagacaagatgatgtgttgttgagacattttttttatttcttcatcagcaaattgacattcaattgcattgatccttcataagcgtccttttgagcatcagtagagaaccttctgcatctg

SEQ ID NO: 7713 - DNA, 886 bp, Arabidopsis thaliana landsberg
aacccatgaaaggtaaaaacatatacacactcttatgtttcaacaaataagaagcttagattctttcataaaatttcaggaaaccaatatcaatactacggaaacaacaacaacaatgcttcacagaattatccaaattggcacctaaattcacaaggccaaaaccaacaatctactggtggttggggaggcggtggaccatcaccgcctcctcctccgcggatgcctacaagcggagaagattcttccatgtactcaggcccatcacgcccagttttacctcctccttcgcctgctctagccctcggattcaacaagagcacttttacttaccaagagcttgcggctgccacaggagggtttacggatgccaaccttttgggacagggaggattcgggtatgtccataaaggagttttgcctagcgggaaagaagtagcagttaagagtttaaaagcgggtagcggacaaggagagagggagtttcaagctgaggtcgatatcattagccgtgtgcatcatcggtatcttgtttctttggttggatattgcatagctgatggacagaggatgttggtttatgagtttgttcctaacaaaactttggaatatcatcttcatggttagaccacttaaaaactttgagtactaagtttattttctctaatctatatattcaagaaagttgtaaccttaatttgttgttgtagggaaaaatcttccggtaatggagttctccactaggttgcgtatcgccttaggtgctgcgaaaggactcgcttaccttcacgaagactgtaagttttaacattcaccattctcattttcttaaccaagttgcataaaacagagaaagctctgtctctgactagtgttatctttttgg

SEQ ID NO: 7714 - DNA, 485 bp, Arabidopsis thaliana landsberg
ggaccttctcctccaaccatgacccagactaggagtcggtgacattatttcgctcgctatgttttctctcacttttcttttcttgtttgatacttcactttgttatgagaattgtgatgatctatggacgcctctatgcttgtttatactaatttttcatttgaaatctcttctcttaattacactgtaccttaaactagttttgccaagaagttaaaatgtaagatatgaaacgattaaaggatttacaaagtcgatggtgcacacaagggagaatatagtttgatgtttgaatatcatggatgtctatggtggactcttttcttggttttcgtcttctatagttttatgttttaatattatttgaaaaacaaaacaaatctgtcaaaagattgaaaacgagtctttttaaacactcttcatgtttttctctttcttaaaaaagttatttcttgtttttctgatgaaaaggataaaaatgaatg

SEQ ID NO: 7715 - DNA, 2001 bp, Arabidopsis thaliana landsberg
caaatctctttcttgtctcggagatgtcatttctgcattggctcagaagaattctcacatcccataccgaaacagcaagttgactcttctacttcaagactcattaggtactaatatcttagctcaagaatccttccttcgctgggttgtgaacaaaaaatattcactgaatttctgtcatgtcttcatttcaggaggacaagccaaaacattaatgtttgctcatttgagtcctgaagaagactcctttggggaaacaatcagtagtttgaaattcgcacaaagagtttcaacagtcgaacttggagctgctcgtgcacacaaagagactagagaggttatgcatctcaaggagcaggtttgtagagactaatccttgataagaagctaaacagtaacagaattcgtttctagtttattttatatcttgtgagccaacaaacaatgtgttcttctttcagattgaaaacctgaagagggctttgggtaccgaagaatggaatattgtttccaacggatcaaaggagataaaatcacctttcagcaggccaatggcaacaacagagagaactcctccacgtctcagaaggttaagcatcgaaaactgtagcagcacaaaggcaaaccttgaagacaggagaggtatcaaatcacctttagcctcccgtcgtgcacaaatattgaatctggagggtccaatgtcctgtaaaaacgaagaaaacggtaaaggagatcccaccatggaagtgcaccagctcaaaaatcctcggagtcctctaagctcttatcaaaaccgagccgtgaaagtagatggcagaacaagcattcctcaactccagctattgcaaacaccagttaaaggagcttccagaaacgacatacagatgatttctgttgattctaagacaaatggaaaaggttcacatatacggaagtccctgaggacaattggaaagctgatcaatggttcagagaagaggtatgacaaagactttatattgtttcaatctgcatgttaaatgatgcgtttaccagtttattgaaacgtttttgttatcacaggaaagagaacattcctgcagatccacggtcaccacttggagttgctaataatttcagtcatataaagtccccggatacaagcaacgctaagactatgcgacggcagtcactcacaggtgtaatgccaccagggcaagaaagatcacgtagatcctcaataggaggaaaaccaattgagaatggtaagaaagatcacgtctttacgccttttcgtctgaataaattcaataactaagactttgcttttgtaggtgtaaatgtaactgattcaagaaatgccaagacacctccacctatgcgctcagcatcaaagatagggaagaaatgggcataaaaagctattgaagaataacacgttttcttgctttggctcgaagcatagtatctagttgaaagtattttcagcatctacacttcagttttcattcattaggatgaaactgtttttcttcttcctgagtaaataagaactcaactttagagtgttctgactgtaacatagatggctcttgtttaagccattcttttaacagttttgttgttagtgtctctgaaacattgaattcatttatggtttcatttaaatctttacaaaaagaactctgtaatttctgtagtttgtgcagactatacagcaacaataaaaagaattctcaaaactcatttcaggtcagctaatcgattttgcatacgcatcaatcaaaagcttcttgaatctatggagatctaacctcactttctggtcgttcaggtatatcccctttgtgaattgccatcctttcttagtgatgctgtttggatcttttagaattggatcatctttatcatatttttcatacaatgagctctctcttggaagaatcttataaccattgtagtctagaccgagcttctttgccggttctccataatatgtctctgctgcccagtctgttcaca

SEQ ID NO: 7716 - DNA, 615 bp, Arabidopsis thaliana landsberg
tagctaggaaatattttgcacattttaagggattcgacaaatgtgctatacacgttagtatataaaagggttgattcggtttaaaatatgtgttcgtagccgcaaataatttagtcattgggaacttttattttgaagcccaataacggtgtaccgtttggcccaaaagagtgatatggaaatcacaacacgtattaaaatcaaatggcccaaatctttaaaagtttcgaacgaatggagctggtaagagaacatcttccaaaaattaatacaattaattaaatgccagtggcagccactgtaaataagtcccaactccaggatttattttacaaagtggctgcaaaaatgtatatgtagatatagaaaaaaacctcaacttttttttatccggaacaaaacccaaattaatttattggtaacaaataaatccgaactataaaatgtttacagattcatacactgaatctcaaaaaaaaaataaaaaatccaatgttactcttagaagaaaaaaacatatttatttgttcgaaatgaaagttttgtcataccaccttgtaacatctctatcccgttatataaatatagacaaaattggagcgtcacgatagacgt

SEQ ID NO: 7717 - DNA, 972 bp, Arabidopsis thaliana landsberg
catgcatgtatctatcccacttgctgtatatatgacgcctcgtctatgacgtaggccaaaacagtaacatcggatactggcagacacacattcatatggccagagatgaccgaccattatcgaccttccttaaactgatctaaaccgcaaagactacttatctcaaaactgtttccaataacacttagtcaaatattcctttattaacaacgaaggcaactagccggtcctgacaatttggagaccaaaacaacaaattatatattttaaattaatgtaaactgttttaaaatttggaagccttcttcagaactaaatatttttgagagtctatttacaagtaatttttggtgtaaattgttttaaaaaaaaaatacaaatatttcatgttgctcttctcagggtcggccctgaagacagggtacaacaattagaaaagtaatccaacttatacataggataatatcttggttcgactcaagcttacaaaattgaacactccaagaatggatcgtaacaacttcgtcactcaaaaataatttgtatcagaattctaacaatctcctcaagcatcaattggtttcatgttaaatcattctagtccacccatcatgaagactcttgtatctacggttttctgttttagtggtggtggaaactctcctccacgacgtttaccttgtaattgtatatttttatccattaaccagtgccttgcaatctcgagcgaagcgtcgtgcaacactactgcacctaaaacattattgcatcacatcagctgttctaatatgtgatggatacgtccaacacctaccacacttgttaaattctcgctaattagtgattataatttgtctttaaataccgacaaacatataatcgctgtattaaatatacactagtgacgaatcgtttggtcgctacatatataccaacgcacgcatgtagcattggcttttggtttacaagaat

SEQ ID NO: 7718 - DNA, 1429 bp, Arabidopsis thaliana landsberg
ctcagcttcacggagtctgacaagtaattctccagcagcttgaacagcttcaacagtatctcgcagctgaattttaaggcccttgttctcctttttcaagaattctctttctttctccttctcagctctaatagcagtaagttcagctgagaaagcttttgcaaaacgcttcccgtggcgacctttcaaagcagctttagccgctgctttcttcacatcaactattcctgccatagtcacgctatgcctctcatctaattcatcgtacttctcctgcagttctgtgtactgctcgatgaatctactgtgaccaagcatagctctacttagagcatcatttaactcctctgtagccattttctccttcttgagctctatctctagatcctctgcgtgtctacgatggctatcaatatccatccttagatcatctgttaaagatatccattcactctccatttctgtccacctctcacgttcttcttctagcgcctcgctgttgttctcagtgttcttggtaaaatcaatgctcttcctcatttggaaagaccgtaacagcaacgaagatctaacattatccgttgattttgtaggctgaagcttgcttttgagctctgcaatctcctttagaagagcttccttttcactgagatcaatccttactttcccaaactcttcactacgttggtttgtttcatatgtttccttcacgacctctgtctcatcttctccatcatcagacttcattagctgcacaaacagataagcatagctaaagttgattatccatgtcttgcaaacaatttactaatgtgcttgttttctttgaaatataacctgttgggttaccttacttgactcctgcaaagcgttctttttgtattcgtctaacttaagaattataaaaacaaagtgtcagcaaactcaagttcaacatataacactcactagtctcaccataagttatttacctgataagtaagctgctcaattttggtagcctgctcgacacacatgttcttgagatgcttctcgtccacgcaagcttcttctattgccttatatcctccctgatgataaaagatacaatagtcaaaacgaatagcctcctactaagaaactgaaaatgaacaaaaggaaatgcatctcagggtttctagacatacttgagcttcttggtcaagtttctgtctgcaagaaagacagaggagaatcgatgatccaccttcttttggtctatctttctgtaacaatttaaccgaagcactaagattatcatcggcttcatcgcaaggcttcagagagagatgcccaaacgagaaggaaacagaagatctgtttgacagtgagctccgttggtgacagtctataatatttagtcctctctggagacttgcagctagagaatctgtaggacttaaaggctttc

SEQ ID NO: 7719 - DNA, 571 bp, Arabidopsis thaliana landsberg
ttatccttcttccttcaagcaagtcgtccaactgctcaccggaatccccaagaacccgacccaccaacccgacccgagatttcctccttttcactcaatccctccgatcaaagccgtgaccaacaagaaacaatcttcgtccttccgactctccgaacgtcgcaactcgatgaagcattatctcaacatcaacccgacccattccgggccacccgagattctcactcccagcatcttgaattttccggctctcgatctcagccctgacactcctctcatgtctgatccgttttatcgaccggggtcttttagtcagagccctagtgattcgaaaccgaactccgatgatgacaaagaaagagcgatcaaggagaaagggttttatttgcgcccgtcaccgtcgacaactccgagggatacggagcctcgacttctctctctctttccgatgactccgattcactcgccggcgccttcacctcatgatcattgatcaaccctagttttgcttttgttttatgttatgttgtaagtttctgttatgcttggtgtgacaactaattgattgatg

SEQ ID NO: 7720 - DNA, 1730 bp, Arabidopsis thaliana landsberg
taaacatgttgagaatatgtagtgtaatggaagtcaggtatttagacggttagttaattcttttagtaacttgaataatctgagttcagcaaatcactggagcaacaaatactatgcaataccgttcagggagcatgctacctccaccattggatgcttataccagtgacagttctactggaaatccaattgcaaaagttccttctagtgtaagctctataagcttttctaatttaccgtgatataaggtgctttttggcttgtgtcatccgtatcaacgaaacttcacatttacattcttatctcatgtggctttaccaccttagttagtcatatatgggtaaatgcatggatgtgctcactataaacttgtgtcgatgtgcagcattccatagaaacttagctctgctatagctccaaattgtgaacatgtgtttttttagaatttattattttccttgactttctgttttacgaaaatgctgtattggattaatgtttagttctttcttcatttaattggtgcagacttcagttagtgctcctaagagttccccacctagtgggagctcgggtaaatcaactgctcttcctgctgcagcatcatggtaagttttttttctgcaagccgctgtctatgtgaactattttatggggtcatttaaaaaaaattgaaaatgctattacaggggggcacgtttaacaaatcaacactctttagcaacttcagctttgtcaaatggatctttggataatcaaagatcaacatcagagaatggaactttggctacgtctacagttgttacaaaggcagctaatgggcctgtatcctctagtaacagtcttcagaaagcacctctcaaggaagaaattcaatcattggctgaaaaaagcaaacctggtgtgttgaagcctttgcagcagaagattgtgttggatcccgagtccaagagaactacatcacctaatagagaccctagtagcaatcagatatcctgtttagtagagtcttcatacaatagcagagtcattgacaagccttctgctgttgagaattctcttgaacacacaagtgaaattgctgaagatgtcttcgatgttggtaaattgtctgctgatgttgcatggatggggataactacaaattctagggatgaaacccctggtgttccagtggttatcggtactcattgtgatcttggttctattacacaatctgataacgatgtacaaaatctcgagcaatgtagaaaacagtctcctacaaacacttatgcagaagctgacatatcactgaatggaattcatggttcaaggcctgagtgggattggagatcaggtttgcaatcccagatagatgttaaggaaccgttggaagtcaatgatttctcatcattcaataacaacagacgtggtattgcagaggctgttagccactcgacttctatgtttagttcatcaatctcaattctggattcaaatcatctagcttctcgttcgttccagaaccgggaaacttcttgtgggatggattcaaaaactggatcctcctttgaaataggtagtgatagattgcatcttccaaatggattttctgagaaagctatgtccaatatggagcattcattatttgctaatgaaggcagaagcaacattcagaatacagaggatgatatcatttcaaacattgtagactttgatccctgggatgaatcgttgacttcgcacac

SEQ ID NO: 7721 - DNA, 1486 bp, Arabidopsis thaliana landsberg
  unsure (1)..(1486): unsure at all n locations
ggaggtagagcctatttccctttcgtctccttatggttggccttgttcctctttcttcattcctcctccaggtaattgctctgatgggtcttacttgttttttggttctgcttgttaaaaaagattccttttgagattttcctcaatgttaaacccaattcatgagacaaagttgagattttgttgggttacttagggaagagaatatttgaacattattatctacatgaacatttagagcaatactagagctgatttgttttgatgtttgtgtctcgttttcgaaagatatggttgagtcgttgttagggttatttgctgatatctgtggtgatatgtttgtgtatgtctatggaaatgttaagatggttcctcatctacacaagaggaagaagctagcgtggagttgaaaatcccggggaatgagatgttggaagtgaagctagcacattatccagatcctatttactcttttaaacctgaagatggtgaagagtgattcgataccttttccagcacgagagagcaggtaatgacaatgtaaagaaatttttttacaagttgattatagatttgaagtagcaatgaaatgtgttcctgacaaataccttggatgtacaggacaggattggaaaaaacagatgacgatcgaaactcaagcagtttgtacatacagttgaaaaccatgggagttatatgatctttgggtgactttatacaccttgtttactatgttttataattgacttaatataattagcttgggggcttnnnnnnnnnnnnnnnnnnnnnnnnnnngctcgggtaacttgacaatttcatttataatgacaattcttccctttgacacttgacctaagtgcatataaataatgtcttggcatacatattattcagcaatcatttgcaagtaagattaatgtatttattgagacacaaaagcaaattgaatacaaatttattcttctttttctactctgaagaaattcgctaccttgctcgaggaaccatctcggtgtctagattcactgtaagcattttcgtcgagtcatcgtagttttcctgatcagtcactatgccataaacaatctgtttcagctccataacgacctgactcatcgttggcctctgcgcagaagtgtgctcggtacaagcaagagcgatctctgacattttccaagccgagccaacgtcatatctctctcttagacgctgatccacgattcctctaatgtctccgttggctaatattgacctgacatgatcacttatatgcaccttctctgtttttgannnnnnnnnnnnnnnnnnnnctgtaatcacttcaagaagaacaaccccaagactataaacatcactcttttcgttcatttggcgagtcgaatagtacctgtagtttcaataatatgtgtcaccctagatgaaacatttgtattctttagtttggagaaatagtaattaagaaggtttttattacttactcggg

SEQ ID NO: 7722 - DNA, 529 bp, Arabidopsis thaliana landsberg
caataatgccatgaagagcattttgcaatatctcataggacaagacgggtatgagttttacgtagatgatgaagaagacgaagacgtggccgtgttttctttggaaggggcctatgattggagacgtattcattatttgattcttagagagtgtcgaaggctagaggatggactgcctatctatgcctaccggcggcagattttgaagaaaattcattgtgaacaggtatctttaagaatctccaagttgacaagtggtctttgggtccaagctagttttgaatcacttgagtacagaagatattcgagttatgctgttgtcttgttgtactagttcattaaggttcagttttctctgttttataaatgagtctgtgtttggtcattttgagtgtgtaatatttgattttaattgtgtttgtagataatggtgttgattggcgaaactggttcagggaagagcactcagttagttcagttccttgctgattccggagttgctgctagtgagtcgattgtttgtacacaa

SEQ ID NO: 7723 - DNA, 767 bp, Arabidopsis thaliana landsberg
tgctctcaggtgtctaaaagttgtcaagaagctatctctctccctagccccgtatttggaaaaggtttcaacctgtattctcgcaatcactgagtgacgtacattgtttacacctatggcataacttatgggaatattcctcttcttctttgttgtcttttatcttgtatctttttctttgtaaaccaaaaaaacgaagaacaacattattagttagtggtgtgtgttatctctttcatatactgaagcttgggagcaagagttttcccccaaaacgttgcggttagagaccgtgaactcgattataactgtgtgttgtttattttgcaagcaatcgttacttagtttcactctacatttttctccaaaatgtttctcagtatacaagggatttgtaaggtgtatgattttttaagattaagattttagaaaccatttttgtggtaaatcttcgtccatcttagtttaatttctaaagacatctcttaaagacacttactacctacatataaccttcttattggatttaatacttttacaatttatcaattaaaattttaatcgaactaaagacacttcactttgatcaccgatcaccaatgcagatgctctaagattctacattttacattctcgccccctactttataaggaagacgacgtactacctttatttgacaaatgttttctttctaggtgaaatagtaatgaatttgacatgaaaagatggtatattcaatgtactgataccaatagatggtttcagt

SEQ ID NO: 7724 - DNA, 2022 bp, Arabidopsis thaliana landsberg
tttccctatcttccataccacttgggtcctactgctttccttcagttaccaagcctttccattaatactctttcagcagatgcctgtgccatttccctccaactattttctatttcccataagctttccttcaaatagtccttcaggtcatcgagcgttggcacagaacctggagcatgtttcatttaccatttcccctagttaaaagagtcacaaattagatatctaaaagaactactcaagcaagagatccaactccatgaatattgaagaaaaccttaccccactgcaattcacttcctggagatgaaaattttgctgcaggaactggcaaagtgagaggcagcttcagtttcttaaactcctcccaagattgtggtagatctgtcaaattctggaagaacaaaaatgtgtcacataagtaactggttctgaatcactacgcagtaactgatattgtaaaagatacgtacttggctctcgtaaaaaggagtacgccaagcaacaatcctcggtgattctccagataaagaaacaccttccaatttattctttacagcgtctaaaacctcacacagatggtattctacctcttcttccacaaagacaaaaggagctcgcacctgttacaatccagtacatgcttgtgacaaatagaatcttgccttcaaattgtgagaaaaatgctcaaattatactcggtgaagttacctctttgacaagatcttcaatgacattctctgcattcccatatctgagcataagatttgatccttgcttcttcaaggtttttctcaaatcttccaatgctataatagctagctctaaagtgtccgttgtgtatcctacatacatataagcccgttggattagatacccaatcaagtaacgcttggaaatggagtcctatggaagaatcctagctacttgatctatgcaaaaccattccactctcctacaagctaaaacgaagcagaggttcatcaactagagagatccgaattgagctcaggtaaattcgaatttgttccgctaatcaatccaacatttggaatgtatataaacttactcgatagaatgcgacgatcgaggacgtagagaggtatgacggctctgtgcttagacgcagcgaggaggccaggatgatcatcaacacgtaggtcatgtttaaaccacacaaccgccgtggaaccttcattcgttgccgaagacaaacaacatttgcatcggtttttccgatcattccgccggagacggagatgcaggaaatgcgggagagcgaggaacgccatgaggacggtggaagaaaaccagaatcagtgggttagtactagtagtatccatgaagtcgaagcagagagagagagagggattgtggtggagaagactctttccaagtgtgtggtcaatactcagtcccacagagaaacacctaacattcaaaacgacgtcgtacttcacttttttctttctttcgttttttgtgttcaactgtgactgtcttcattagatttgagactatctatttacattctgattatttcttaagaagaaacggccatggaagtcaaaggagccacccggagctctatcatagttccttctgttcaagagatggtgaaggagaagatgatcacgacggttcctccgaggtatgtacggtctgatcaagacgtagctgagatagccgttgattctggtctaagaaaccagatcccaatcatagacatgagtcttctgtgttcttcaacctccatggattccgagattgacaagcttgactctgcttgcaaagagtggggattttttcaggcaagtctcaactaaagctacactattttcttatttaaccaaactgccctgaaaatactcaactctttacaaaactaccccatcttcttttgtgttagcaaattcatatggaattcaaatttatccttgtggcatgtctttatgaatattcaacagcttgtaaaccatggaatggagtcaagtttcttgaacaaagtaaagtcagaggtt

SEQ ID NO: 7725 - DNA, 3409 bp, Arabidopsis thaliana landsberg
cttggtgtcatctagaacccatagctcagcactataactataaacagaccacattaggacacctatctttcccttgtattctaagagaatcgaaccgtttacctctttaatttctatttctataaaactaaatttctcggacctaacatcaaagcatactattatctcggtaccatcataacacctatttttcaaccaagctatgtaatataataccccgttgatgcatatcccatttttgtctttatgaggttcatgcggaaacaaacattcgatctttctccacaatagctctcccgtccctaatgtcagaacttgatattgctcgttggaggttcttccttgtctataaaaattcgtccagcacaaaaccttgaactgtttccggattggatcatacccgaaaaagcatttcaatataacattccccgttcccactttaggtgatgttatgtccaacttccagaataacccatatgatactcttttgctacaacacttaagttctttccatcagtttgaggttgaggggatgagaagtagtaccacttgctgccacttctgaaggtgaacaaaagacgtggccgtgacaatgactttctgaggaacgattccgcaaaatctggacgttgaagtatggaagcccattgtttcgacacacaacgacatattgcgatggaatccagaggtaatcttgagactatctcgatgatgagatcgatgtgaagcgtctctcttacatatgttgagaccgatgattgtgagttgcgtcggacgattttacggcgatccatcgaatcgttcttctgattgttcatggcgtcttctttacttggcatggttctgcttcacgaatacagttttacttggggaaaaagtaaatcacatggtacaattttatgaaaaggagtaagtaaggttaatagaaatatatattctgatatttaccacataatcttttagaatgtttcctatataaaagtttagggttttcgtaatactatcttggcttttacgggttttagtaatattctgtaatattgaatttctatttaaacaacccttaatatttttaactagttacatcaaaaatttctttaatttataaagcaactatttaaatagttaagtcaaaaattaaatcaaacaaattttcactattgaatgttttcagtgacgaaatttatttctatatcaatttttgtatagttaaaatgtcaaatttattgatcaacaaagtaaagtttatttacaaggaagaatgttttttgaaaaaaacacacagagaaattggaaaatataccggaaagaatttaagaaacccaactgaaaactacgaccaagtggacttgaaccaccactggaaatagtacaagttttcgtgagtcttgttaatgtaaggagctttctctgttccgaactaatttatcaataatcaatagatcagactatattgtctaggaggtaatgcaattgcttgtgacatctcgcattctcgtggtaggttgtgataacttgaaaagatcttaattagacaccgtttttaatcttatagttgaattttactccaaccctattctagttccaactctaaaatacagttctactgtaaattggatataggggtagatagaagtctctatatccgcatcatttcaatgaacttcatgttttccacgttttgtcgagcgttctcttcgttctgccgcttgatctccgcgtttttcaccaatatcatcttgctcgtcttctccaatgcttcgatccgagcatcttttccctgagctcttgtaagatctcgtggtagagtaagaagaagcataagcagtttgggttaaaggacttcttgtcagagtttcctgcgagttcatatataacaattactactaagtaagtaaaattaacgaatcaacatctattagaacaaaaagaaaacgactccttcttcctcaccctctccataacccggttcgtgagagtgtcctgaatgggaatggttttcttgtgcaatggcaaaaccatcaaattctcaacatgattcgtgaaggtgaaaaatccgtcatagcgatctttacccgtggacaccttgttttccattcctttgatgtcaactcttctaaaactttgtctttccaaattgtagtacacaacataaaatggttgggtccaaggacttgacggccaaacaagttcacccgtaccagttgcccacgttgaattttcctgacctgaatatggacaaacaaagttgtgcttcgaccagttatcattcttggtgtcatctagaacccatacctcaccacgaggactaccataaacaactaaatatacacctaacttgcccctatattttataagagtcacaatgaatgcattttctatttttatgaaactaaatttctctgagctaacatcgaagcaaattattatcatggtactacatttgatccaacctatgaaatacaaaactccattgatgcatatccctctgttacttttattatgaagacgatacataaacggacattctatgtttctccacaacaacggtcctgtccctaatgtcagaacttgatacttgtaggaggttgtttgttgtttattaaccacggtcatgcacaaaaccttgaattgtttctcggttggatcatacgcaaaaaaactgttaaaatcaagattctccggttccagtttaggtaaagttatgagctgcctcgtgcaagggttccatataacttgagtcctatctgtcattccctttgagttataactcataaagataaatccatgaacagattgacaacttttcatgtaccaattctcataagaacccatatgatgctctgttgcttcaacacttaagttattaccaaatttttgaggctgaggggatgagaagaagttccacttgccgtcaaatctgaaggtgaaccaaatacgcggacgagacaatgaacttctcaggaacgattccacgaaatcttggctgacaagtaatgaattccattgctttgacacacaacgacaaattgcgattgacttcgcagataatcttgagagtatctcgatgacgagatcgatgtgaagcttctctagtacatacgttgaagctgatgactgtgtattgcgtcggacgattttacggcgatccatccaatcgtccttctgaatattcatggcaaattttgccctaatttgatacaaagaaaaaaaggttttgcattactccacgaaatacgaatacagctttacaaaaaggattccccaaaaaagaagaaggtagaaaaaatattcacccacttaatttgataaaaaggaagccatatatcagattaggtgggtaaaaaaaaagaaagtagacaaaataaatatcagaatattttagggtacataatattctgatattaca

SEQ ID NO: 7726 - DNA, 1417 bp, Arabidopsis thaliana landsberg
ggaagggaaaagattggatcttagatttcatcactctacatcatcacaatctgtggaatctgctgcattggatttggataaaaatggttataatcatattaaattggcgtcttcatcaccgcttcaaccgtttccatcaggcggtcaacatcctgagactagtgctgctgctgctgcttacttctcttggcctacttcaagtagattgaatgattcagcagaagacagagcaaactattttgcaaatcttcaaaaaggtgttttgcctgaaacgtttgatggtttacctactgggaagaaagctactacattgcttgagttgatgatgattagagcttttcatagtaagaatttaaggaggtttagtctcggtactgctattggatttcggattcgacgaggtgttttgacaaatatagcggctattcttgtttttgttgctcggaaagttcacaaacaatggcttaatcctcttcagtgtttacctacagccttggaggtgagatatctctttcctatgatacttcagttttaatttattgcttgtgcatgaaagagtggatattggaacttttagtaatgtagatactacagcatggaacctattgtagaatcctttaataatgtcgcctatttaagttggcttatggaatccttttactttaaagtatcttactttgacagggtcctggaggagtttggtgtgatgtagatgttgttgagtttcaatattatggtgcacctgcgcaaacacctaaagagcaggtgtatacagagcttgttgatgatctgagaggcagtggttcgtccatcggatctggttcacaggtaacttttgtactaaacttgcacatatgcttgtattatcgacaatcttattgaaaatattatctggccatgcctctcttcttgtaggtggctagtcaagagacatatggaaccttaggtgcaattgtaaagagtaaaactggtatcagacaggttggcttcctaacaaaccggcatgttgcagttgatttagactacccaagccagaagatgtttcatccattgccacctagcctcggacccggagtctacttaggtgcagtggaaagagcaacttcattcattaccgatgacctttggtatggcattttcgctggaactaacccaggtagcccagtaacaatgtatagagttaactctgatgtataatggtgtagcacaaatttaattatcggtttctctcttttctgcagaaacatttgttcgagctgatggagctttcattccatttgctgaggacttcaatatgaacaatgtaaccacaactgtcaaaggggttggtgagattggtgatatccatgctactgatctacagtctccagttaacagtctaataggaagaaaagttgtcaaagttggaagaagctcg

SEQ ID NO: 7727 - DNA, 886 bp, Arabidopsis thaliana landsberg
gcatatatataaggaaagccagcaaaggttaacacgttgggtttgaacgtttatttgcgagtaaggaaacaaaatgcgtacattgacattcgcttttcgaaaagtttgtcttgtgtgctcagataaggcaagattcaaccagcaaaagagaaattagaggaacatgtgactctctccgcgtcctcatttatggaaatatgagcagaaacagaaggaaatttctaattatttggagaattaagggccagattaaccgcgtaatcactctctcttttgggccactcgtctttatctttttacatttgtctataggaggactatggtcttcttctagtcccaaacttgaggttttaagaataaaacagatcagattttagtctatgtactatattcctttgaagagaggagacttgcaaacgtattgcatcaaatatggagtttggaagcactgaagatggaaggcatgacaagtttcctgtaggaatgagggttcttgctgtggatgacaatccaacctgccttcggaaactcgaagagttgctgcttcgttgcaagtatcatgggactgcatattctttgcttttgtttttttttacctgtctgcttcggaattggggtgcatggtcaatgatgtttgattgattacgccagtgacaaagacaatggagtcgaggaaagctctggaaatgctgagagaaaacagcaacatgtttgatctggtcataagcgatgtagagatgccagacacggatggttttaagttgcttgaaattggtcttgaaatggaccttcctgtcatcagtacgtctcctaccattgtttttcatatcaactctagcccttattgtaacctgcttcattgtctcagtgttgtcagctcatagcg

SEQ ID NO: 7728 - DNA, 1353 bp, Arabidopsis thaliana landsberg
ccttttgatgctataactataaccccctaaaccaagggagggaggagggcaataaaacccacactaattcacctctcatccaccacccatgagaccatgacaatgaaaagaaacacattttcttaaatatacactttacactcactcacacacaggagaactcttttttttcaccatctcacattgttgagtattgcaattgtgatttgttgtagtgaacaaaaataatggctcagttgaagcttgatgaacggcttgtcctgcctttaagatactcctccacggagatgccttgctccatacttcccatggaaagagagtcatcttccatgtcaaggaatgctaggtttagatgtgactgcagattagacctccgcaatttctcgtccttgagtagcattgaatcctctaacgggttactaacttgtagctttgcccattttagcatctctacgtcacctttaagaagctctaagacctgcatttccaaaagacatatcgtgttaataacttgtttgatatagtagccatctctaaaatgatgaaactggcaatgaaatggaggattaagaattgactcaccattcccatcgttggcctagtttgagggttatgtcttatacaaagagtggctgctaacgccatcttctccatctggtcactattgttgtcatcttgcaaactcgagtccaatagctgtgaatattctttatcatccagaattggcttcgcctgcaagtgtacatgcatgtctgtttagcaataacaaagaaagcttagacatttcaatgtaagaacattttgccggtagtatccacatacccacataacaagactgtcttgagcctttggagattcgctattaaccggttttcttccagaaagaagttcgaggagtacaacgccgtaagcatagacatctatcttattgttcatcttaccatacataaagtactctggagctaagtagctgcaacaagaaacgtagaacattttcaagattgttatctcctaaacaactttcacgcagcatcaacatatattttttttttttcctcacccaaaggtgcctgcgacatcggagcagattatctgagttgtggattccgacgcccactttgcaagcccaaagtcagaaagctgtgaacaagatttctctttttagtatctcgtgaatttttcctcttcgatgtaaacattggaaactaaaagaaacttacttgtggttcaaaatcatcagacaataatatgttagatgacttaacatctctgtgaataacaggttgtggagcatcgttatgcagatagtccaacgcttcagctattcccacggccaccttatatctctcgttc

SEQ ID NO: 7729 - DNA, 2469 bp, Arabidopsis thaliana landsberg
atgaacgtcctgtttgggattgcagtccccctcttgggacatttttttacttaagtcgggaagagatatcagcaatggtgggattggaagtaataatgctaccagtaatttagaatggcaaagttacttattggagccggtaagaataaaagtagacaaggagcttgagcctgaaaatttctataacccaggtgaattagtaagcttcacaagtaacacagaggtagaagatttcgagagagctgaaagctcacacagtcttgctacacatgttggagagttttatgatgcttgcgatggtactgtttcttcctactaacttttttaaccacgagatagctagaaaattcttatgatgtctgacatttctagcatcatcactttttgccagttcttggagcctcttctcctttagttttaagtgttatatgcatatatcagtatgtgattttggttgtgaagtggccttttaggcttgggattcctgtgtttatagtcatcttgaattcgtgatagttatgaatcagatttccaaagacatagaaaatctgcatgcatgattcactggtatatctaagaaactggttttaatttattcagttactgtttcttggcttccagaactatcaactgacagtggaatgcagagttcagctaacaacattgaatctgaggtaagggagatgagattgggtttactaatggaaatcgaaaggaggaggcaggcagaggcgactctagagcaaatgcaagttcattggcgtaggctccgtgaccagttggccgatgtgggtatgttccttcctcttgatcccaccagaagccaatacagcatgaacctagctgatgagctacgttgtcaacttgaggtcaccaggtttgtctccgacacactaggcagtgacttggccaagacagaggtagagatggagatggaagctgagctcgaagctaagaactttgaaatcacccggttgtctgaccgtcttcattattacgagactgtgaaccaggaaatgtcccagcgcaaccaagaggccataggtagaagaaactcaagttaaatttacaagaatgtcttatcttatttttctttatctcaatgcttcaactctctttgatatcagaggtggcaaggcgagacgggcaaaagagaaagaggaggcagaggtggatttggggatcaatagctgcaaccatcacactcgggagtggagtcttggcctggtcgtaccttcctcccggaatgttatcatcagatgaagctcaacctcagctgtctccaaaagattcataatgaggttgaatcaaagcttcaggccttgtgaataaaaataggaaaatgggttttgttttaaccttttctagagaatgtatagaacattcatgatgacgacataactcagcttcatacgatcaaggtcataccaatttggttctgtttgtgtcgcttattgacttgcaatgttattattagccagaagttccgtgcctgattcttgcttttgttatgttggttcttaaatttaacgaggggggtaactgggtaaagaaaaataaaggcggttgaaatgggaattatatttaacaaggggtgtaagtggaaataacaaattctgaaacggcgtcgtatgaagatcatatttggttccttcgctaatcactaaagaaagcacctgtgaggaaaaaccaaccagtgagagctatcaatttgaaaaaccaagtccaacaatggcggtctctccgcatatttcgcctactctttcccgctacaaattcttctctacttccgttgttgaaaaccctaatttctctccgtatcgtatctatagtcggcggagagttaccaaatcacatctccaggcgcacaacagtaccactagctatggccggacggaactctcctcctcgaagaagctatggattaggcaacgtagcttcagcgaaatggaggttgagcaagcacaattagaagatgatgaagaacaagtggagatcgatatcgtcgacgaagccagtcttctctccctgagcatgaaaccggacagaaacatggcgttgctcgacgattatgagatggaggagcttggacacacgcctaatactcatcatcggagcggtttgtttgttttctccctaaaccctattcttactgagaaattgaaatttggttattacgactgggaaactgaatttggtgattacggatgttatataggatatgtggcggtggtggggatgcccaacgtcgggaaaagcacgctttcgaatcaaatgattggtcagaaaatatcgattgttacagataaacctcaaacgacgaggcatcggattcttggtatttgttctagccctgaatatcaggtttgtttatctaagcctcattgatttttgactcttaaaaagaaccaggtgttcaattgcttggtttgattttgaaaattaagatgttcgactgataccaagcct

SEQ ID NO: 7730 - DNA, 2107 bp, Arabidopsis thaliana landsberg
  unsure (1)..(2107): unsure at all n locations
atcccacacgctttttttgtctttttggtttaattattatgtttccataatcatttcgttgcgaaaatttactggctaaagattatgaagagattaatttgcacctttttgggattaagacttaagaatcacttgtttatctcataataatctcttgcttttataattgtaacactaagctaaactggttcagtgggtctcaatgacaactaacttttaatgatgttttgtgctgttatgtttttgtcaacaatatgcaatatgcgtatttaaaaccgtctaatagtatatcaacatatcttgatttaaatatatttatctaaaccgaaatccataactaatcataaacttttgtatacattacgctaaaccaataaaatgggaaggaaaaatcaagaagtggagtttaagaaagaagtgaaccaatgaacagagtctttaggatatctcttgaggttgtctctgtaatcaacgaagtagagaccaaatcttgaactataacctgctgcccattcccaattgtccaatagcgaccatacgaagtaccctttgacattacatccatcctcttttatcgaagcttgtaagctagaaaggtaatcatgatggtatttgatcctctttgcatctttgagagcgtcttttcttgagatcagaatgctgtttgggtcgtccattcctacacaaacaaacatcattacatttataaacactctttcttgtctagatagtttcagagatgtgtgtgtgttttaccattttcagtgatgaagactggagggtttccatatctatgtttgatgtaattcatcaagcttctcatccctctaggcactatgtacaaccatatcgaacttgcctgtccgcaacaacaacaaatgtaacacaagcttatagaaattcgacagtactaatcacttttgggagaagtataactaattagagttactatataatgtttcttaccctatctccaatcgtgcttaaacccttaaacgctgaaaattcaaaacaaagaattttaattaagatcagacactcatcatgactagggtttacgtgaggtagaagtataagtatttacgtagagtgacggttccagaatcagaaacggcgtcgtgtagaagagtgccaatgagattggtggcattgttccttgcgtagtacgttgtgtagtgattaatccctacaaaatctaaagaacccttcaccagagaagattgagatcctgtaaacaccggtaatctgcttccgactctgcttctcatcgagcttgggtaatccccaaacatcaacggatccaaaaacctaattaagattgtttaaagatatatgatcacttgttataagttatggaacagagctaagttgtgtaagaacatatacgtaccagccaagttgaaagtcttgagctctttgtgcagcttcagtgtcctctgtcttgttcgactctggttcaaaccacattacatcaaacgcaatccctaacgaacctccttgctttgcctatcataattatacatcaaaactgtatatatcctttttttcatgtaacatcatgttttcactttagtattgactaaccttatactttttcctatagatatcggatactgtggcgtgagttaaaataacattgtgaccaacaatgtaaggctcggtcgatgagtttccttcgcgacaagtgagcttaaaaagaatagtgcaacggcctggagcttgtaggccaacatcatagccttgtatcgcgaacgtgtgtggnnnnnnnnnnnnnnnnnnnnnnnnnactctatctccaaatctctggaaacaaacctccgcatacgctgcaaaatcatttctacaaaaaagggtacatacatgcattgcctttttaaaattagtttctgtgtacatgtaatagttttactgaatgattaatgatatggttttggtatggattattacatgatttgtgggtttagccaaccgaggtatcgatcatgaagtgcttgtggaagatcccagtggtacagtgtcacgtacggctcgatccctacaataaattttagtctgtttatacatgtgaaacttgaccaaccattcgttaattaatcttaaagaagac

SEQ ID NO: 7731 - DNA, 1158 bp, Arabidopsis thaliana landsberg
actattacatgatttgtgggtttagccaaccgaggtatcgatcatgaagtgcttgtggaagatcccagtggtacagtgtcacgtacggctcgatccctacaatcaatttttgtctgtttatacatgtgaaacttgaccaaccattctttaattaatctttaaagaagaagaaaaaagacagatccgatgattgtagatgcattataactactgttgaatttgagatcattagtactcttaaaataatgcaacaaaactcgataaaatacctttagcaagtaaagcatttatgagtttgttgtagtgatcgattccggcttcatttatatgtccaacaccatctgtacacccatgcatgatattatcatcaataatccatcaaaagccatttgttgtagtagtattataattaaaacttaatctaaagtaaacaagattaaaggtaaacatgttaaaaagttacatacttggaaagatgcgggtccaagaaatggaaaatctgtaagcgtccattcccatattcttcataagttgtacatcttcctgccatcaccataattccaatcaaaacttcattaattaaattttcgaaatgtatacttattgaccattttgttaatttattatagaaattggggtttacctcgtaacgatgatactgatcaacagcgacatcagcattgctaaaatcggtgattttaccaaaagtgtgggaaaatgtgtcccatatcgtaggacctctgccttctgccttcaccgctccttcatgctgcaccaattattgatatcattaaattttattataacgttggtccatccatctatatttgcattttcgttttaggggatctattccagcccggaaacattaattgggtgtgcatggttaggtgagaaacattttgagaaagaatttggttttacttgagcttgactttggttattatggagttgaaaaaaaaggataaaggtgaagaagattatgaaaatgttcaaaagaatgggtcattgtttgaaaacatttagtaatttctttagaaaaaactaaattttggaaaaaccgaaaccacaagaagaggagcacctattgcctacccgtgattgatgaatatacatgaacttgtaaacgcgtcatgcaactcaattgtatttcaattt

SEQ ID NO: 7732 - DNA, 1787 bp, Arabidopsis thaliana landsberg
cataaaaccacttaattaatttcgctaattatctgatttgtttcttcgtttaaaactttaaactaatctttgattgactttgcatctcttgaggtttttaatcagatccaatcccattaaatttatttatttttccaattaatatttttgacataaattaaaattttcgtaaaacctgcagattcaagaagcaaacccttgttggtgtaactgttgaatcttaaatgaaaatgtctcttctgtcatcatcaatggtccaacctgtaattctcttattcatcactctctctatctctttcataccaaatcttgaaattaaaaaaacagagcaatctttctctctctgttctgagagcttccatgtctgaaaccaacaacaacaaagcttgagtcttcctgttccttttccttttctctctcaaactcatgaaattttctcgggaaaatatgaaatgggttttcccagaaatcaaaacaactcagaatttcctctctccttcatcacttccacaagaaccaccgttatctctccgctccagcgcaaacttcgatctaaacagcaaaatcagtccaagtattctcctcataatcataatcctctcaatcatcttcttcatctccggtctccttcatctcttagtcagattcctcctcacaccatcgagcagagacagagaagattacttcgacaacgtcactgctcttcaaggccagcttcaacagctttttcatctccatgattctggagttgaccaatccttcatcgacacgttacctgttttccattacaaatccataatcggtctcaagaactatccttttgattgtgcagtttgtctttgtgagttcgaaacagaggataagctcaggctcttacctaaatgcagccacgcctttcacatggattgtatcgatacttggcttctatctcactctacttgtcctttgtgtagatccagtctcctctctgatctctcttcgcaccaagatcctcgttcttctttcctccttgtgctcgagtctgcgagtgatcatagctcgagagagattggaggagatagagacagtgcagcttgtgtggctgcaaatgatgatattgatgtgtctagtgctcatcttggtttggtcggaaacaatgatcttggatcaaccaggatagattcgggtcacggagatcagtacctggatggtgaatttggtggttcggttggaaaggttgttcctttttcagttaagctagggaagtttaggaatatagatattggtgaaggaactagtagcaacaacaacattggtaatagtagtagtttagatgagaggaggtgtttctcaatgggatcatatgagtatataatggatgaagaaacgactcttaaggttcatgtttcaaccaagaaacaatcaagcaagaaccgtggcttgcccggtcataggacagcgatgtccgaatgcgggtttgatccaacagggagattgaaattcagtgggagtggatcgatgaggatagtggaagaagcggccgaaaagaatgtagtggaaagagagagcttttcggtatcgaaaatatggctaagggggaagaaggagaagcatagtatagttcgaggaaaagaggatagttcattggtttcttcgtcttcgggaagagcattctctttcaggttatcgaaccagcggaaccatcccgatgcgatgatcgaaagtggttgcgaagaagataataaaaagaaagaatactcggagtctttggacactatgacaccatctatagctagcaggactatgct

SEQ ID NO: 7733 - DNA, 697 bp, Arabidopsis thaliana landsberg
atggtaaaactctagttttaactatcccctcccgaacaaatccaaagtcggagttgcctcaaaagctactctaacaaaaacaacactccatccaagagaaaataattcctgcccaaacatatataaacaaattcatcactcatggcaacactaattagtaatgttaatgtttaaaatatttagtaaaacaacatgtttagtcgagtcttagtctagtggtttgccatcttaatgatattttgaatacaaactcggaatgttatatactacaagttaaattgtaagattttaaaatggattgtacaattatatcgcttggcccggttggctttaacatggaaggacaggggtttgcttacaatatcataaagatattattattcatgaaagaaagtgattgtatcagtctatttatttaaagaaatgtttcgttgactttacatttttggtaattaaatacaaaattccaaatcccattaatttcagaattttaaaaaatcatttcaaagagactctctcttctttggtgaaagaaaaatataaactgaaataaattcgctcatctgtcaccatcaatggtccaacctgtaattctcttaatcatcactctatctcataaattttcaaaaaactttgagctcaaatctttatttctcttctttcaattacaagataaaccaaaactctcagaaaacag

SEQ ID NO: 7734 - DNA, 2341 bp, Arabidopsis thaliana landsberg
  unsure (1)..(2341): unsure at all n locations
attattagattgatcacactcaacacaattctgaattctgttccgatttccatagaaatccttgatttagcgaaaaagctaaacccagatatctgaggtgcagtcgccacccggatatctcatctcgtgagcgagcgaaggaccatccggttcggtcccaaagtcgacgaagaagttagggtttatggagagaccacctttatctgtatcaacatctatctgcaacatgtgtgaccctttctccacaagttccgggtaaaactgtctgtcccaaacactaaacagcgagttcgtcacgtacaatcgcttcccatctaggctcagctgaaacatctgaggacctcctcttagacgctgacccttcaaaaaagaaaacacgcccatatttacaatagcgtgtagaacaagtaacaagttctatattttgttcaacggaccttgatcttagggacatcaaactgaaatgcttttccttcttctcctaaggccaaaacaagacttcccttttggactagcccgcctacatgtatttgaccagttaaaacaggggttttcgggtcctcgatgttgtactgacgaatatctccatgaagccagttggaacaatagaggaatcggtcgtcaagtgagattagaaagtcggtgataagccctggcatttctgggagaatccagttttcaactttcagaggttcaactgatatagccaccttcaaattggagaggttgtttgttgttaggacaaaaataaaaaagaaatgaagaataataagtagagaagattcattatatacctcgtggctccatgtttcatcatcgttcttgaaaaatcttactaaagtactcgacaacgcacaccctgcaaatcccgtagctttatccggctcatgcaagaatcttacctgcagaacaaaacagagatgaagtttcttgtggaagaagaaagtagtataagctgatatttggaagattagggtttacctctaagggtaaaagtccggtatcaccaaggtcaagaatctgtttcaattctccttggggccagctatagacatgtagatgctttccatataagccatcagagacgtctttgaggtcaaatcctttggtaaacgcggccggggctccccatgaggtactgatcatcgtcttatgccgaggttggtaccagaaatcatacccatacaaaggactgtttccatccttctcccacctattaaaagacatataaatagctgttactcaaaaaaacctaagcgagatattaggttttgttcttctttcttgctgtataagaaatagtacaaatccgttgtcctcgaagttaccttcctttgatgttaaactcggaatcaagtaagagaaacccactgccttctgcgtttccatcttcgtctccaagacaagacacaagaacgtctccggaagctaagcaatgaggctgatgcggataagccaaccccgtcttctccaaaacctctgcagggtccacgaatttgtgcaaagatggttccctcgggtttgttttcgtatcgatcacgtaaatacgaccagaccttttcaaacatatgttcacgaaaacagaccttaatacatgagaagttttcagaacaaaacaaaggagagataacaagtttcttacagaagagaaggcaagatgagataacgtctctcgcaagaagaatcaccatagcaagagctacatgagttccagcctgagtgatgaagttcatcttcaaggtaaggcattggtaatctgtggataacactcgagtatgtggatgaactcggttccacatccacagtagctaagtaatctggcttcgcttgcccggttcctagaccaaaccagtttccaaaaaacatgagccaacaaagtttgggccatatcttaattaatgactcttacttccactctatatatatatatataaagagctacaaaatagtttaccagtgtatatggcagcaacatagatgagtttttctcgtggaccagacatcgcgaggaggggtgtcgcataacccggcccgctcttgcagcagtctccatcgtggttgttcatcgccgcttccattttcgtctctatctctcaaccaagctgtcttagctagtaatgcacctgctcttgcgtttactgttttgcattaatatactcaaatattctgcaagttggagtaaactaatatatgtttacagcaccgcccatattttgaaaatcgcatatgttctgcttgatatttggctttatacatacatatgccagacgcanacaagaaaaaacaataacctatcacgnttcttgtctcatagataatgtattatgcactactaatcata

SEQ ID NO: 7735 - DNA, 1821 bp, Arabidopsis thaliana landsberg
tcttgtggcacttgatatatcacctattagagacatggggtgtcagtcatcattcctcaacgacattgacgagctcgtactccacaagggacagattgttgtcttctttaacagtaatgtcagctggttcagtggcctcgatgcgaccccatttatcaacagcaagcctcattgatcccttgaacatatctatctttgcattccgaagattcacagtagctcctggtttcatcaattccactgcacccacacaataaaaaccaagaaagacttgtattagcccccaaaaagctaagtgacccactatgaatcaccaattgagtaccagagcagaacaaatcctattactagagagtcctaaatcaacagaatctttaattgtagcattgtatatagcatcaatgcctgttataggagtgaaactacaagtatatctacactgatttaaaagcaccaaatcttcaatgtgtgaacaaatttggaatgcgatcaaatggtttatcagctattgagagatgaaaatacagattccaacagactaagatactccacaggatcgttaaggctattcgagaggatgattcaaaaatagaatcttagaacacagaatcggattatctcaccttgatcgttgcgagcagtgaagaggatgcaagcagtctcatctccaacaagacactcagagatcctagcaggtcggagatgagaagaagaagcagctcccggtttctgaggtacggaattctgatcgacgactttaacagtcaaagtgtggccgctcgttccaggtttaagctgatccactttgacaaacaccggtttcttcttctcctgcggcgtatgctgtggtggctgattctgagaagttcgcgttgacgaagacggaggcggcggatttcttccctgtcgccgcggaggaggtggtccgtttctttgccgtggtctatgctggaaattgtcgttgctggtgtttgacgccattgggactgaagaaaatctcgaaacgaacaaaatctctctatgtgaactcttcttcttcgatctctagaagaaagccctagatttatgagtcttttttcttctgatgattctttttagtgggattattactatttttattcttatttttttctataaaaaaaaagaacgaaaatgaaggcagtttgaggcagccacgtcaatctaagaccaaagtaaaccaaaaaatacattttagtagcatatatcgacaagatttaaaaacaattttacatattttttatacggatataaaattccttatttgattaaccacaacattggtaaactatctgtagtagcatctgatatacccaaataaacaaaatccaggagttttacagtgtgtttttggtaataataagtttcataaagtgagagaaagctttcaatgacacattctggctctctaattttatctggtgactctgtaagcctacacaatacaaaaccaaagccgtgtgagaaattctcaagtagtataattaacataaccggaaacatatatatgtttttgttaccttgatctgtttgagtagattcttcgcgcgtgcgtctgttttgaaatgatcacgaacaggctgccatattggtaaaggacgttaattatttgttgttgaatacaaaacttattcaaaggttttctgaataattgtgtcagtcttttttctaataccatcattaaggactcgtaaagctctaacataaaggaagttttaacttacttgcaaaatcttattcaacagattcatcaggcctttctttagatcgccagggtgcaacacgccgctctatagtcagcag

SEQ ID NO: 7736 - DNA, 1857 bp, Arabidopsis thaliana landsberg
aatgcacataaacctttcacgaacgtcgctgattttaaagtgatgatcttcttcaccctataaatattaccgaggttaacgttgatgatatcgttgaaacttgaaaatgtcattgtagtattatctatgttactagtggagaaaacttccactaatttcgtgttacaaagggctatttattacaaaagattatgttcaaaaagagcaaaaaaaaactaagtaccacaaactaaaagaggaaaggattctctcatccccaaaatgttatctctatattgaatgcaattgccaatgattttttttctataaggaaacaaatacgaccataaataaaaatgataaatgttccacagtgatgcgagtaacaacaccaaagcatctctatttttgttttcttcattcacaccaaaacaagaaatcaaatttggtttgattgattgatacaaaatacttcttcagatatttacttcttcaattggagaagccgattaactgaaatgtcgatctccggcgctgttgatgaagctgggactccacttctcgctgttaccgtcgacggttccgtcgactacagaagtaaacccgccgtcagatcttcctccggtggctggagatccgccggattcatcatcggtaattcccgacattccctttcaatttcgccgattttcccgccaatttcgtatctccttttgacttccgccggaatttttaatttctcgatttttttttttccgatggtaggtgtggaggttgctgagcgattcgcttactacgggatatcgtcgaatctgataacgtatttgaccggaccactaggacaatcaacggcggctgcagcagctaacgtgaacgcttggtctggaacggcgtcgttacttcctctccttggtgcttttgtcgctgactcgtttctaggtcgtttccgtacaatcctcgccgcctctgctctctatatagtggtacgtagctctctctctctctctcaaatgttctgctctctctatatagattcatcaactctagagatgagtctgaagttgtatagtgatttgatggaacaacaggggcttggtgtattgactttatctgcaatgattccttcagactgcaaagtttcgaatctactctcgtcatgctctcctcgatttcaagtaattacattctttagtgcattgtatctagtagctttagctcaaggtggtcacaagccgtgtgttcaggcttttggagcggatcagtttgatgaaaaggaacctgaagagtgcaaagcaaagagttctttctttaattggtggtattttggtatgtgctttgggacgttaacaactctatgggttttgaattatatccaagataatctaagttgggcgttaggctttggtattccatgtattgctatggtagttgctttggttattttcttgcttggaacgtgcacttatcggttcagtattcggagtgaagatcgaagcccttttgtgaggattggtaatgtttatgtagcggctgtaaagaactggagtgtttcagctttagatgtagctgctgcagaggagagacttggtcttgtgtcttgcaatagctctcagcaatttaggtaacacagctttctgtctcctccgattttattgttaccacataaatacttatagtaagcatcttggttcttgttacaaccgcagttttctcaacaaagctttggtcgcaaagaatggttcttgtagtatagatgaacttgaagaagcaaaatcagtgcttaggttagctccgatatggttaacttgcttggtttatgcggtagtgtttgcgcagtctccaactttcttcaccaaacaaggagccacgatgagagat

SEQ ID NO: 7737 - DNA, 2397 bp, Arabidopsis thaliana landsberg
  unsure (1)..(2397): unsure at all n locations
tttttattttttttggtttagttttatcataaaccctgtacatgtctctaagggattctatgcaggtgaaatcgactagttaaagcaaaatcattgatcaatctgtgcctagtcttcacgggtaacgccagttgggttgattctgtcccttaagagcaaggacagcgtttgataattccatcagctgctgctccgctttggctttccatgtcaccaactccttcaaggtttcctgtacaaatataattctcaaatattgattccttaacatcaagtaaaggtaatgcaaagcttttgaaaaattgcccaataacatctgatgcatatcagacgatgcatgagtggtatagtgaatgaagcaaagactgtgataagatgcgcagtagtaaattgatcataattaatctagaggctagaggattatccaagattgaccatccagtttaactgaaacaccagaccaatgcttctaatatgtttgactaactcacctgagtctggattgttgggtcgtcaatatctgattttggacctgcagtaatcgaagaacccggagtcnnnnnnnnnnnnnnnnnnnnnnngcttctggattcacctctagtcatgctgctaaatagagaaacaaaatattagacaataataaacatcaaacccttactcttgggccaaaacaaacaaacaactgctctaacctttctgtcatttgcatatctacgttgaccaatgactggtcttggagagagaccaatgactggtcttggagagagatcaatgactgatcttggagagagcttttgcaaggatttgttggaagcgcgtaagtctccggcctgacagcctctggtagaccatcaataaggtcatcccattggtcaaaaccattcgttgtaaaatcttccaaattggaagtcttcaatatatgttcccaattttcctgagctggactgaatgacgtgctcccattcggctgcagattgctcagcgtgtttgaaattcccagtaactgctgatctactttatctttccacgaattcaattccttgaacatgccctgcgaataagcgagatatggtggacaaaagcttcctaaggttaagatcattttaatcaagaaactttgaacaaatacgttgtacttgcttatagtctcgacctgagttgaaatcaacgattctgagatctccacaatttgcttatcagtgttttccctccaactcttaagttccttgaatagtttctgggaagcaatgcaaataaaaaaaatgtttctgaatctctaatatgctcatcttaacacattcctctaacataaagaaaaaaacgatctcaaagtcacctcatttgcatcagcatgatctggtaaattttgctttgatacaagttctttgatttcactgcttaccaaaaacgaaatgagactccaagcacatttcaaggaaatcaaatatcgaaccacaagagttgttgcaaacatattacctcttcatttgctcaatctcccccataagaagctttgacgtaaccgcagattgatcatgtgatgatgcagtctgaaccatccaccaagctgggggaacccaagtaggatcaggaattccagattcaagtttaatcttgacaaggtcagcactttcgagccaatactgcatgcatccatcagtattgtaacacctcctaaaccgatcagaaccacctggtgttactttgccatccatgtgcttcaaggaatgatccaagagcccagtatcacctatcttgcttcgagcaataactcttaacagttgtcgcgtaacaggtttttcaaaagtagcacctttctccttcataatatccgctaaggtttgctctgcgaacttaatcctgcataaaaaaacaattgctctcttcatacaaaaacatgaaatcaaaacacatgaaactaaaggggctttggtcgttttactacctttcattgttccatcgagtggttaatactctctgctgcttgtgcttcggagggataataatcggcttttcctcgaagctggtgtctgaatatcttcgagatcttgctccacgagcgagtcgttttcgtttctggattccacaagtaacgagaagaccaagttcttcttgcttctctaacttgacttcaaccaaggcgttgtctctagaggtgttaccttcttcttcttctccaggagtatcttcagtttcgcgcttgataaccaccggaccagcagccatagcagaatcattcggctccttccgacaaatcttcttgtcagaacgcttccggcgttttctgtaaaaaaaattcacgcgacaacaaaaacaaaaagagtcaaaatcgagctcgaggatcacctagaaactagaaatgatttaagaaattagaggaaaagaaaactaaccaga

SEQ ID NO: 7738 - DNA, 1020 bp, Arabidopsis thaliana landsberg
tttggttgtcaacgagtcgtgaattttaacgtcagggaacaacagatatcatgtacctataatgtaatatataaaccaaatcatcatatcagttgctttattacattcctatatggaatcattaacaaagagttgcaaataggacatgacgttataagattttttggttttaatgacagttgctaaataacaaatatgtgaatagattcattggtttagttctgtcctatatgaacaaaaccaaataagaaacatgcctgttctcgagtcaattgaattgtctttgttcgcatttaaaggtgcagtatcgcaaattatttctgcacataaaactgaagatatgtcaataccagcaagttacctttacaagaaaaaattaagtattgattaagattcatataccactgtgatacttcagacgtttttgctagaacaatgtatcattgggattgaaatcttcttagtcactgtctgttccatctatatttgtctagaacaagtcattcatctacagatctagctactgtcaatcattctctcgattgtgcagcagacacttgcatctcacagcttcatgatagccaaaaaagtctgaataaaaaataagaagcagaatatagattttggtttaaaaagataagaaataagatacatttagaacaaaacacttaagattcatttagcacataacaaaaactacataagattcagtgttaaccaaaatcagtcttaaaaacattcaaaaatcagtcttaacaatcaattaaccaaatttagtcttcaaagcattcaacaatccagtaatataacaacgagtaagactattgtattaccttgcctaattggtgacataatgctttaagagacttcatgtacacatcgacgacatactaccactataccagaagcctgcatactcaaagatagaacatggttttcaatcggatgcataaaactctgaacttttcatttgaagacaagttcgataaagagatcactttcaaaaaagagatcacttcc

SEQ ID NO: 7739 - DNA, 2628 bp, Arabidopsis thaliana landsberg
tcccattgaagcatgcttcaccgttttttccgaaggttgtttttcatccactgagagagaaagaggggggtggggatagagaaagaaatttctcagatgggtttgtgagaattcacagcaagagcaagaaactcctatatcttcctttgcttccagagaccatcgtgatcaaaaacaaatatttttacggtatctataagaatcctcccctctttttctttttccttaaagagaatttttttgcatctttcttaggttccaataaatatgcagaagaaagttaaaatttttgtaccgtcgttgaaccttttaaagacctaattaagagacaagatcatactaagctcataaatcactttctatttacacatatataggttattaatcttaaacaagatctatattttatctttgagatttttcaagatttcatcaagtgtcacgttcattcattgattacatttcaaatttcactaagaaagttaaaacacggatctttttgagaatatcaagaaagttctttgaaatataccaaaagaaatcagtactttcaagaatacataactttttaggttgtgttaaataatatttgcttttgtaataaaggaacaaaattaaatagagagatcggagaggatcaaagatgggaggaggaagcaataatagtcacaatatggacaacgggaagtacgtgaggtacactcctgaacaagtggaagctctggagagactctacaatgactgtcctaaaccgagctctatgcgccgccaacagctaatccgcgaatgtcctatcctctccaacatcgagcctaaacagataaaagtctggttccagaaccgcaggttcaatttcttcttaattctcatcatttcttgacacccaagaaactttctaggtttataactcttggcgctgtgagtttatacaggtgtagagaaaaacagcgaaaagaggcgtcacgacttcaagctgtgaataggaagctaacggcaatgaacaagcttttgatggaagagaatgaccgcttgcaaaagcaagtgtctcacttggtttatgagaacagctattttcgccaacatcctcaaaacgtagatagattaatttatttgattcattcacattaattagttgacacataagttaaggaattgaaatagtctgtcgctctcagcaggggaatttggctaccacagatactagctgtgagtcagtggtgacgagtggtcaacaccacttgacccctcaacatcagcctcgtgatgctagtcctgctgggtaagttagaaccaacaattcttggctttaaataacatgacacacttttgagtcagtttttgttctctgccaccatttaaagcttctatatatctttgttaaatcaatgaatctctttgagtgtatctccagattattgtccattgcggatgaaactttaacagagttcatttccaaggcgactggaaccgctgtcgagtgggtccaaatgcctgggatgaaggtaattctcataagtctatctcgtcttcttttatctatgattcaatcattttcacttccttactgactaatttcatctgcagcctggtccggattccataggaatcgttgctatttctcatggatgcacgggaatcgctgctcgtgcttgcggccttgtgggtcttgatcccacaagggtaagtactattctcacttctttctaataggtacatcctcatagatcaaccaagaacataaatcacatttctgttttgtttttttcgcaggtcgcggagatcctaaaggataagccttgttggttgcgtgattgcagatctctggatatagttaacgtactatccactgcaaatggtggaacccttgaactaatctacatgcaggtattgatgatcaagaaccctaaagatgattttatcttcagcacaaaccaaataatcgaatcacacaaaactaaattttcctctctttctttctcatgaaagctttatgcgccgacaacactggcaccagctcgtgacttctggatgctacgttacacatctgtaatggaagacgggagccttgtggtaattatcctcttaacatcgatgctttgtttctcttttgatcattcgatgatactaatttaagatgttattgcagatatgcgaacgatcactgaacaatacacaaaacgggccaagtatgcctccgtctcctcatttcgttagggcagagattttaccaagtggttacctcattagaccttgcgaaggaggtggatccattcttcacattgtcgatcatttcgatcttgaggtagcctcacaagttttatcatttttttcttcttacacaagaaacctaattcttggtctaaaactgaagtgtttcctctgttttcacaattcgttctttatctctagtcattattatatactttttggtgccaatgatatatattcaaataacctggttgaaatcgtttgtagccatggagtgtgccagaagttcttcgttctctctatgagtcctccactttactcgcccaaagaactacaatggccgtaagattcctaattaaagacacattgtttttcatgtatttgaaaagaaaaaaactgtgtgtaaataacgtataatgt

SEQ ID NO: 7740 - DNA, 1493 bp, Arabidopsis thaliana landsberg
  unsure (1)..(1493): unsure at all n locations
tgtcaaattatctgcaaaatcctttccctacaaaagcaatagaagatgatgtcacaccgatcgaaaagtggagtggtcataaaccaacagttgaacacttgaaggtttttgggagtatatgttacatacatataccgaaggagaagagaaggaagctagacgaaaaggcaatgagagtaattttcattggctacagcaacaaatccaagggatatagagtactcctacttgataaggagagagttgagatatctagagatgtggcgtttgaagaaggaaataagtgggattgggtaagacaagttgaagtcaagaagaactgcagtacacccacaagtgtttctcaatcacaagaagaacaaagtcaaagcatctcaagttcggttttgtctcagcttcatgatgaagatatcagtcaagtaggagaaaaatcgtcgacaccaccaaagaaatacaagacaatggttatggagattgcccaatggtggatctcgcgaaacagaagcatgttttgtagtctctgaagacctcattcctacggtgacacatgggcagttaagaatggcgagatgctataatgaagaaatcgagatgattgacaaaaacagaacgtggtcactcatggagaaaccagaaaataaaaacgtcattagcgtgaagtggatatatcgtatgcaaactgatgcaaatggagtttcattcaattataaagcaaggttggtcgcaagtgggttttctcaagaatacggtgttgattatctagagacatgacacaattcgagtcgttcttgctctagcagcataaatgaagtggaagctttatcaaatggatgtaaagtcggcatttctaaatggagaactaaaagaggagatttatgtcgcacaaccacctggattcatcgttaaaggcgaagaagaaaatgttctaaggctaagaaaagccttatatggcttaaagcaaacccctcaggcttcgtatgagagaatcaacgttcaaaaaatcgttaggcgctagtcggacgctcgagatgggcctagctgcctagcgaaataatcagagatttaacgggatttactcaggattagtttttcgagcaattttaatattttttaaatatttctagtgtgatgataaaaaagtattttaaaatttataaataattttgcaaaattatttcatatcaaattgacattcatcctaaatacatattcaaaatacaaattaaagttccaacatgatatacaaaacatagtagtcgcttgatcttgagacacacaaaaaacagagaaatgtcacaaaacagagtgaagactacttcttcctcgtttgatttcttcaatgatcaagtaattagcatatgttagacttcttgtttagttaggacttcttgattatctgcaaatgatcanacgtcaaacaattgatcaaacgtcaaacaattcatcaagtattcaacaaaggacaatagaaacagcgagatatatattcaact

SEQ ID NO: 7741 - DNA, 1019 bp, Arabidopsis thaliana landsberg
ctgtatcaagattttatactaaacacaaaaggatctaacctcagcttctctaaataaaatcaaataaaaattcaagaacctacttagcagaaaggaaagaaaatgagtacaacagcgagaccgtacgtcaaataacttcaatacaacttctgaaacatggtctaggagctgatttacagccatttgtttaatgcacgtagccatttgttgcttctttaatgcatatagccatctcgaaggtaacaaatggctacatgcataatagaagtaacaaaaccaatatgaatacaaaattcctattaaaacatatatttaaggggcattgcagaccttttttctcggtataggtttctgaaaaaaagatgaactggtacgccacggccaaccaagctcaaaggagtgaagagaccttgaaaatataaaatgtaagccagcagaggtaatgaaattcacctaacaggaaaatatattaaatgttaccaaaaatattcattgaaatcatcatagtttctccaagctgaatgaggtgctcggccattgtcattgttaaaagcttcctgcacataccccattagataacagtaaatgtctatgcatgaatattcgtacataagaaaggatgataaaaactgcattctgttttgaaacacaatatttgaatcgaaaaccaactaacaaagattatctcaacaaatatacatgctatgaaacatatgtcaacattttgaatgagtgtgaatgtaatggaacccatcaagaaatattaaacaaaaaattactcgttagtatcaacaacaaagatatccatgcctatccaactaaaaacaaaagtagatcacttattcaatcattagtctacatactaataacggaggtgataagaaaaagtttttccatctaagaaaagccaacattttcttgccacattcaatggtgtacgttggtctattaagaagcagcattgtatgatcaacggagacactttttatataacatgaagcgagcagggaaggaaaaat

SEQ ID NO: 7742 - DNA, 1651 bp, Arabidopsis thaliana landsberg
aaaatttgtttttgtcaactaaataaaaagcaactttatttattatatttttcttaagcaatgatgagctgtttgtggaaattaaaataaggaaaatgacaaccaaaaatgaagtaagaataatattcccctcgtgcaatcaaccttattcacatgcttactgtacactttatctcgatctcctgaaagcctgtgtcgtattaatcgttaattattcaacaaacttacttaattacggaattaaatcgatcagccttacaaaacaaagtaatcttaacttttgcgtgtccattaatttagatgataacatacaaaagttgccttattaatgtctctctatactattttattgatcagagaacaaaaacctcacgcaagagtgaaaggtcgctctattttatatgaccattttccccttttttttctctacacatatgaccaaattaataagaaaaaacaactaattaattgtaattatctattgaaattaaatgttatatgtcaattctcgttaaagttcaaccaatcaaaggtttcctaagcttctaaatcaagactttggagtgagaaacatataaaaagaaaaattaagctaaagatttgtttagaaactaatcaaaatcacaaagtagtgtttctgttccctcggatttacaaagacaaaagcattagagagagagtaaacaacaatgctctttaagaagattcatcattcttgtaaataagactatagaatgtgatgagatatttaaagtttccaaagttgtgaaaggaactgaacaaacgaaccacgacacagaggccaagtcaacaatggcgaaactcgagttttcaccattttctttgttttccagttatcttttttgctcttctcttcacttttagacagatgggaagtacttgttgagattgaaaggtagagagtagaattcttcacttcttgtgtcacctttgaaagatctaaacttgtcccaccaatgcttccctctgtctttccttatcgaagagtctttcttgtgcagtgtgttgtccaagaagaaggcgacgcttccagcaacaaaaggctctgaggagaacgggacatttaccatatcgttgaactgtcaaatatgtaagagaataagattgtttcattagttcaggccatgctaaactcgaatctttgctatggagttttagggaccttaatagatcattctaccataaacctatttcaatggaaagagaagcaaaaataacagtgacttggttctacatacccaacgagccccagtgtggaccggaccatatcctttgattgcggtgtactcattgaagtattgagggatggacaagcccaggaagacagagaaacctaagatgaacttggtcctgaagctgtttaagttgcagaattgaaggaaactcaaacctccagctcccacgtatgcgaagaagagacagtataaagcagcaatgatgggcgcaggaattgaagcaaacacagctccaaattttcctgcattaacaggatggatctcatcagtacagataaaatttcaaacaaaagtaattccttttatttgttaaaaacagaatagaacaaaactaaccgagaatagagaagaatatcatgaagcctgcagctatctggacaacccttcgactacca

SEQ ID NO: 7743 - DNA, 1595 bp, Arabidopsis thaliana landsberg
cttcgttgtttctcttacgtggagacatatcggttctccggtttggataactaaccatgacccggttccgagatttcgccggagatctctgtctcactacatgagatttcatctgcttcacttcttcctcgtcgtacttattcacgatcgaaagcaaactctcgcttaaactacaattctccgaaacctccgatcctttttccggttcaaccaaactgggcttggtcaaaaccggttcttgagcaacgtcgacaacaatcccgggtttcttctcctcttcttcttgaatctttgtcaacgtagtcttctccaccgtcgaattgtcgttagaggaagtgagcaatgtggtttcggacaagacttctttgactactgtctcttcatcgataacagatggaggccgtgcggtgttcttgccggagacaggatcatctttcttgtcggcggtggcggagctgaggcaacaacccataacagagaacggtgtcgttaagtggatagcagataactctttttggtgctgtgtgattgcagcagagtgaatatgatgagagagtttttgggtatttattggcaatattttggattgctctagactagtgagaaactaattactttcaccaaaattttatatttatttatctataacagtgaaaccaaaaacgttttatgacgaagaaatagttgtaacctgaaaaagcagaccaaaatctagctatgtctctagcatatgtaaattagtcgatttttttacatttaaaatgtcttattgagaaaaagctaacagtaaagagttaagtttttttttacataatttgttgaaccaatgcgtttagtcgttaactacacaactacagtcgaagtaaattaagaaacatgaccagtataattgttatgcacaaaaatactgcttccgtgtgatttgcatggtctaaagattttcttatgatttgtgtgattttgaacgtgtaaaacagtacaagttaatatttcatatagttgtacatatgacatttgacaaaaagtacaatttcatcagtgaatgactgaatgtgatttcgagtcaatccaaaggtgaaatctcgactctgatactggttcccctggtaaactcgttcatcaaattatgatttctatttccattattgtgacgcaaatgtatgtacactctcgaattcacacatgccaaacactagtatgagtcaacttctcctaaatatcattctagtacaacatatgacacaagtaccattcacatgactagacgaaaagaaaactgtatataccatttaccttagtaacataacagtgaaatccacattgattggtgactacacatcaaaagagttatgtctgcattccaaaatcccaacacgtttcagactcttcactcactaacatgaagatctctagtccattgaaaacctaatccactaatcatatctcgatccaaaactaccactggaagaaaaaatagcatgagtttccaataaataaaatcgtctgcatcttcttacagatagttttacaattttccgatattgagatttataaccaagttcttgtttaaacgtactatacatcagctccacatg

SEQ ID NO: 7744 - DNA, 1827 bp, Arabidopsis thaliana landsberg
aggacttcttattgatatataggctgtactatttttttgctttatccaaagcttgccaattttggtgttgaattgtctcaaagagacattcattgattaagatattgattattgaatcaaagctttagtttttttttaattgggtcaaatctaactgttcatcagttattgttgtcaagctaaattttagcatgcgtgagagattagatgtgattgaggttgctggctcactctttattcaacttacgaagtataaactttaacctttgttgaaatttaattcactatcggctttttgatgttggttctttgagtttaaaagtcaatgatcttcttttgctgatgtttttgggctatgagttagttctcaatctcatttggcgtaccgttttcttttttagatatgaatcaatgtgcatcagttacttatgtatgttggctctgctcttgatgatgcaggaaaactacttgtgcttcttagagatggtagaaagctaatgggaacactccgttcctttgatcaattcggtattcacttttctttccatgtttctagatttacgatattgttgatgagcgggagagatttgacttttttttgttcgttgtaaatacacagccaatgcggttctagaaggtgcgtgtgagagggtaattgttggtgaacaatactgtgacattcctttaggcctctatgtaatccgtggagagaatgttgttttgattggtgagctggtaagacttctccttgtattgtcttttcatgctgtgtcacctcgtgttttacaattccatgagtttgaccttaaaatatgtattaggactcggacagagaagagcttcctccacatatgattcgcgtctcagaggcagagattaaaagggtaagacatcgcataacatgttcattttgattagccaaatttgattcatttgtgatgctgtgtgcgtgctgatgatttggttttcgggaatctgtctgttgatgcaggcacaaaaggtggagagggaagcgagtgatctgagaggaacaatgaggaagagaatggagtttcttgactttgattaaaccagattgtatccccattcattattggcttgatgctctgctttggctcgcaagttttatgatgagcctttttggtgtgttgacttaggggatcgacgcaattcttgtgtttcattttggatgaatatgacaataaatctgtgtacttttgtctttggatctatttacctttttaagaaaaaaatgttaagcaatttctttctctattttggaacttttaaacaaggagcttgcctatggctactaccaaacggaacaaaaatggagcaaatgagtagaggacgtcgcacattgcaaaatttacatggtacttattggttctgtgatcaatcaggacttttataaatagaagacatatggcacaaacaacaacacacaaatatgttcacctggagattattccaccgggcaggaaacccgtgaataaaaattcaaagaatggttctatttctatgacatcctaatgtgactgaaaaacgaaagaaagaagatagaactctcgggttttcgatcttcttttatcgcctcctcaagtgtggtggtgtggtatatccttcgaagaaatctagaacgatggtctcgatatcttcaaccgaatatttcaaatagttctcagggtgtcttccactctctatatgacccctgaaccttccaagaaacgatctataagcagggattagatgctcggatagcgatattaggagttcttctctaagctgagcatctggaaccgaccatgtggactgagtcctgtgaac

SEQ ID NO: 7745 - DNA, 2728 bp, Arabidopsis thaliana landsberg
  unsure (1)..(2728): unsure at all n locations
tctcaaaaatactatatttttatgattgaattattaaaattagatatccctaagatttactttaggacacggttacaaaaacacttattatttttcttatgtacaaattacaaacaaaaaaaaaatgttcaaatgcttagtcacttcatcattatttgaataaatacgaatggttatatacttgtcttattgttatatctaattcttacaactcacatatacaaacatttggatgtcgaaaacaaatctacggttaataatttccaaatttaagataaaatagataaaagaaaatccaaaatccaacagattgttttcatactacaacaaatacaagaaacaaaaaaatacatggttttgataaaactgcaacgatttttcacatataattagccaaccaaaaaataaagtaaaagttgaagtatattttattgacttagttaattaattaaataaatccctgagtttgaagcaatatatatataatacacatatcccctcccatttgcgtcagcgtccataaatcagaatccttacaagaccatttgtgtctgtctccaccaaacccttcttttctccatttttcttttttgctttgtttctgtgctacgatttgtcaaaaaaaagaaacccaaatcaaaagcttcgaaatttcataagatttctttgtttttctgaagatccaaggcacacaaaaaaacagctttttttgtttcttcaatcaaggattttccagggttttgataaccccatgggttcagggttctctctgtttcaaaagaatctatcgtcttgttatggagatcgagatctgttgcagcctggtttaggagatttgcctgaaagttgtgtggctttgattctccagaatttggatcccgttgagatctgtagattctccaagctaaacacggcttttcatggcgcttcttgggctgatttcgtttgggaatcgaaacttcctccagattataaattgattctcgagaaaatccttggtagtttccctgataatttgcgtaaaagagacatctttacttttctctctcgagttaattccttcgacgagggcaacaaggttcgtctccttttagatttctttggcttcaagaaatttttttagggttcttcagaaaaaaaaaattggggatttgttttgttaaatggttcacatgaacggttttaggaaatgatttcataatatgcaaaattttcctgtgaattagagaagaaacttaatgtttttgatgttttctgcagaaagcttgggtagataaacgaacaggtgggctctgtttatgcacatcagccaagggcttatccataaccggaattgatgatcggagatactggagtcatattccgtctgatgattctcggtgagaatgtgtttctcttctgttgcttacccaaatcagattgtgtttgttaagtttgggtgtacaaagttagttgagttaaggttgtagtggatacaaatcctaactttaatctaatgttgtgtgatgctataattctttatgtttgctatgattgaaaaaatgacatattgttcattgtattggatacaatcatacgaatcctaacttttaaccgatgttttgcgttaccatgattcttaatttgacgatatcctctttgttgattcctgcagatttgcttcagtagcttatgttcaacagatctggtggtttcaagttgatggagaaattgatttcccatttccagctggaacctacagtgtttacttcaggcttcagctaggcaaaccaggcaagcggtttggttggaaggttgtnnnnnnnnnnnnnnnnnnnnnntggaacattaaacctgtgcggtttcaactctcgactgaagatggtcaacattcttcatctcaatgcatgttaaccgaagcaggaaactggagtcattaccatgctggagactttgtggtcggtaaatcgaaaagttcatcgacgaagattaagttctcgatgactcacattgattgcacgcatactaaaggcgggctatgtgtagattctgtacttgtgtatccgagctcgtgtaaggaccggttgatgcagatttaagttgcaaaccggagtttgggtgtagtttagaggtttaaaaaagctgtttttttttttaagtggttttaaaaccttttgtagaatctttgagggggtaattagaaaactcagtgtaaagagaaaaagagggtaattactaattagggttgatggtttattgtttaggtcaaatgtaaactttaagtttgaagttattaaagagttcttgagttacaattttttctgttggaggtttgtgtgtgaagtgaaacgcaacggttaatacagaccggagagataaaccacttgaaatgataaacatatgttaattgcagtttgtgctgagtaaacctattcaagacactttgacgtaactaaacaaaataaaaccaaatcgtaccggagaagagaactcaatcagagtaaaccggtcggttattaaaactggaaatgataagatgatatcttgaccgtcaaagcgagatctctccatcttcaggttaagcaacgacgaactgtgttcattttagagtttgttaaaagatccagagaagtatcacaattggaaagaagatgagtttggcgaagagattctcttcacctgaggaaagcttctccatcgttttcccttcatggtatctatttctctggtttgagttatgatggctaca

SEQ ID NO: 7746 - DNA, 1940 bp, Arabidopsis thaliana landsberg
agtgtttactcacaaaacacgaaccaaaaaaaatggatgagaaagatattccatggaacttgtgggaagaagaagaagaagaaaatcaaagcgaagaaaccaaaattttgatctcttcacttccttgggagatagattaccttgggaacaagcttttcatgttccaaggatattggtactacgaagacgttctcaaatcaatccccaatatacactcgagttttcagtcacaagaaaccgatataattgttgcttctttctacaaatcgggcacgacttggctcaaggcactcacatttgcactcgttcaacgatcaaaacactctttggaagatcatcatcatcctctgctatctcataaccctcatgagatcgtaccgtacctcgagctaaatctgtatctcaacagctcaaaaccggacttgaccaagttcatatcatcatcatcgtcatcctctccgagattgttctcaactcacatgtccttggacgcgcttaaactacccttgaagaagtctccttgcaaggtagtgtacgtgtgcaggaacgtgaaagacgtgttggtgtcactttggtgtttcctcaatgccaacaagggagtagaatggggagattttagccaaaatgaaaagataattcgagcggagaattattctttcaaggctatatttgagtcattctgcaacggagttaccctacacggtcccttttgggaccatgccctgagctattggcgaggcagcttggaagatcccaagcattttcttttcatgaggtacgaggagttgaaagcggagcctcgtactcaggtcaagagacttgcagagttcttggattgtccattcactaaggaagaggaagataacggatccgtagacaagatcttggaactttgctctctaagtaatctaagcagtttggagatcaacaaaactggatccttgggtggagtagattacgagacttatttccgtaaaggacaagttggtgactggaagagttatatgacctctgaaatggtaaataaaatcgatatgatcgtcgaggagaaactcaaaggttccggtttgaaattctagaattatgcgtgtgctttgtgaagaactgcagaaaaattgttcttgaatgcgttatttaataataaaagttacattgtcatatatgtaactttgatgtatcattacaattgatgtgtggtttttgttctttttgatgttgcaataaaaaccttctttacttctatgttcctttaataactagcgtgtgatctcatgagtaccatttcaatagtggcatgttactcttcattacgactaataaagtaataaagtaatcgtattatcacatgcaataacatgccactattgaaaatacgagtttcctattaactttaaaagttagcatgcaaataaaattataatatcaatcattttacaatgatgtcaaccaaaaaattggatcttcgcaattgcaaggaaatactaaattccaatttttgatcctccgtttcaacaaacttggctgattcgttaaaaacaatgtggcgatgcttatcaaccaataaatccgtcttagcaacatttgctttcaatcgaagatgattgatctaatgtgagctatatgactaggaagaaccattttggtggagaagctcaagtacaaatagactattaaaaatacgagaagaggacgttcaatgttccagttgccagttgggtttgaattagcacgagaaagtaatgaactaaaaacttaattaacataaaaaaccaaaccaatggtttcagtaaataaagcacggaaacattaagagaaagcaaaaagacaaaagctacaaactctcatgactgcgcatggaatcagtgaaaaaacataacaactcgagttttcttttctccttttttttattcagaacagtacgaactcaaccacacacaaac

SEQ ID NO: 7747 - DNA, 1506 bp, Arabidopsis thaliana landsberg
  unsure (1)..(1506): unsure at all n locations
atatataatttttttatcgttgcaatatatcaaaatatatgaaggaaagtggtacaattcaacaccaaaaaacactggatgagaaagatattccaaagaacttgagggaagaagaagaaaaaccgagtgaagaaacaaaaattctgatatcttcacttccttggaagatagattaccttgggaacaagctgttcaactacgaaggatattggtacagcgaagacattctccaatcaatccccaatattcacactggttttcagccacaagaaactgatataattcttgcttctttctacaaatcgggcacgacttggctcaaggcactcacatttgcactcgttcaacgatcaaaacactctttggaagatcatcaacatcctttgctacatcataatcctcatgagatagtgccgaatctcgagctagatctgtatcttaaaagctcaaaaccagacttgaccaagttcttatcatcatcatcatcatctccaagattgttctcaactcacatgtccttggacccgcttcaagtacccttgaaggagaacctttgcaaggtcgtgtacgtttgcaggaacgtgaaagacgtgatggtgtcagtttggtgtttcctaaatgccaacaagggagtagactggggagattttaggcaaagcgaaaagatcattcgagcggaggattactctttggaggctatttttgagtcattctgcaacggagttaccctacacggtcccttttgggaccatgccctgagttattggcgaggcagcttggaagatcccaagcattttcttttcatgaggtacgagggatttgaaagcggagcctcgtactcaggtccagaagacttgcaaagttcttggattgtccattcactaaggaagaggaagatagcggttctgtagacaagatcttggaactttgctctttaagtaatctaagaagtgtggagatcaacaaaccagaaacgtccagtagagtggatttcaagacttatttccgtaaaggacaagttggtgactggaagagttatatgacccctgaaatggtagacaagattgatatgataatcgaggaaaaactcaaaggttccggtttgaaattctaaaagttatgtgtgcactatttaatctgataagaaaatgttatattgtcatgtttattgttactttgatgtgtgtgaatttagttctccttgatgttcaataaagttaccttttggttcatccgttcatgactaagtattccctcagattcttataaatgatgttaaaggcttttatttttgttttaaatacatgttgttttcacttttcaatgtaaaattaattattttttataagttttgacgatttatgttttgcagattatttttctattggttgaattgtgtttatatagacaatagataatgttttaatttataaatnaacaaaaattaaacgattttttgaatcggggtgtaacaactttaagcatcatctaaaaaaaatggaagga

SEQ ID NO: 7748 - DNA, 2362 bp, Arabidopsis thaliana landsberg
cacaaaaaatcaattgatttttttatggattttagaaattttcattttgtaaaggtactggtttgcattaaagagagctccatgaatgaaagactcacacgacaccacgacaccaactaacaccacttgcacatttgtcttactccaaacaaatctcaagccgaagtagaaaagaagagagatggtgaaggaaacagagctaatcttcattccagttccatccacaggtcatattctcgtccatattgaattcgccaagcgtctcatcaatctcgaccatcggatccacaccatcactattctcaacttatcctcaccctcttctcctcacgcctccgtcttcgccagatctctcatcgcttcccagcccaaaatccgtctccacgaccttccccctatccaagatcctcctccattcgatctttaccaaagagctcccgaagcttacatagtaaaactcatcaagaaaaatactcctctgataaaagacgccgtctccagcatcgtcgcgtcgcgtcgtggaggctcagattcggttcaagtcgccggtttggttctcgatttattctgcaattcattggtaaaagatgttggcaacgagcttaatcttccttcttacatataccttacgtgtaacgctagatacttggggatgatgaaatatattccggatcggcatcggaaaatcgcatctgagttcgatttgagctccggcgatgaagaattgccggttccgggattcataaacgctattccgacgaaatttatgccgcctggattgttcaataaggaagcttacgaggcttacgtagagctagcgccgagattcgcagatgcgaagggtattttggttaattccttcacggagcttgagccgcacccgtttgactatttctctcacctggagaaattccctccggtttacccggtcggaccgattctcagcttgaaagatcgagcgagtccgaacgaagaagcagtcgatcgggatcagatcgttgggtggctcgatgatcagccggagtcatcggtggtgttcctctgtttcgggagcagaggaagcgttgatgagccgcaagtgaaggagatagctcgagctttggaactcgtcggctgcagatttctttggtcaattagaacaagcggcgacgtcgagacgaatcctaacgatgtgttgccggaggggttcatgggccgagtagcagcccgaggtttggtatgtggttgggctccacaagtggaagtgttggcccataaagcaataggaggatttgtgtctcactgtggttggaactccacgcttgaaagcttatggttcggggttcctgtcgcaacgtggccgatgtacgcagagcaacagcttaacgccttcacgctggtgaaagagcttgggcttgcggtggacctgcggatggattacgtgtcgagtcgtgggggtttggtgacttgtgatgagatagccagagccgtccgatctttgatggacggtggggatgagaagagaaaaaaggttaaggagatggctgatgcggcaaggaaggctttgatggatggaggatcgtcttctttggcaacagctcgattcatcgcagaattgtttgaagatggttcgtcgtgctaatgcaaatgttggtgcgataattcgtcatgcttacttatttgataccaaaaaagacacatgctaagtttttaaaactaaagatttttcttttcactacttaaacttatatgtacaagtgaaatactgtacttcaagaagcaaaaactatggcagtctttatggtatatgttagtctggaaggtgctatttttcaatcagtgattcaatttcttaggaattttatttaagttgatgtctaaacttaaaccgactttaaccaaatccaaaccaacctgaaattgtacccaaaaaagttagaagcgattgaaaacaaaacacgcacgaacgacgacgtttataatagaactaaaacatctccgccgatcaactcgtcgagaaatcgtttaaccgcaacaaacgaagatcctccgtccatcaaagcattcctcgcccgttccgccatctccttcactctcttcctcggcgtatcctcaccgtccatcaatgatcgtatggtcccgcgatctcctcagcttttactatctctccgtacgccgaaacgtagtctaaacgcagctccacggctaaccctaactccttcaccatcgagaatgcgtttaactgttgctcagcgtacattggccacgtggcgatcggaacaccgaaccataagctctccagtacagagttccaaccgcagtgagacacgaatcctccgagcgctttatgggccagaacttctacctgcggggcccaatcaca

SEQ ID NO: 7749 - DNA, 1886 bp, Arabidopsis thaliana landsberg
  unsure (1)..(1886): unsure at all n locations
ctttctttctcacttgtcttgtatcaaaattccattgaatcaaggcaagggcaccaattgtgtggtggccttgcgggtaagtttcgttcccggctttgatttgagaagagaagctcactcagtccgagggaccatttgagagagggaagggttgaaagagacccggcnnnnnnnnnnnnnnnnnnnnnnnnnnnnnnnnnnnnnnnnnnnnnnnnnnnnnnnaaatccgcgtgtcacacacttcattattcgcttgcgatttgttttgcgccctctctcgcggactcgtttatatttctaacgctaacccggcttgtagttgtgtttatatttgtaaatttcagtttcgccctattcaccccccctctaggcgactatcaattggtatcagaggacggtgcttcattagagcctaaccgctcgaagtgatgtcgggagatcacgccaagaaggagatggagaccggcgaaaagcccactacaagccacgggagcacttcatcggaagagtcccgcaccaagaggaaggagaagaaaaaggactcctccaaacggaaggagaaaaggtcttcctcttctcaccacaaagagaagaaggaaaaatcttcttcccacaagccgcatcggaaaggcgacaagcacaagaggatgaggaaggtggtctactacgagaccgacacttcatcaacatcgacctccgactccgatgcgccctccgtcacttctaagcgccaagagcgcaagaagtatagtaagatccccctacgctaccctcgcatttccaaacatacacctttactttccgtcccattaggcaaaccaccaacttttgatggtgaagattacgctaggtggagcgatttaatgcgatttcatctaacctcgctccacaaaagcatatgggatgttgttgagtttggtgcgcaggtaccatccgtaggggatgaggactatgatgaggatgaggtggcccaaatcgagcacttcaactctcaagcaacaacaatactcctagcatctttgagtagagaggagtataacaaagttcaagggttgaagaacgcaaaggagatttgggatttatcaagaccgcgcatgaaggtgatgagctcaccaagatcaccaagcgggaaacgattgagggggagctcggtcggttccggcttcgcaaaggggaggagcacaacacatgtacaatcagctcaagaccttggtgaaccaagtgcgcaacttcgggagcaagaaatgggatgaccacgaaatggttaaggttattctaagatcacttgttttccttaaccctactcaagttcaattaattcgtggcaatcctagatatacactaatgactcccgaggaagtaatcgggaattttgtgagctttgaattgatgatcaaaggctcaaagtagatcaacgagcttgatgccccgccacgtccgaagcacaaccggtcgcattcaaagcgacggaggagaaggaggaggagtctacatcaagtagacaaccaatcgacgcctcaaagctcgacaatgaggaaatggcgctcatcatcaagagcttccatcaaatcctcaagcaaaggaggggggaggattacaaaccccgctccaagaaagtgtgctacaaatgtggtaagcccggtcattttattgcaaaatgtcctatttctagtgacagtgacaggggcgacgacaagaaggggagaagaaaggagaagaagaagtactataagaagaagggcgcgatgcccatgtttgtctggagtgggactccgacgagagctccaccgactcctcctccgacgaggacgccacaaacattgccgtcaccaagggtcttctcttccccaacgtcgaccacaagtgtctcatggcaaaggacgaca

SEQ ID NO: 7750 - DNA, 534 bp, Arabidopsis thaliana landsberg
cacaaccacttgcgccactcgcatctgaacctggatttttatctgtcatgtcaccatctccaccgtttcctatatcaacatcttcttcatcttcatcttcaatccacccgttactgttacctttctctaacttaagaggtacatccatcctctgtcttttcgaggaattaccaggattggccatcaacggcgaacaagcagcagactcaacaaccccatcagatttcacttccaaatacagttccacatttttaatagaaggatgtttgcttgggacttcaagcattgtctccaaactagagtcgttcaccacaggcaaaagtagaaactgaagcattgattgttgttgaaaaactgaaggaaacctaccgaaaattctaacctttgatctccgatcatctacatctaatccagtaagaagatacagctgatccaacaatatgcttaactcagtctttcgcttaactttgatcattctaggagttgatctgtcatagtataccccattactaccatactcaatgcgaccgttcc

SEQ ID NO: 7751 - DNA, 1345 bp, Arabidopsis thaliana landsberg
aatataaaaaaaagtgtgcataccttcacaacacaggcaaatcaagaattcaatcgaaacaaattttaacatattccagagtgtagcgaaatctctagcaccagtatatggctacaaatcagcagcaatcattacctgtaatggtttctaatcttagacatcagttttaacttttcatacctggctatttccaggaaacctatcaaactacgcagcttcagcatgaaacacaatgcaaagccaaaaattataagtggttgagatagaagaaactacctgaactaaattcagttcttgctcattctgcaaacgagatatccttgcaggtgatttccaaatgagaaccaaggtatcgaaaacactgcggttactctgcaaccagctgggtatcagtttcaccattgttttgatgagatagagcccctgaaagtatgcatcggatgctatattagcctttgttgatgccacattagaactctctaatttaacagagatatgattttcatctccagatgatgtagcaggaggagttgaagccgtcgtgctcaatgtaggatcaggttttggcgaaatttcaggaaaggcatatgacagtatcttctgtggagactttgcaagttcttctcttaacggctggccagcatctgatcggattatatacataaacctgagttttgtttttacaggaaatagcaagtatagttagcatatttagaaaatctactccaagcttatagtaaacttcttacaagatgcggtgaacgaaagcttatcataagacattgtcctcaccttcggaaatattttggttcacttaatctagaaaggaaataatcaaccgcgagggccgcatatcgattcaaaaatttggtaagcggtagacggtatgggctattaatctcactgtacacttgcccaggaggaagagctgcttctaaatcaatggttaaggttacaagttcatctagaaattttgatgcagcatgtggaagcaaggggaagacctcgataatagctgccatgtgaacaaaagaagagttgtgttcaagtgaataatcatatgactagacattaattagttatttataaaacccaaatcaccagccggtatttttggctcttgtccagctttccatgctttatgggactgggcaagtttgtctggctccacccagttactaaggtgctgcagtaactatcctgctaacgttacagtaaaccaactcgacagaacacctagaaggcgggccataccttgtagtaaacgcatactgagattctttgtgcgtgccagagtaacaagggttgacccgaggctcctatgaagaagtatcttgggcatgcg

SEQ ID NO: 7752 - DNA, 531 bp, Arabidopsis thaliana landsberg
  unsure (1)..(531): unsure at all n locations
aagtttatggcttacagaatgatttcttcttctgtaatattgtaaaggtctactgatttctatgtattttttctcagctttgagcagttttgcatcaattttaccaatgaaaagctgcaacaacatttcaaccaggtccgttgtgttcttacacactgctatctttcgaatatatattcctctccctacttcgctttgacatacaacttttttttttaacagcacgtcttcaaaatggaacaagangattatactaaagaagagatcaactggagttacatagaatttgttgataacaaggatgtcttggagctcattgagaaggtgtcctactgtcttgctatctaatttttgtggaagattgtaactttttcatctcttgacacatatgtgtgtatatgaattgctctttcagaaacctggaggagtcattgcacttctagatgaggcatggtaggctgctagactctttagaggaaactgtttcagtttatgcttaaagttattctacgattctgatgaaaatgctga

SEQ ID NO: 7753 - DNA, 1251 bp, Arabidopsis thaliana landsberg
acatcccacggataattagcagttttgaacaattttgtataaatttgacaaacgagaagctgcaacaacatttcaaccaggttggacactgacactagattgctatatttctcggctgactcaatattcatacagatcttctttatctctacagcatgtgttcaagatggagcaagaagaatatactaaagaagagattgactggagttacatagagttcattgataatcaggatgtccttgatcttattgaaaaggttagtagcacacaatgtgcaatcttggaacttatgttcatcacacctagtgttactatatagagtttgagtatctgatgtgtagttttgtcatgtcagaaacctggtggtatcattgcccttctagacgaggcttggtaatgttagaaggtcatgtttgttcgttgcttctttcttttgttttcagaaaaaaatgataaggtttctatttgcttctgcagcatgtttccaagatcaacacatgatacattcgctcaaaagctgtaccagacttttaaaaaccacaagcgctttggcaagccaaaattggctcaaacagactttacaatttgtcactatgctggtgatgttagtgatcctcataacctgaaaatgcttgtcttgatgtcagttacgttggtccaatgactgtattattgtttaattccaggtcacttatcagacagaactgtttttggacaagaacaaagattatgttgttggagaacatcaagctctcctgagctcttcagactgttcttttgtctcatcgttgtttccaccattgccagaggaatcatccaagacatcaaagttctcatcaataggttctcagtttaaggtctgaactctgaactaatgttaagttacacctgattctgcttataatctctactttggttctcacctcgtactaaaatacagcaacaactgcaatctttgctggagagtttgagcaccacggagccacactacatacgatgtgttaaaccaaataaccttcttaagccagacatatttgagaacattaatattttgcatcaacttaggtgtggggtaagctttaaatgttttagagaaccttatgctttatgttttgcaactgtattaaactattcagctttcttataacgttgtggaacttcctgtatctgatctcagggagtcatggaagccattaggattaaatgcgctggatatcctactagaaagcctttcaatgaatttttagccgt

SEQ ID NO: 7754 - DNA, 1391 bp, Arabidopsis thaliana landsberg
aggtttcctgctttaacttggatcattttttgtttgctttttagtaacgttgaaagtgagtcaaagccttcaaattactatataacaggagacatacacttcattttcctcccggagttctgcaaaagaacttgaagaagcttgtaaccgacagcttttggtccaaactctatgaagtccctttcccggtacatgaatctcgttacttcgatagtggctttgaaaacaactcatctcgcaacagccacagccacacagttggctttaacgtcaacaatggccctcaacatcacttttctcaaggtactttaccttggaccttacgctaatcattttttttaattttttttgagcgagagacttaaaagaaagaagaaaaaaccattactttgataggaattggtggcgtgggagtgggagaaggaaactttagcatggctaacggtggatggcaaagaaactcatatagtccagtcaatagtctgaattataacactgctaatgagttctttggaatgcaagctaccccaccatcgtctcaagtggttaacgagcattataacacgcaaaacgatttcaccggttcacagtttggttatcacatgaaccaagacgagatccagaagatacttgagagtcaagcatatgcagtacctgatacacaaactaaattgatgtcttcagccatgaacaatgtcccaaagtatcctcaggctggatcgtgtctagaaagcatgttgttctggtatgaacatagaagaagatttcagcagtagacataattagggttttgttgagatatggatcaatgatgatggttctcttgagtcttgtaaataaagtgcagaaatcgcaactttaattacaagtctgttttcggttctactactatttgcttttattttttataattaggctggttcaagttgtgtctcgaacctgcggggatttagcttcaggcggtgtgctcagatcaatgcagcatttgttgtcatttatcttcaagagctagaacatgtttttctcctaacttagaatataccagagcattgtttgagctttgttgaacctcaaagtcaaaacatgagtctatttccacatacctatatttgatccatcataaaacttattgtgttagtctgtttctctcacaaatgcctttcttgacccccaaggtccacctcgattcagccactgttcaacatcatgcaagtctcttccccaaatctattgaaaagttggcaatggtcgtcgacaaaattgttacctcatcgaccaaatccaaccttttcctttgtagtaaaccttactcggtttgacatgaatactgagttgacaccacaagtttgacaatttaccacctgacattttttaggttttaggattttttt

SEQ ID NO: 7755 - DNA, 1187 bp, Arabidopsis thaliana landsberg
  unsure (1)..(1187): unsure at all n locations
tttacttcgatattggctttgaaaacaacaactcatctaacggttacagcaagacagttggcttcaacgtcaacaatgggcttcaacatgacttttctcaaggtacattaccttcgaccttacgctaatcattttttttatttgagtgagagacttaaaagaaagaaaaaaatcattactttgataggaattggtggcgtgggagagggagaaggaaactttagcatggctaacggtggatggcaaagaaactcatatagtcatgtcaatagtctgaattataacactgataatgggttgcttgggatgcaagctatcccaccatcgtctcaggtggctaacgagcattataataacacgcaaaacgattacaccggctcacagtttggttatcggatgaaccaagacgagatccaaaagatgcaaagaatagggaagatacttgagagtcaagcatatgcagtacctgatacacaaactaaattgacgtcttcaggcatgaacaatggcccaatgtatcctccggctggatcgtatctagaaagcagattgcttgaagaatggtatgaacatacaagaagatttcagcagtagacataattagggttttgttgagatatggatcaatgatgatggttctcttgagtcttgtaaataaagtgcacaaatcgcaactttaattacaactctgttttcggatctactatttggttttattttgtaattaggctggttcaagttgtgtctcgagcctgcggggcttggaccttgaagtctcttctcgatctcatcttcgatcaatggcccggcccttctctgtttaaaaaatactctgtgtcaacagttttgtctgcatggatggttagtcaccctttttgaaccttgataaattgccatcaaattcctcttcttgcacaatgagaaaaatatcgttatgatgtgtcaagattacaaagttgcaaactttggatcaaaacgctacaagacaaagatacaagtgatcatataatcatcatgatttttttgaagatccaaagcccccaaatcccatcatctctgcaacctcaggatccatctcaggctcttcttccaccaccttccctaactgaaaccagaaatttttgaaagactcatgtcagatttcgagaagacantcncaatatacaatcaaagtgaaaaagagctca

SEQ ID NO: 7756 - DNA, 1837 bp, Arabidopsis thaliana landsberg
tattttatgtgtcttcaaagttgtggatataggagtgtatattcgcttttctttaccaatctttgtttgcagattaataataagatatactatataggatacaaaaacgaatttcgtttgattcattctataaatttgaattactaaatcactttagttgagtttgttcaaggataaaaagtgaaaccccaattaaatttgatgattttcagatgtgtttacaaaatgtttcgaagaacacgcttcaaattgatttaaccaagatgaacacatccattaaatcctcattccatgaacaaaatgcacctcattgtccctaggccttaacagatctatttagtactaatactgtatttaataacttatcttggtaaagaaatcacagaaaagcttaacacatacagtttaaaccgtaaatttatcatagtaaaactgtaaaagcactaattataaatttaaaccatgctaataaaacaaaaacaagtagcacgtttttactttaaaccggaaacaggcaaaaccggtatccaattgccgagaaagatggaaggaataaataaatgttaaaatgttcctttgttgccactaacccacaggcttacgtcccatcatcattccccgttctctttttattttctctaatcgccgacgattatctctttcgtccggcgatagctattttgtctcttcaaatccccatagacgaatactcaactcttcatctccatgtctcctcaatctcatttctctccttagtgattgagctttttccttctttctctttggttattattccttctcctcctccgtcgtgtttttgattgatttcagaatctaaatctccgtttgatttctccatactcgtgctgattttcacctatgtaatgtgatttatgagctctgtttatttcaaatcgacggcgatcgttgaatttattgatcaatgtgtaagtaagagcttgaagaaatagtttttgttgttgttgtgaaagctcagagttttgtttgctttttttgttgacttttttgagattgatgctggatctcaatctcgacgtcgactcgaccgagtctactcagaacgaacgagattcgattactgttaaaggggtttctttgaatcagatggatgaatcggtgacgtcgaactcttctgttgttaatgctgaagcttctagctgtatagatggtgaagatgagttgtgctctacacgaacggtcaagtttcaatttgagatactgaaaggaggaggagaagaagaagaagaagatgatgatgaaagaagtgctgtgatgatgactaaggagttttttcctgttgctaaaggcatgaactttatggattcgagcgctcaaagttcaaggagcaccgttgatatttccttccagagggggaaacaaggtggagactttataggtagcgggagcggtggtggcgatgcttcacgggtgatgcagccaccatcacagccggtgaagaaaagcaggagaggtcctaggtctaagagttctcagtatagaggtgtcactttctatcggaggacaggcagatgggaatcgcatatctggtatatctactactgattgatttatcttttagataggtcttagatgagttgttgatctttggtcgaaaatggaagagcttggtttagattttgtattaatctacaagtttcttttttgtcaattttcatggttgcagggattgcggtaaacaagtttatttaagtatggattctaatggctgtactactgtgaactgatatctgctgggatcttagttctctaataaaagctttaacttttgaattcaatagggggatttgatactgcc

SEQ ID NO: 7757 - DNA, 622 bp, Arabidopsis thaliana landsberg
  unsure (1)..(622): unsure at all n locations
gggatcagtccttcaactagaaggcagcgaaagaaaatctcttcangtttataagcctgaaaaaaggggactagagataaaacaaatcaacttactgaaaattacctccaaatatcatatgttctgctgagaaatctccctggagaggaacctctccctaaaatgtagcagaatcaagaaagtaaataacatnnnnnnnnnnnnnnnnnnnnnnnnnnnnnnnnnnnnnnnnnnnnnnnnnnnnaaattcctaaaagatctcacaaaagcatgagaaatggaaagaagataagggactactcacagctgaaccaacggttttactccatgatcctccaaggtaagacaagtcaccactgcaaacaagttgagtatcatggaaagccgagcggctaagaacttgtacaacgttctttcctcccaccatatgctttccagccagaatcttcaataaggttgtcttgccttaacaaatttaccaaaggaacacaagcattagtcttccagaaaaaacaaaacaaattcaatagcctggagtagttttgaacatggtaaatacctcaagctaatcgcagtattaagatcacatggcaaaccggattctactacaacgacgtcaaaa

SEQ ID NO: 7758 - DNA, 1308 bp, Arabidopsis thaliana landsberg
gtactcgacgagaggaaacagagaaggatgctttcgaacagagaatctgcaaggaggtcaaggatgttgaaactgagacatcttgatgaactctggtctcaggtaataaggcttcgcaacgagaacaactgtcttatcgataagctgaaccgcgtatcggagactcaaaattgtgtattgaaggagaactctaaactcaaagaagaagcttctgatctccgacagcttgtttgtgaactgaaatctaacaagaacaacaacaatagttttccaagagagtttgaagataattagtattactcaaagtgtccaactttatcagacaaaacgtaatctattaacacaatcaaaagcagaaaattttggttttataccttggagagtgttctgttctatacagtgactttgaatccgttcttcaatatattcattgacatggactttcccatgattcccaaacccatagaaaaccctacttccattttatatatcttctgcgattatagacttatagtgcttactgcttagtgataatggtctaaaagaatgagacatttctaatcagggagccattatcatcaaatacttacttgaaaaggaagtatttacagtttactccctaaactttgattctttttgcatctctaactggcagtttaagaacgaacaagatttcgccacgtgattgaaatttggctaaaactccagtgtcatttggaatcttattttactccagtcgggcacgttagaagttctcaatcaaatttatttgcggagtactaatctgaatttacaaaatattattcattttatctgatagtttatgaaatgtcaatttagtccatgcttctaatctattgacatttttttttctttcttctatactttttttttttttttttgttctggaccgaaatccgtaatactagttttgcctagagtctttaccaattaagctaacgacacttaactctttctttcttctattcttgtgcttctacaatgggaagatcaacgtaaacatattattactaaagtttacatacgatagtaaacataactataatgggaagtgcaagtgttttttttattttatttgtaggtataaaaatatgctatatcccttttttgtgtgtgtggttggcaaatcttaggctcagcctttttcacatttgtctcttgttttatttcctcttcttttttcctttgcttttggtccactaaaaaacattagtcttgagtttgaggcaaaaaatggagaaaaactgagaattttgagaacaacgaatcttgtaatcgttgaagaag

SEQ ID NO: 7759 - DNA, 715 bp, Arabidopsis thaliana landsberg
attcgagaaacaatcaaaacccaaaatccctcttatttcaaacacgtggcgaaatcctgttcgttcataactggcagttagagatgcaaacagaatcaaactgtagggagtaaactgtaaatacttccttttcaaagtaagtgtatttgatgataatggttctctgattagaaaaggctccggctttatcattctcagaccatcatcactaagcagtaagtaagcactataatcgcagaagatagataaaatggaagtagggtttctgggtttgggaatcatgggaaaagccatgtcaatgaatctattgaagaatggattcaaagtcactgtatggaacagaacactctccaaggtaatttttttttttttttgtctttgattgtgttttggtattatggtttgtctgatttagttttagttgttcagatctgataaagtcggaaactttttgagtaatttaatgcaattttgggaatttttgatgattgtgacagtgtgatgagcttgtggagcatggtgcatctgtatgtgagagtccagctgaagtaatcaagaaatgcaaatacactattgctatgctctctgatccttgtgctgctctttcggtatttgaaatccttttttgcttcttttgtgtgtgttttagcattggagatgaatgatatgaagtagttggtttgattaggttgttttcgataaaggcgggggtttt

SEQ ID NO: 7760 - DNA, 1993 bp, Arabidopsis thaliana landsberg
gatgtcccatgtctcttctcttgacagtgcacccttcatgaattctgttgaatcttgtttaaagaaaacaaccttctctggatccatattgttgaggattacattctctctggcgagctccaaagcaggtaaagatgaatcaattcctgaaagtgttttgatcagacgattcactagacaatgcataaggtggatcagaaggaggagagagatgaaatgtaccgataacactggtagcacctcctctcgctgcattcagtgcaaatccaccactatagcagcaaagatcaagaactcttttaccagcagagatggttgatatgaagtgacggttttcgcgctgatccgtgtagaaccctgtcttctgtccctctagcgaaattgcgtatgagatcccattttccacaacctggtataagaaacattactcagctctcacccctgtaatgttgccatattcatgaagatatctgaagaagagagaaagacctgattaagggcaccacacaccgtaccattgatctctgtgggagagtagatgattgtgtctgtttcagacttgagatgtcaaaaccatcttctttaagaacatcaagagaaggtctccagtttatatgattaattccgtcaattgatcttaagcaactctccacttcaatcctgtacttttcaagccaagcagcagaggatgctaccacagctatatctccaaacacatccacaatcaatccagacaatctgcagcagagcaataagacaggaccagagaaaatgtaagaaaatgagtttaaaacaaaaaaaaaatgacgggatcagtcagcgaaatacctatctccttcactgttgacaagacgataagcattagtattagccgagggaagtgccaaactctttcgcaactgaactgcttcagcgattcttgtttggagaagcttctcaatgttcaatgcacaagaaggatctctaccacaagcgagccaagaagatcaatcaaagattcaattttgaaaaaagaatcaaacaggaaaagtgtagaaatggaaacctggtggattcgtgttgaagctgcataaggcgaacacagaacatagaaacagagttatacaaaccccaaccaatgggattctcagtgccatcagctacaatgacaacatctcctgtctgaggaggtggttttccgatgatcctgtcgacagctccactgtacaccattggacttccgtctttgaagagctgtgtcttgccttttttcagaaccactttagcaacacctgaatattttcaattttcaagtaaataagagatagtttcgcagaaactaaagagacagagagatattgaccttgagggcgagaagaagcaatttgggaagaggagtaaaagagagagtgatggaggcggcagggaagctggagcacaccgagcatcaccatcgtcccgcatttcttggctgcagcgccttgggacttgggtagataggacataaacccgctaatgggccaccggtattgatatcttttattgggcccattttctacttttagcccataccatcaatgccaaaaacaacaaaccaaaagtataaaaaggtatgggatgataattaaaagtaggagaaaaagggtgtttatgtagtctactctaagctcgatttagttatctcctcgaggctcctctcatttgccttttttcagcattaaactgttctatggaagtgttattcgactgctagtagggaagaatttttagagttgtggtttgggaggctttatctcttacttctttagttgttatctttgtatctcttctaaaacttgttccttgtcgattatatataactcaggcgcatcaaaaaagaaaaatctacacataagatatacaaatgttttcctgcaaaatgccgtcaaccttttttgaaagataagttgcttcgggagttttttttttttttgaagtaggagtatcatgtctgatgttaggaaactaaggtggt

SEQ ID NO: 7761 - DNA, 451 bp, Arabidopsis thaliana landsberg
  unsure (1)..(451): unsure at all n locations
aggaatcaacaagaaagctcttagaatgttcccagttgtgagttactcacctgagatgaacttgccggggcttggcgaagagtgtgtcatttgtttgtcagattttgtttccggtgaacagattaggatgctacctaagtgccaccatgggttccatgttcgttgcatagacaagtggcttcaacaacatttgacttgtccaaaatgcagacactgtctggttgagacatgccaaaagatcttaggtgacttcagtcaagctgatcaagtggcagcaacaccaacagcgagcgtaattgtcaggattgctcctctggaacctgaaggaagagtaaacattttaagagaaagcagctagatgccaagagaggcagaaaccatcaaaaatcaaaattcgtgatttagttagataggagattntttgatctgagcttaagttcatgtctttagc

SEQ ID NO: 7762 - DNA, 1115 bp, Arabidopsis thaliana landsberg
tttgcaaaatctgaccagttttgttttagcgattaacgtttcaaattccttcaaatgcaaaatgagttaaacaagtgaaaaattactaaaacaacataacagttttaaattggaaaatatttaagttttgtaaagtttaaagatacactgtaagtgaaaaacggaaaattttaattagattttttttttttttttttttttttttttttggtaaaagtagattatttttgttaaacaaaagtgatggatcattgattttttggtagtaggtgagtgatgtgggtgtgtggttctggttcaccaactcaaaaagcatagactgcaggggttggggattgataacgacaaatctaatcgtggttggtaaatcttttactaatcacattcctttaaaataattatgtaactcatcttgtttactaatatcaactcgactatctttttcactttagaatggttcggtgaatctcttgaataataaacactttaataaaaatgttttatttttgtcaagcataaaaatgtaactcttgttgtctaactacatggattttcgcacaaaacaatgattaaacgtaaattatgtaattatactttatttaaagtatgattttgtcttaaaaatgaaaataatataaggaagtggacgggtaaggtaaagtctaaaatttcaccaaacatcttggaatctctctgtttagtataaagcagtgagtagaagaacctgaaagaactcgcctttgtctctcattcttcttctccatttcgaaaagaagatgaaggtgatagataagatccagtcattagccgacgaaggcaaaacagcgttttccttcgaattcttccctccaaagacagaagatggagtcgacaatctctttgagagaatggatcgaatggtggcttatggtccaacgttttgcgatatcacttggggagctggtggatctaccgcagatctaacgctagatatagcttcgaggatgcaaaacgttgtttgtgttgagagtatgatgcatcttacgtgtactaacatgcctgttgagaagattgatcatgctcttgggactattagatctaatgggattccataatgtgctttcctcttaaaaggt

SEQ ID NO: 7763 - DNA, 1112 bp, Arabidopsis thaliana landsberg
  unsure (1)..(1112): unsure at all n locations
ctaagcgatatggctatccaattttttctcgtttatcgaactctaaattcttgttaccattgttaaaggtattttttgttacaaattttcttaggaaaatgggatagtcacgaactcaaatctgtattttcttctttaaaaacagaaatttagggatacgaaatcaagatcataacacatattaaaacaaggaaaaggccaaaaaccgtgacaatccacagaaaaccaaagagagacaatgacgtgacgtaacacatatctccattttcattcagatcgttttgcatggagcatgaatgtgtagcgtagcgttcacgtagacttccactagttcttgataaaaccccacttcttcccaccactaaatcataaaccattcgatcagaccaaatcccagccgtttagcttgatcatcccaaagatgtttgagattattcaggcggtcttctccgccggggttgcactagctcttttgacattcgccggtataaccctcggcggctcagtggtcgcatgtatcataagcacaccactttttgtcattttcagtcccgttctcgtgccagcgactatagccactacattgctagcttcaggtttcacagcctccggttcctttggtgccacggctttcaccatcctttcgtggctctacaagtaaattattgcaatttggtttacttttattgaaatgtagttttaggcatatgcatctacatgggaacttatttatatgcatgattagacatataatatacatttcaagggatgaacattcggttgtatatggtatagttaatagttattgattttgagaatgtataaccttactaaactttatcatgtttggtttaaacctggttcatgttcgattcataatctttagtttatacaaacacaaatcaacgaatttaatttagtaatcagaagtatgtgattgtatgtaggaaacgtacagggagggacctaccaaaaattccaggattgacgccaccggctccggcgtctaacccagcaggttccggcgtctaatccagcagaatcggggcaacccgnttaggcgtttcctaatttgggatgagcatgaggaactgatcaactcattctgggtc

SEQ ID NO: 7764 - DNA, 883 bp, Arabidopsis thaliana landsberg
cacacgataatctggtttgttgttgtaatgtagcttctttctccgagcttctatggatctatcattgaagttttatgtttcttcagtttatccttctaccttgttgtatgcttgtgtttaattagctttttgtacccaaccactaggttgatgatcttatactttttgtcttcctttgagattgaatgaatggataacaagtatatttggcacacacacaaaaaaaaagatccatccattttccaaaccagaattaatatttaataaattatccctttcaactagaatcaattatgtattttcaaagtgtctatgttttttatttgtctagatttaacttatgtaatccctaacgagtaacgactaagctaaccacttaatattgtcgcatgcgtacaaacgggtcagtgacgtaaggagtacccaaaattcaaatctcctaatggataacttcacctatataaatttcaaagtttgtaatgtatccatttcacaatcccagtcaaactcggttgccgaaatttcccggcaaaacctctaacaaaccaaaatccgagaatgacctttttacccttacttttcctcttcttcttcctcacatcaataccctttcccgccttttcccagttcaacgaccggtcaacgctgcgaaacctgaaacgcgatctcggcgacccattgtctctccggctatggaacgacacatcttcaccgtgcaattggccgaggattacctgcaccgctcggaaacgtcaccgagataaacttccagaaccagaacttcaccgggacagttccaacgacgatttgcaacttcccgaatctcaaatccttaaatttgtcgtttacttacttcgccggtgagttcccaacggttctttac

SEQ ID NO: 7765 - DNA, 1619 bp, Arabidopsis thaliana landsberg
gttgaaaagccttatattactgctgctgcttctgttgttgttactcctaacaccactcttcctatggaatggctgcggattactctccctgactttatgaaagaagcgaggaatactcaagaagcgatatctggtgatgatatcgctgttgtctcgggtttgtttgttgagcagaatgtgtctaaagaagagagagagcctttgcttacttggaaccgtttggaaagtcttgttgataatgcacagagtttagttaatggagttgatgctattaaggaagctggcattgtttgggagagtcttgtgtctgctgttgaagctaagaaactagttgatgttaatgaaaatcagacgaggaaaggaaaagaggagctttgtcctcagtttctaagcaaaatgaatgctactgaagctgatgggagtagtctgaagttgcaaattccttgtggtttgactcagggttcctccatcacagttattggcatcccagatggtcttgttggtagttttcggattgatctaacgggacaaccgcttccaggggagcctgatccacccatcattgtgcattataatgttaggcttcttggtgacaaatcgacggaagaccctgtgattgttcaaaacagctggacggcatctcaggactggggagctgaggaacgctgtccaaaatttgatcctgatatgaataagaaaggtgaatgcaagtatagtttcacccgcttacataaatgtagtcacttgatcctccatgaataagtctgtgttgacatgattataatacacagtggatgacttggatgaatgcaacaagatggttggtggagaaattaaccgaacttcttcaactagcttgcagtccaacacttcaaggggagttccagtagccagggaagcatctaaacatgaaaaatactttcctttcaagcagggtttcttatcggttgctacacttagggtgggaacagagggaatgcagatgacagttgatgggaaacatataacttcatttgctttccgcgatgtaatatcatcactcttcttatatatttttctactgctcttagcaattttccatcaaatgtttagtgtctcatatgggttcttcgtctttcagacactggaaccgtggcttgttagtgaaatacggattacaggtgactttaggttaatatccattcttgccagcggtttgcccacatcagaagaatcagagcacgttgttgatctagaggcactaaaatcacctaccctttcaccattaaggccactggatctcgttattggtgttttctccactgcaaacaattttaaaagacggatggctgtgaggagaacatggatgcagtatgatgatgtaagatctggaagagttgcagtacgcttttttgttggccttgtaagctttctccctctctgaaaatatcaggagtatgttggaattgcataattctaaatgatgattttctttgtggttggtaatgcagcacaaaagtcctcttgttaacttggaactctggaacgaggctcggacttacggtgatgttcaaataatgcaatttgttgattattacagtctcatcagttggaaaacactagccatctgcatcttcggg

SEQ ID NO: 7766 - DNA, 528 bp, Arabidopsis thaliana landsberg
aaagtagtaaaaatttctttgtgacaggagtcatttcatttctattataactgatatgcttgacgggggtagcagagaaagtaggaggtatgacttattataaagtcactaatcacagagaaaaatatgaaggattgcttgatttctgacttcaacttgcctttgatgtgaatgtaaagttaaaagttgaatttttcttgcagaccaagcggtatggatatatctaagcatgatgtctcagaaggaagtcacgtttttaaagctcgtcctctgaacaagaaggtactatccattctcgagtctcatttgcttgcattatagtattgcacacctaatataggtttccgctcctgctaaacagatactttcaagcagaggagacatgggcattttcaaaaatagcaagcgagaaacaacagtacctttggtatggcagccttaccaattattctttgcacttgatcttctggtatgttcatgaatggagttttctatgagtacataaactgttttctgatatgcaacaca

SEQ ID NO: 7767 - DNA, 2201 bp, Arabidopsis thaliana landsberg
gaacgtcttgaatccacattcataaagcattttgcgaatggtcatagaagaaagggaatgaacattttacgaccccttatgaaaagagagaaacaccgagttacattctccaccggtagaatcatattatattcagtatgttggttaatgttttgctagtgcttttggtgtttatgaggaatttgggtttcaggtttctctgctggatgtatattttctcttatcgtggctcttgttgccatcatacgcacccggaaaaccatgccggaggcagagcataatacttacatgaatactatgttccctctctataggtaaagcttagtttgcctcttgtacaaatcttattttgaggtgaatcttttgtttagttgcactctctctgccttctctgttgttcctgcagcttgttcgggttcatcgtgcttcacataactatgtatgctattgatatatactattggaagcgttatcgagtaaattatgccttcatatttggttgcaagcaaggaactgaacttggttacagacaagttctatttcttggattcaccattggaacgtttgcgttgctttgtgttcttggaaatcttgatatggaagtaaaccccaaaaccaaaaatttcaagccattaaccgaacttcttcctcttttccttcttgttgtaagtttcgtaaatccaaatatttaagctttttttgtgcaaactcagctatataatggaactaactctatatgatgtttgttttaggctctgtttgtagttttaatcatgccattccattttctctaccgctcaactcggttcttcttcctcacatgtctgttacactgtcttgccgctcctctttacaaggtaaaagacttaaatttagcggcttatcaatgttggtaatcttgtatggttactgatgctttctcaatgtaggtaacgttacccgatttcttcttaggagatcaattaactagccaagtacaagctcttcgaagcatcaacttctacatatgctactatggttggggagacttcaaaaaaagagaaaacacctgcgaagcctcagaaatctacatatattccctatacattgttgcatcactcccatatctttcccgtcttcttcaggtactaaagtttcttcaaaagacacatacatgtctagagcaattagataatattatctctgttgttcaattggtgcagtgcatgcgacggatgattgaggaaagaagccttgatcaaggatacaacggagtcaagtacttgttgacagtcatagctgtttctttaagaacagcctacggttatgaagaaaaaaacacgaagaatcctacatcacaccttaaagtgttagctggttcttcctcgattcttgctgctgttttctgtacatactgggactttgttcatgattggggacttctgaacaaaacatctaaaaaccgatggcttcgggataaacttctcatcccacagaaaaaagtatacttcatcgcaatggtaagccgcatttaaaacatcttcgattataaaatctccaaaccatagaaacaactgaattcttgaaaactaaacttcagatcttgaacgttgtgttgagattcgcgtggttgcaaacgatactgaacttcgaattcgagttcttgcacaagcagacaacgcttgcggttgtggctagtcttgagattatgcgccgtgggatgtggaatttcttcaggtttacttactttacacattgttactttggtttcttctttaccgtttttttctatcatgggtttgtgaaagttttctttacaaaaacagggtagagaatgagcatttgaataatgtggggaagttccgagctttcaagtcagttccattaccgttcaactacgacgaagacgatgaaaaggacgactaaatgttggcagaagaacgttttaactttttcttatacatgtgaacataaaaatgaagtttgtaacaaattgttagcgtctagtgtttacacaaaaccaatagaaatgtgaacactttgactaaccagtacaatgcagtgtataccgattttctatggtaagtaggcctttcgtgatattccaatgagctcaagtcattactataatcggctttagatgtaaagcagcatataaagggggcgtctcaaacgtgtctgacgaatcgacggcagtgagttaagtgactaacgaataatat

SEQ ID NO: 7768 - DNA, 450 bp, Arabidopsis thaliana landsberg
gatacgaaccgcgtttctcaaagaaggcaaaccgatacagctaaagcaaggtcattagatcaccatctcaattgattacaagatacaaggagattccaacactatctccatgagctacaagaaacttgcagaggatctcaaacctggtgacgtgatcctttgttcagacggaacaatctctctaactgtcttgtcctgtgacaagtatctcggtcttgttcgttgccgatgcgagaactctgctcttcttggagaaagaaaaaacgttaatcttcctggaattgtagttgatctcccaacactcactgagaaagataaagaagatattatgcaatggggagttccgaacaaaatcgacattatcgctctctcttttgttcgtaaaggatctgacctaatccaagtaaggaaattacttggagagcactcaaagagcatcatgcttatgtc

SEQ ID NO: 7769 - DNA, 2876 bp, Arabidopsis thaliana landsberg
tgcacctgacgttgctgcaataaaggttcgagtctttaaaacagagtcgtccaatgatggtttttaaatctgaaaattcaaggattcatagcttaaactggttattattgtctgaaacaggctgcaatggagaaattgcatgttccacatgagatcgatgagagcccgtgaaaccatagctactccaagaaccttgggtatgaattaatgtgagaccgttgctgctccacgaaccatgggtatgaattatttagtgcaaagcctacctgttttagggaactagttgggtttgaatgtagttttgttaccaaaccgtaacacagccacaagagcccacatgacttgagtatgtatcatgagttgatctgtatgttgtccctaacactacctaatcgcaatatatgatttttccacatctacatatacattttaccacttaaaccttgttcatcaaaagataatttatttcgttagtttttaaaccttgattcaaacctatatctttattttccaagaaatatctaacaatattgatcgactgagatataattaaaagatgcggcttcaaccacatactgtacatggtttaaattaacttgtacaaaaaaaaagtctttttatgattcatctttgttttcaaattgaagaattccctaagtaatatattttgtttttattaaatgaagcagggacacacagacacagtatagtaaagtaatcagcgaatatttttaccatcaaagtaaaaatttaacaattaaaaatgaagctgaatattttattatttttattctcccaaaatgaagctgagaacaaatcacggatgttgaatatataattcacgtgaattataatctcatgatgattatagaaattttacgtaatttacgagatttgcactcaaaaatgaagaagaagaaaaacgtaacttgcgagacttttgatacgtataattctataattctatgatttttttttcttccgaacaatcataactcgactttcggtgggattaacgaacgtcactgattctgacttttgtggttatttgcctcagtttatatcgcttgaaaagtaacggcgacgactaccagtaaacatttacgacaaatcctatgattgcctttgcttttataactttcttttttcctatattatatgtttaatcctaaagtttgttttggactctttcatacatatgtttataattgcttatcatgttataaccggatttcataaaactagggatagtacacaattaattaagatcgctatacttttgttttctagttaagaaagtacatacaaaagtgccttctaacccatgctatatgaacttgtatatgtcaagggtaaactatatcttaatctagtttgtctgtgggatcaaatcttaatttatagatgctcttgaaatcactttttcttgtacgtcgaagaacaattgatttttgtaagagatacactttggaaatgcatatgcattcgaattgaaccattgcttttgtttgctattgtcaatctaaagtgtgaaaagcttggagattgtaaagttgacgctaaaactgtaattttgtattgagttatggtcttattgaatgagatgtattattgatagtgatattctgtttatatacaagagtaatcggaggactaattagatcaattagatgacttgtcttgatctgtagaatatcaagtttccttattctatcaatttcttgtcctggatttacactatgttaaagagtttttcaacattaggaaagtgaaaagaataagatataaaacgttccaaactccgtaaccccaccaaagcaacttctataaatacgttagccaagaaaatgctttcttttacgacacaataagttccaaaacaattaaccacacaaatacaaaatgaatgaaatgtcgttctttggttatagtttcatcgtagtagcattattcttcgatttaactcaagcctatcgtcacactcccgctcaaccgccaaaagcaaacgcaaacggtgatgtcaaaccgcaagaaacgctcgtggttcacaacaaggcccgagccatggtcggagtcggaccaatggtgtggaacgaaactcttgcgacctatgcacagagctacgcacatgaacgagccagagactgtgccatgaagcattccttgggaccattcggcgagaatctagccgcgggttggggaacgatgagcggtccggtagcaactgagtattggatgacggagaaggaaaattacgattatgatagtaacacgtgtggtggtgatggtgtgtgtggacactacactcagatcgtgtggcgtgactcggttcgacttggttgtgcctccgtgagatgtaagaatgatgagtacatttgggtgatttgtagctatgatcctccggggaattacatcggtcaacgtccatattagtgattggattttattatactgaatcaacaagattactatatatggtaattaatgtgatttaagaaaaattcatactataacattttgtgtccttaaatgataaaagcatatataaatgcacactagtttttttaccatcaatgtgagatatgtttccatgatatatcaaagttgttgatttgattataatcgacttcagaattcttacaaattttttctttcatttcgctctacagcaaaagaaaacatggacagtttaagattgaataacagaaaaaccctataacaaaatagaacattttcaaaatatgtgaaatatctttaatacagtatatagcactctaattcaatatacaaaacatataagatttataggtttttttttttgccaaactataaagttgattgttatttataattatcgaaaggaaagaaaaaatttc

SEQ ID NO: 7770 - DNA, 831 bp, Arabidopsis thaliana landsberg
ctgggcttagccggatcaaacaagagaagaaacgagacattacctgacaccagtgttgtatgaactccagatgaggacagttctcaagcagatccaccaaagcttccataagcctttctaagtatttctggcggacagagatggcaacagcttttatgtctgcaggggctacagcgaagatgcattttttgataaggctatcttcgttcaaacgcatacttagagcaagtgctctgctaacttcatcctcttctatggcagcctcaacagcctacacaaataacaccttagctttacatttcaaaaccaataatcagaactataaccaccatcagcgatttacaaaaggctcacctctggagtaacatctatatctagatcggtcggatcaaagatgaaggtatcgtcaattgaaaagatgaggactccttctgttgttgcagcagcaaagctccttccagttggggcaatgctgaggctttttgtccggataatgggcctgccacggttaggcctggatccaggcagatcgtaacccagattccctctcgactgtttatcaatgccaccttcttcatcgctgttgtcatcatcgatcagatcaattggtcctgcttctgtcatcttcttggagtgcaagaagttcagaacccatctaacgaaagattatgggatatctgaaaccgcgcagaaaaacctgaaaaggtgatattccagacactttgactaagtttctttatcagaagaacacaagctttaagaaaacctgaactcccagaggagctagttagctaacctgatctgcgatatcatacatgcaaatatatctgc

SEQ ID NO: 7771 - DNA, 1030 bp, Arabidopsis thaliana landsberg
ttcagaacggccatgctcgtacaactacgtatcacaataatagccagagtagtgtgtatgatgttaacaacaaaaaccagacattcaaagcgcaagactttgctattcaaggccaacacggaagttgggacgaatcttactatgccaacaatcagcagagctggaaacacttggcaaccagtaaatgtaggtaaggctgagcctgctgtaacttctgattcattatcacgcttcggaggaaaccagcaagtaaataatttgtacagtacagaatctgtggctgaacagtttaagccaaatacgattggagcccagagctttatccctcagcatatgaatgtggctagtgccacacaaaatggaccattgagtttctcaaacgatttgtataatagacagcaatcggtagatcatgctcaaaagtcttttcagaacaatcagcttttctccccaagtgtgggaagatcatctgataggcgtccaccacacgcactagtcagttttggatttggtgggaagctcattgttatgaaggataataatggttctctgcagaatacatcatttgggagtcaggttagttcttaagtgtggattttcattagtttattttacaccctgggaagttagtaaaactactgtagagctatcactttttttttttttttgcttatcactgaacatttatgaaatatgttgtcaactattgtccaaatatgttagtgaaatttaattcaagattctgtctaactgctgatatttctctatttgatgcaaaggggattgggggaagctccatcactgtcttaaacttggcagaagttatttctgggagtgcctcttattccagtcccggggaagactctttgagctactttcgttgtctgcatcaacaatctcttccaggccctttggtagggggaaatgttggaagtaaaaagttgcataagtggattgatgagagactcttgcattgtgaatcttccaacatggatttttaagagggaaactcttaaagatgcttctttct

SEQ ID NO: 7772 - DNA, 1920 bp, Arabidopsis thaliana landsberg
cgtctctccttgttgatgtttctgttgttatggaaagtaggtatatgagacttggtttaggttcagtccaagtcgagttcatcatgctttgtagactgtttttgtttggatgtgaaagagggtgtgattctcgagtatctctatcgattgtttgcgttttgtggattgaattttgacatcaatgataatcatgaatctgcagggaaaatgagcagctttcaaaatatggagacactaaaactgcccggggcataatgctaggcgaactcaaaaaactgattgaagcgaatcctctttttcgtgataaattgatattccctactttgagatcttcgagactgcggactcttattaatcaaaggtgtgtttcttttttctttcctcatgaccattctgtatgttgcagatgaggtttggatgactttgttgttggatgattcattgtgcatatgttctcttgcagcctcaattggcagcaccagttgtgcaagaatcctaggccaaacccagatattaaaactctattcacagaccacacttgcacacttccgaatggtcctctcgctccttcagcagtcaatcagcctgttacaactttgacgaagccagcagcttatccgtcacttggacctcatgttgtaagaaacctcgatgtttgactgctttaatcatgttttttgaatctaaattaatcttaatgtttgtggaatctatattacatgtagccctttccacctggtcctgctgctgctaatgctggtgctttagctagttggatggctgctgcctctggtgcttctgctgtccaagctgccgttgttacacctgccttgatgcctcaacctcagaatcaaagttagtttttgacgatcctctagatttctaatcctcgacttatcaataactatcatttcagtttccatcaaaaacttattatttttcttccaaaaagtgtcaatcttgaagcgaccgagaacaccaccagcaactccaggtatagtagattatcagaatcctgatcatgaactaatgaagcgtctccgccctgctccatctgtagaggaggtaacgcgaattcttttctttttctggaaagctgtttatataattcttgcatcttctcaaaattctaagcatttatcattttccaggtgacatatcctgctcctaggcagcaagctccatggtcgctggaagatttgccaacaaaggcagctctggcgctgcatcaagggtccactgtgacaagcatggagttctaccctatgcaaaacacgttacttcttggtatgggggtttgaaaaaaagaatacaaattctaaactgtgtttgaagttatatttctgttatctcttatttggctttctgaatgaccgtttgaatgccatcagttggatctgcgacgggagaaatcacattgtgggaacttgccgctcgagagaggctggtttcaaggccattcaagatatgggatatgtctaattgctcacatcagtttcaggtttgtctttacagctaagaagtttttagtttatgtgtttgatgtataaagtcggaattcaaccaaatggctatgagaagtgttggagataaaacgtatcagcaaactagttgctgtgcaagattcttatacttgcctttcttttggcatcattcaggctttgatagctaaagaaacaccgatatctgtcactcgcgttgcatggagtccggatggaaatttcattggtaagcttccgtcatgcattgttggattttaattgtatgttgtctatggtctctggtctcagtctcttattgtgcaggggttgcgtttacaaaacatctaattcagttgtacgctttctctggacctaatgatcaaagccaacatactgaggtaagcatacttgtgatctgtacgagaaatattgcgatgta

SEQ ID NO: 7773 - DNA, 2845 bp, Arabidopsis thaliana landsberg
ctgacgtgggtgataataacaaccacggaccggtatcccaaagatctctctttggtcgagtggttcataaccaaaatcaaaactgaagtgaatcataatggtcgtctggtcgccgaagaaaatgatcggcggtggtagggtttattgggggaagaagttagataaagagatggaagatgcggcggttgttgacggtggtggatctaacggtgttgttgtgatctttgtttggagctcgattaacgagaaccagcttatgaatttcgttgatctttattcttctcttggttggaattctcttgtttgccgcgctgattttctcaccgcgtaagttcgttctcttgttctctctatctctctgagtatattttccggcgaactagctaatttctgagaattttccgatgatcaatggttttgtgtagcttagtatttgtaaatgagcatttagcagaaaaaatcttttggttccttgtgattttttctgtaaatgtcgtttttgtaaatttttatcaatcaaaattgtaaagaatctaaaagattccgtttagatattctttgagaatctctaaaagtagttttgattatttgtctatttttttcaggttttatcctgaaatggctctttctttagcattccatcttctttctgagcttgttgaggtaaggtttgatggtcaggaatgtgatgagttctttttttagattggtacatgtttatgttaaatgattctctcttttttggttttggtgtgttacttaatgttgctattgttgttattgttcaggagttaaagagtagaccatgtcctgttatctttctagctttctctggtgctcctaaagcttgtatgtataaagttctacaggtaagcttaaaaggattcaacttccagctactttgtggtcattttgtgctgttttttatgtttctgtttcaatgggtatctaaaagtatgttaaacaatgcaggtgatcatggatgattgtgaagctcaaattcatccggtgagaattgtctcctatacagttttatttgaagtcatcaaatgctgcttttatgttgtttctctcttgatttagttttgactcattgattgttttctaattttgtgaaggatgatagccagttggttagaacctgtctttctggacatgtctatgactctggcccgttggattttacgagtgatttgaatgtgaaattcgcactacatcccaccatacgacgaatgtctggtccttctagactagtatcttgggtggctaaagggatttcttccgggcttgatggtttatatcttacaagatttgaatcccaacgtagtgagtactggcaggccctctactcatcggttgtaagtttccaacgagtttctatgccttctttgattttggattctcaaatttctagctaacagtagataaattttccaggaaattggggctccatatctcattttgtgctccgagaatgatgaacttgctcctctacaagtaatttcaagctttacccatcaattgcaggaactgggaggagaagttaaggttgtcaagtggaaaaattctcctcatgcaggttagtcaacatgctatggttgtgacaaatatttatgatatgcggtatatgctatcacgtggtctcttatggcctagccattctttgataatggttagtctatgtcctgaagatagctattggttttattgtcaatgctacaaaatctgaggttatggtcttttttgctcctctctgtcttcaggacactacgcacataaccctatacaataccgggctgttatctccaactttctggagaaagccatgtcagttcacttacataaaatccggcagctcggagaaagagctcacacgcatgatgaaatctctgagttaatatgcgaccttcagaaagttgctgtgaactctaaccaaagcctaagaagagtagccactgggccatgtgaccactttttcttacctagctcagcaccgtatcaaagcaacagcaacaacagcgatccatcatcttcacaagaagaacagagagaaagatcgtcctttcgcccactccaaccaacgagcataaacgctcacagcgtactcgggcaattcctattcgactcatgtgttccaaagaacatcgaaggatgggatatcagatttgcgggttgtctcaacggtcaaccatatgccacgtcctcctcccgtaagaactcaaatcttggttttaagaaacgctttttccgttcaagactatgaatgaaatcgcagaaactgagcaaggtactgggtgatgtgaaccatatggggaagtagtagagagatgtttagaaaggaagaggatgtataggatgcggaagatgtatatagagtgacgattactacaacctaacatacatgagggatcttcaaatgttgtgtgtacaagtctcaaaaataagtctgtatagatagacatatctgttacttgtctacacgaaaatgtgttaataacacactgtaatatgttatgttattatagatttgttcaaatctttatattcaaacttcaaagtaaaaatattattcaaactacacaaatgtgattttgagtcgatatggcgagatcattgatttaagaacttgacgacaattgataaaaataaaatattcaaggcctaaagttgcaatatcttaatttaacccaactcggcccaaatataatttactcaacaggcctaacaagcccaaaagtgaatcttatcataatttcatttcctgggaatattctcatccccaatcttattttcacagactctcactagggttttggtttctcctatcagggttttaatcgttcac

SEQ ID NO: 7774 - DNA, 499 bp, Arabidopsis thaliana landsberg
gaaaaatgccgagacgaatttttttttttttttcccataaagtcatcctttttttaaaccaaactgaaggaaaacggggacaggggtggttttaaccacttacagaacaagagcccaaaaaactactaacaacatgagattatctatgaaagagtcatttatgttgctaaccaaactactaccgatgagggcaactagagtaagctttaaaccctattacaacaaactgcaggtatgtaaagaaacaaaaaggaataccaaaccttcgggatcataccctattattcaaaccttggggctgctttcaaagaacctaatcagcatagaaaacaaaaagtgtgacagaataagcagagtgattaacgcttctttggaggtttcagaaaacctccatccttatgctcaacctttctaggagatgtttcttcttcatcacttttagcattgctcatgttcttcctttttggtgaatatcctttgaccaccttttttgctggat

SEQ ID NO: 7775 - DNA, 1555 bp, Arabidopsis thaliana landsberg
agctatatcgatatttattcttctggattagccttattcgctgtaattttgattacctttgttaggtttttagtgatctctcgctcttgattcgcttgccattactacgaaatccaagttatgggtacaagggcaatgtcggtcctgcatgttatatgacgagtctcaatcaaagtagacttgcatgtttcacttcaaaatcatattcaaattttgagtcttgttttcttgtatgttgcagggtgatgagctgaaggtgaaagtgaataaattaacttccataaagactcagcttccatactcgtattactcccttcctttttgtcgccctagcaagattgtggacagtactgagaatcttggagaagtgcttcggggtgaccggattgagaatgccccatactcggttagtctcgtattcaatttttaattttgtaattcatcaggctgtcaaaaatattatgtctgtgatttaactctaacccttgcggggctgaaacaattgcagtttaaaatgcgggaggcacaaatgtgcaatattctcggccgggtcattcttgatgccaagacagctaaagcgtttaaagaaaagatcgatgatgagtaccgggtcaacatgtaagaccaaatacaggcacttttctttgattatttgtatgaagaacatgcttttctctgtcagttttattataagtgtttctggtctgtgttaggatcctcgacaaccttcctctggttgttccaattgaaagagtcgaccagggttctccctctgttgtttatcagcttggttatcatgttggtcttaaaggccagtacgagggggtaagtaggttttaattgttaagacactaaatggaattcatgctagatcgttcgattttctaattttgtttttgcatacgcagagcaaagagcagaagttctttatgcacaatcacttggcatttacagtccgctatcacagagatatccaaactgatgctgcaagaatcgtgggatttgaggttaaaccttacaggtgcagttcttgttcataatttgaatgtctcttgggatcccctgtcattcagaactgatattccctccgttgatttgtagtgtgaagcatgagtatgagggagagtggagtgagaagacccgtctgacgacttgtgatcctcacacgaaacgcctggtcgttagctcggctacccctcaagaagttgaacaaaagaaggagattatcttcacatatgacgtcgatttccaggcaagttttttcttaagtaatctgcggtttgtgtcttaaaaaaatttcatgaattcttgttttcaatagtttttctgatttcctcttctgtttctgtccaggaaagtgaagtgaagtgggcatctagatgggatacttatcttctgatgagtgataaccaaatccactggttctctatcgtcaattctctgatgatcgtcctattcctatctggtatggtggcaatgataatgctgaggaccctttaccgtgacatttcacgatacaacgagctcgagactcaagaagaaactcaagacttta

SEQ ID NO: 7776 - DNA, 1099 bp, Arabidopsis thaliana landsberg
  unsure (1)..(1099): unsure at all n locations
taatcatcgctaccataccagagaggaagaggacgatcataagagagttgacaatagaaaaccagtgaatttgattgtcgctcatcaaaagataagcatcccatctagacgcccacttcacttcacnnnnnnnnnnnnnnnnnnnnaaaaatcaaaacagtgagaacaggaacacaatagtatctcactaagacaaaactatctggtgataaactgattagtcaaacaagaacttgcctgaaagtcaacatcatatgtgaagataatttctttcttattttcgacttcttgaggggtagctgagctaacaaccagtcgcttagtgtggggatcacaggtagtcaaacgggtcttctcactccattgtccctcgtattcatgcttgacactacaaatcaagtataaaatatttagttctgcaaaatagaggagatcccaagagtccaatctgttaacaaaaattgcacctgtatggtttgacctcaaatcccacaatccttgcagcatcggtttgcatatctctatgataccggacagtgaatgccaagtgattgtgcataaaatacttttgctctttgctctgtaaatgcaaataacggtttagaaaatcatgctattacatgcaacgcaaatagtgaagaatccaagcctacttaccccttcatactggcctttaagaccaacatgatatcctagctgatacacaacagaaggagaaccctgacccggatcaattctttcgatcggaaccactagaggaagattatcaaggatcctaacacacacacatacacaagcacaccatgagaacagtaacagagagagcactactattaaacaaaagtcaatgtcctacatgttaactcgatactcatcatcaatcttctctttaaacgccttggcagactttgcatcaagcataacacgaccgagaacattacacatttgcgcctcacgcattttaaactacattattccaaactccacaagttagcagtcaagtaaagagaaatacataaatgtatcaaaacagagacaaaccgaataaggagcattttcgattcggtcaccacgaagaacttcaccaagattctcagta

SEQ ID NO: 7777 - DNA, 1162 bp, Arabidopsis thaliana landsberg
atatacaagaacaaaaaaatgacaaaaaggtcgaaacttttttacacacacacaaaacctatccgaagatgaaccacacattcacacgtaacaaataatctatattaccggtaaaaggccgcgtaaacaaagaaagaagtaagctacctagataaaaccgccatggccaccggtttaggcttctttaagctctccttcctccttagcctcctctccggtggatcagacctattaggtcccgatgccgaatccggagtcgcccaaattgggaagttcccgccgtcgtgtaacagaatcgaatgcccgagctacgagctggttcactccggaaatggatacgaaattcgccggtacaacaacaccgtctgggtttccactgaaccgattccagatatctctctcgttgatgctaccagaaccgctttcttccagtaagtgcaaacttccagttttatcttttaaaatgaggcttttgttcggataaagattgaaaattttggtatcagattgtttgcatacattcaggggaagaacgagtatcatcagaagatagaaatgactgctccggttatctctcaagtctcaccaagcgacggtccattctgtgaatcttccttcactgtatcattctacgttcctaaaaagaaccagcctgatccagctccgtcggagaatctccacattcagaaatggaactctaggtacgtggccgtgagacaattcagtggattcgtgtctgatgatagcataggagaacaagcggcggcgctagactcgagcctcaaaggtacggcttgggctaatgcaatagcgaaaagcaaagaagacggtggtgttgggtcggattcagcttacacggtcgctcagtataactcacccttcgagttctccggtcgggtcaatgagatttggttaccgttcgagctcgatgtttaagctctgcttagtgaaccctttttctatacatttgaataaaataagaggttaatctgtaaagtgcaaaccttttttctgatacaaattttgcagaaacaggggaatttgatgaaatgagattgaacaatttgccctgataccaaagaaacagatgactaaagacaaaaaaaaaatctcagggcactcgagttaagtatcctaaggagatcttaaacatatttaataa

SEQ ID NO: 7778 - DNA, 1823 bp, Arabidopsis thaliana landsberg
gaatgatactgaacacgtcttttattgctaatggtatgattccagaaaaatcttgatcaccctatgcagattgcaaatgaagcaatggttaattattaacagcatgtatagctgaatctctgattgtttgatggaaatcctagatgcatatgatcacgtgatgatttaagaagagatcattttggccaatcttaatcaagatcttctctactttttatcaacacaagcatgtcaatcaaacatttatcagcaactataatcacccagtgtgtgtatgatatcgtatatctttcacatcacagtaaacgttgtataacgaaatggtgtatagcgtgtatttttccaaaacacttacatgcattgtatgtgtctttccactgcttgtaacaccataagcaaaaacggttcctgtcaaattgcaaacacagagtcagaatacttccctgcaagtaatgctactagcaaatgagttggctaaaggtatttcaatgacaaacacaactcttgtttaatcgataacacagctataagccttaccgttaacaccttccatagcagccttgactacaggtttagcagctacgtcatatacttctggagttgttgactgtggtccaaaaactttatctggcatcaacaaatatggaagaacattcattgaacaaacggaggcgaccaaatctataatcaatgaacagtaaattgaaattatctccggcaataaattgatctcaataccaaatgcgtaagctgtgaggggattgtattcattcctgaccatcttatctgcgtcaggataccaaacaatctcatctcctctttgatactccctctcactgcaatcaaacaaataacacgggagattttcaaaattgactaagtatcaattcacatttcatcaatattaaacttctaaagaagaataatcgtgaaattgtatcaaatggatctgatattccgcttccagatctaccgtacctcatcggacgaaatcgaacggtgacggagatgctatctcgctcagaggtaatcgtctgcccagactcgccaatgagcccctccgatgggtacgattgggctccataagtcccggagccgccgatgggaccggaatcggaaatggtgcgagtaatcgacatagatcgggacccggttacaccgccggaattgtaaacggtagaagtaggtgtggaagaagaacgaggtaatagacgattatttataagagacgaagaagtagacgaagccgaagagtaaggactcggaggtctacggtgcgagaaaggagaacgactcctagttctagacgacgatgaagtctcatccactaactcgttcaaactcggttacggaggcggtgaaaatctgaaaatgaagatagaaagaatcaagcaaaagaaaaaaacaccaaatgtgaagatggagagaatgtgtcagtggaaactcacatggctggggacagaaaaagcaatatgctcttcatcttcttcgtctttctctcacttctctctttcttcttcttctctacttttccatggttaagctacgcgaaggtgagaaaaagatagtgagaccacacatggagagagcgattgtttcgtcttcttcacgcgacggtggtgaagagagagatagagagagaaatcgattggagatatttttttttggtgaaagcgtctttttttcagattttgaatttttgattaataaaatatattctgttttactgtgtcgctaatagattcgaacgtggttgaggattaaaataaaataaccgcgaaccggttataggttttcgaacacattgatgatccgacgagcgg

SEQ ID NO: 7779 - DNA, 2356 bp, Arabidopsis thaliana landsberg
aaagttaattcttaatccagagtactgctgtatctgcggaaacaactgatgaagacatcacagctagcatggtaagcattccaacacttgtggaccttctttatcattaatttcagttatttggtctgtcaagtatatatgtacactcatttattcttggcagttttcgaaagccgaaggcaaacacatagaggagaacaaactcagggtcacgctcgtaccgccctctgactcacctgaactatctccaatcaatacaccgaagcagggagcagtatttgaagattccatcctcaaggatcgtttatatagccagtcagagaccctagctccgccacaatatgtaagaagagtatttaccccttttcgcaacaacttttatgatttgttagtaagatgaagagtaatttgccaagcagtgagtgtagttatgttccagcaagttcattttagcttagcttataatcacagttattgggtgcaatagggattttcttgtagttatttgtttattctcaaaatttatctttctaggagggtgagattgtaaaagagcctaggatggttggacatgatgagttaaaggcagccgacaatgcaaaggagttaaagacaccaaaaatggccacagtggattttgtggaagatcgatatactgctaatgacttgaaggcaactaaagatagctacgattcatcgaggatggcaaaagaaactggattcgatccaattaggtctcataaggatgcggatgatggaagggcgattaaggcaacaactaatttggacgctcccatgaagaaggccatggatctacctagggatcaagggtttactaatggaatagctgttgacagtgaaccaaagatatctaaggagagagatgttgtccagctgcagaaaacagatggccagaatgtcagaggattggatgaacttaagttggttaaagacattgaggagatgaagctgaaagtggatgctcttgaatccaagttaaaacaggtctgcttatcaaattttaaaatccataacttccgtgctatatgtaactgtgctaaagagtttaaatctggtgcaggctgattcaaccatttcgaagctaatggaggagcgatctataagctcccaacatagacaaagcttgcaacatgagctggtgagaatgctagtgagaaaacatagctgtttctttctcctacaatcaaaacagtttcataataacgaagcttgtattttgatgatgatgcaggcggaactgagaacgaagaagatagtgaaagaagtgcacaatgggttccctctgctgtatgtatgcgttgtggcattcattgcctatgttatcgggcactttctgcgcacttgactgctcgctcggtgtctatatcatatcaagtgtgcagtaagggatatatagacaaagaaggtaaaaggattagatttcgtctgtttgggtttgctttgtgggagaggatgaatgatttctccgacacatttaagatggaatatgatagactgtatagcattggtgttagttaacacaaggacacaaggacatatggtatgatgatatgctttgtttctctgcttctcttactaatttgaagctgttggattgatttgtctcttcttacgttcccttcttttttttttcgttttcttttgtcgtatagaccaggcaggggctagggcctagtgatgggtattggcccaatactattgggttatttgcctggtttattatttcgattttaggttaattcaattttaagaatacgtagatttgtttggtttagtttggtttggttgcactaagttcggttttacataaatagaatctaacactactaattgttatacgtaaaatacaacaacaataacagatttttcgtttcaattttcgtttaagagggtagacattttggtttggtttggttcatttttttttttccctttcaaattcacatccttcacgtagatgacaaaataaagaaaaacatgaatgaaagttgtaacttgtaagcatcaacatggaaatcatatcacaaagaacacaaatctaactaatgggtcttttcacatattggtataattataagttgtaagaatattagttaaacagaggcaacgagagatgcgtgatatatgaaaagttgaaaacaaaagacatggatctaaagagtcaagcaaaatgtaatatctttttttcttctaaatttgaggatgtccaagttgcagtgaatgattccctttaatcatggagaaattcaatgaaataattgtgtgtctttccacactttattttgtttattttcttccacaattacaactttatcacaaaatgtaagtacatagc

SEQ ID NO: 7780 - DNA, 1511 bp, Arabidopsis thaliana landsberg
tctcacatgcaattcttagcttaaactttgcggcaacgatgtgtcgagatcggcattagatcttcaactgtgctatctcatgcctagaagacataatatcttgagataaggttatgttctaaacgcttatattgctttataggttgatggaccatctatatccaacataaagatcacaagtcacacaaatcaatgtttttaagcgtaacgctgaagcaaattttatggaagttccactttatttaaataaaaggaatcagcgaaaaaataattaacaaaaaaatcttaaaattaggataatccgaaattaacacaaagctgatgatctctcaaatccaaagttcctcagaaccattatgttaggactttccagacaaatactactacatagacaatctccttagtacttacatgcaccattgcttgggttgttccctacgatcataccagttccactgaagttacaagcaccatcagtgcggccgtggctctggaaataagcattcataacaaaagatgcgtgcgtcctcaaactgctcgggttaaagcacgaaccaccagcttggatcggtttacagtcaacaccctgaccacacacccaattaatactgtcttgcagctgagtattcgtcgccccggacctcgctacacaccatttaccgccggcagtactaggtgagggcaatgctgggcggcctccaccgccttgtccgtttcggagaagaccaacatcgtaaaccggggagaaatctgctcggaaaagtccccagttacgctctgcggtcggaccgggtttgccttcttcgttgaagagaccgaaaatgtatgtctcgaaccgtctgttaggcatgagaggtgtcccttggccttgtgcacgtttgataatgttgaggttgaaccaagcagcattcgcaggcgagcaccaaggtgcgtcacaagcagatggccagccagtctcgccaacgacaatgttaacatcaccgtatccaagagctttcatggctgagtatgtcgagtccatgagtgcatcaaacatgttggtgtagacgtggcgggtgaacgggtcacggactgccttgtacggtgttcggaaaattgcgaagttgacgtttttggggtcaaaaccaaagtaagggtacgggttaaccatgaaaggagacttggttcggcgatggtaagctaggattggagccaatatgcctttgtcccaacccggcctgaatctaccgctgcttggtgcaccggtcaggtcataggctatgatgttaagtgagtgtgcggttgtaacctgagatcaattgcaacaaatagtagtattagaatcaattgttacctaacaatctccaacaattttcatatgataatcatgttggtctaaatttcctatgaaattggtacattatctcatttacctaggatcacatatatcatgatgtaataaaggaaacataaggcatggcagacagatgaacgaatctaaggacaataggataaccttggacggtataaga

SEQ ID NO: 7781 - DNA, 1566 bp, Arabidopsis thaliana landsberg
tacatcgctgttacaagtatccaactgctaccactgccgaggttccccacccactcaaaaaagagctgtcgggtgtctgcagagcttgtttctcagcagatgctgtaaccaagcatgtcgaatttgtaaaagagtacaagcaggattttgagcgtcaccttgatccagaaagtacaactacattccctgccacactcgctgagctgaccgctcgactgaaaaagtggaaaaatattcttcagagcaatgttgaagacaggtttcctgctgtgttaagattggaagatgagagcagggttttgcgtgactttaatgttgttgatgtggagataccagggcaatactttgctgaccaggtagaaataacactattaagtctggaaatttgaactacgtttcccttgcacttaaaaatggaacactttttttattttgatttgattgtgaaaataattatgctcaattatccaggaagtagcacctgatcatacagtaaagttggatagggttggagcagacgttcctattgttcgaaggcatggaagcagcttcaggcggttgactcttattggctcagatggctcgcaaaagcactttatagtccagacatcattgacgcctaatgctagaagtgatgaacgcatcttgcagcttttccgtgtaatgaaccaaatgtttgataagcataaggaatcaagaagacggcacattggaatccacactccaatcatcattcctgtctggtctcaggtgatttttataccatgaattcagatttgatgtttcattggatgagtattggttttaacaaacatttggtttcaggtccggatggttgaggatgatctcatgtacaacactttccttgaggtgtatgagaatcactgtgcacgaaatgaccgagaggcagatcttccaattacccactttaaggagcaactcaatcaagctatgtcagggcaaatatcagcagaggcaataggagatcttcgtctgcaggcatatattgacatcacaaaaaccttggtcaatgacagtatcttctctcagtacatgtacaagacgttgatgagcggaagccatatgtgggctttcaagaaacaatttgcagtccagctagcagtctccagtttcatgtccttcatgctacaaattggtgggaggtccccgaacaaggtcttgtttgcaaaaaacaccgggaaaatgttccagacagattttcaccctgcttatgacgccaatgggatgattgaatttaacgaacccgtgcctttccgcctcacaaggaacatgcaagctttcttctctcagtttggagtcgaaggtctcctcatgtcatctatgtgttcagcagcgcaagcagtaatctcctccaaggtaaagggataattcaaaaactatatatacaaaaactaagtgatgcaacaagccactgattgatctctgtgtctctattgtcttgcaacttttcagcaaaacgaacatctacggtatcaacttgctatgttcttccgtgatgaattgttgtcttggtttggaagaagacctcttggtgtgccgattcct

SEQ ID NO: 7782 - DNA, 1004 bp, Arabidopsis thaliana landsberg
tcctaaccaatcaaaagtaactctttctaaatcggatttttacatattaaatttcagagacaaatagcaaaatactcagaaaaagcatcaaccaatgaaagtccagattaccttaacagaaataatggcatgatcaaggagtggaagcaaattagggtgattgaacaatgaagaaacacggatctcctcacgcaccaattccaattgctccttgttctgaatcaaaactttcttcatagcataagttccgtcagctacaaggaaatcacagatataaaaaactcgaggttagtcatcggacaaatatgaaagaagttaaagaataccaacattcagatgcacagtgaatcaaaattggttgattcacagtcaaactttataaaagaggaactagatgctaggtcaattaactcgtcagcaagaacctatcatctccagtgtcgatgaacaaatgacaaaccaaagtttcagatgcaacgcagtttaaacaactaggaaagatcgaaagtgtttaatctccagtcaacctatatagaacaagattctcagaaaacaaacataaaattcctacattgttatagtttgacttctatgacaaacaatctctcatagcccgagctgatctacaatttcaagtgtccaatatcaaaaccacaatcgaatggggaaagggaaacgaaagcaaatctaatcagaaacagcaattcagattcggtcaacataaccggagatcagcaatcatcgaaaaaactaaccggagagatgagccggatccttgactttcttagctagaccaccaccggatgcggcggaggaagcgtcggcgacaatttccttgaccaaaaagacgaatgcgaaacctccttcgccgagctgcctcacgatcctgaatcgattctcattgatccatacgtcgcctccaccgttgacggcgtcgtaaagtgcgttcaatcctgaaaacgaacagcccatgctcacgaatcacacgcacaatctcctcttga

SEQ ID NO: 7783 - DNA, 1600 bp, Arabidopsis thaliana landsberg
acatatatagtttatacaaaaacatatcttgctttcatatatatacacgtaacatatatgattatatcataaatggaattagattcaagaagccaaaaaaaaatggaattagattcaactatctgcaagataattatctgatttatccggcgacgtactatcaacatcctcatattcacaactggtcgtgattgcagatataatatgattctagaatctatgttgaaaatacaatatattttttttgggttgaaaaaacataaatgtaaaacgattgttgaggtttactaacgtttggaaaagtactatataactatatacaaatttaagcttcgacttcagaggttcaatattcaaagaaaaaagaagagagagggcacatgtatgggaacttgtattcgtgttttagactgatataatacttagttgtatacttttaacaaagagacctcctatacaaagtatttcataaataagatcgagaaatagtcgatatataaaaaatacatatagtgtgacgtgatcctaaactcgactgatgcttctttcctgtaaatgtgatcctaaattcgacttatgaaacaaaaaaattccactttcattctccaaattaacaaaaaaaataaaaatctacactcgatcttaagattttataaattaaatcggcatagggtcacgtatgctatttcatgaagctggctcattgaaccaaaaagctaaacttaaaagtaaaatattgtttacatcataaacagaactatactatatgtcaaaccaacaagcaattttatatatacctatagatatagatgggcggtatgctgtttttgatatacacatcaatattcatatacaaatatcctctaacaaattcatctttaaaaatcaatcgataaatccaaaccaaaagaagaaaaaagtaaaatcctctaaaaatcaagcgttaggtggagaatactcacaaacaacctcagtatcaacttccttccggtgaaaattccggtgacaaccacaagccgcgcatctcaaagcatcaacggttccttcaactccggcggccatgaactcacggcaaccgtcgacggcgtagcctccgatgttagcagcgtgattcttctgacactccacgtaacggacgttactgatctcggaggaagaagaagaagacgaagtagtagtccaagaggaagatgtgttggagtttcttgatctctgcttgattaccatctgtctcttcttcatcatgaactgtgaaaccctagttttagccctggaatcgaaaatggctctttggtcttacgaaagactctttatgaaaacgaagtgaagaagactagaaggtgtggacttgttctttggtaatgccctttgtgccccttttataaaatagctacattgttattgttaataatctaaccctagagatgattaatttatgtatttatctctacggtgtcgacaaagtggcttaaaatatgggctactttgtacataattgatcttttttgttcgtctccctataaatagtgatttaaaactatatttatgtacatgaccaaaactgattattgaaactggataaactatgaaatgggatcct

SEQ ID NO: 7784 - DNA, 519 bp, Arabidopsis thaliana landsberg
aattcaatatcactttgttttcttcttttcttgtttccatgcttaatacatgtatctacttgcagagggttacggagtcttggactttctggatcacttggattcatgcttgataaattgacttctgttactgagttgtaagatttatcttccatgattctccaaagtttctacttttgtgtatttagtggtgtggcttatactcatggattgtttttggtgaaacctgcagtgatatgagcaacaataaccttggaggcgatttgccttatcagcttcctccaaacttggagcgattgtatgtttgatgattctctctgttatatgttctacaaatttctatgtttgttttgcaagttgatcaatttctgtatttgtctaggaatcttgctaataaccagttcactggatctgctcaatattccatttctatgatggctcctcttatgtacctgtaagttcttcaattgtttaatctcaaacatatccttggagaaagaatggttatttaatgctcca

SEQ ID NO: 7785 - DNA, 951 bp, Arabidopsis thaliana landsberg
aactacataatgagagtcagactatagagattacacagtacaaaagtacagattcgacacactttcacttgctctggttcacacaaaagttgtgtcagttttgctttccttcacattagattttgaacgaaggaaaacgaaactcttaacctcaatcctttggctcttctttttccttctctttgtcactttcagcctcagctttttcctcttcttcctctccttttacttcttccttttctttgtcacttcctgcctcagcttcttcctcttcatcttcttcttcatcatcagtcattgcatttatggcctctgtgataacatccttcacctctggttttctatgcgacagctcgacaccaaaatggtcacctgacgttatcacaaacagcatatgttaccaaaaagctccttgtacatttgaattgcgaaatagataataaaagcaaaatccaataacatacttagcttctgcagaatatctgatagtgttgcctgttattaagaagaaaaaaagtgtatgagaacatctattcaagttttttaaaccattacattgtagttggacttgggaaaatcaaaccatcttaccgtattgaagtctacttccttcagaattttggacaccacttcaagcatctcttttctggtgggctctgctttggctttgcctttcttagtggcttttcctgtctccaatccatgatagaggagaacaaatataaataatcagcttcaaaaacaaataggatgatttcatataaaacatatatcgaacgaggctaagcctcagaagcagctgagaatggatctaacctttctctttagatcccttatcctgtggcttactcggctgtttcttgcttttctctttgatgaccaacgtgatcaactttttgctttttacctggggatgaagttgacttaccaatttgttggaggacttttccc

SEQ ID NO: 7786 - DNA, 375 bp, Arabidopsis thaliana landsberg
caccgttagcgagcttctttggctgcgggctcttcttccaggtttaggtatctcgtgtaatgaacccatcttgttgtattctgatagtctttcggctattagtctagctgccaatcctgtttatcatgcacgtacaaagcatgttggtcgcgacgtacacttcgtccgtgatgaaattatacgaggtaccattgccaccaaacacgtctccacgacatctcaactagcagacattatgactaaagcattgggtcgtcgtgagtttgaagcttttcttctcaagctgggtatttgtaatctccatactccagctttcgggggggggggcaaaaaagatttaattgatccgaccggagatagacattgttggttaat

SEQ ID NO: 7787 - DNA, 3030 bp, Arabidopsis thaliana landsberg
tcatttgcaccagaaactcctctgtaaattattggatgaagaaaatgtggatgtcagagcgcatggaatactgaaagagtttctaaggaacaagaagttgtttattgtgctggataatgttactgatgtaaatcaaatagaagttctcattggacagcaggagctgtaccggaaaggaagcaggattgttataacaactagagacaagaaactgctgcagaaaaatgcggatgcaacgtacgttgttcccagattaaatgacagggaagctatggagcttttctgccgagatgcattttctgaaaaactctacccaacaggagaatttctggatctagcaaacaattttgtatactatgctaaggggcaccctttagctttgaagttgttaggttcaggtctacgtcagaaggaaaaaacatactgggtggcaaaatgggagagattaatggtaatgccagacaaggagattcaaaaagtgctaaaaatgagttatgaagcacttgatgatgaacagaagagcttatttctagacatagcatgttttttcagatcagaaaaagcagatttggtctcgaccatcttgaaatcagaccatgttatgagagaacttgaagataagtgcttggtaaccatttcttatgagcggcttgagatgcatgatctaatgcatgcaatggggaaggaaattggatatgaatcatccatcaaaaaggcaggcaaacgtagcaggttgtggaaccacaaagatattcgtcgtgtgctggagcagagaacggtgagttacttgcttcattagttcttcattgattttctgtagtacattttgatgctttgttaattgatcttcaattctttgatctttcgaccagggaactgaatatgttagaggcatcttcttgaacttgtctaatgtcgaaaggatcaagctaagtcctgacgttttcatgaggatgtcgaatctcaaattcctgaagttccacaattctcaatgttcccagttgtgtgataacgaccataaatttcagttctctaaagggcttgaccattttccgttggagcttgtgtaccttcactggcaagggtacccttacgaatatctaccatcagaattcaatccagaggaacttgttgatcttagtctacgttatagctacatcaaacaactgtgggaagatgagaaggtgcatccccaactatatatttcctcatctaaaaagagattaatctttagtttttaatgctgattggtcatataatcattgtttaggtaccaccgaatacagaaaatttaagatgggtcgacttcagtcaatcaaaagacttgcggagtttatcaggcttgtccagggctaaaaatcttgaaagattggatctcgaaggctgtacgagtttggttctgttgggctcatcaataaaacatatgaacaaacttatttacctaaacctcagagactgcacaagccttgagagtcttccagagggaatcaatttagattctctgaagactctgatcctcactggctgctcaaaccttcgagattttcaaattatatcagaatctactgaatctctttatttggaaggctcagcaattgataaagttgttgaccacatcgggagtcttcgccaccttattttgctgaatctcaagaattgtcgcaggttgaagtatcttcccaacgatctttacaagctgaaatctcttcaagaactgattctctctggctgttcagcgttggagagtcttccaccaatcaataaagatatggaatgcttagagattttgcttatggatggaacgtccatcaaacagacacctgaaatgatttgtttgagtaacctgaagatgttttccttttgtggatctagcatcgaagatttcacagggttggtattgctacctttctcaggcagcttttgcttatcggatctctatctcacgaactgcaatatctacaaattgccagataactttagctccttacactcgttacggtgtctatgcttaagcagaaacaatattgagactctacctgaaagcattaagaaacttcattgtctgttgttgcttgacctgaaacattgccgcaggctcaactctcttccagtgcttccatctagtctacagtatgtagatgctcacgggtgtgtttctctggaaaaagtcgcaaaaccagtgacacctcccttagtagctgataggatgcatactactttcattttcacggattgctttaagctgaacagatctgagcaggaagctattgtagctcaggcccaactcaagagtcagctactggcaaggacatctcgtcaacataatcataaggtaatctccttttttctttgttgttctggtgaaccatcgatcatagctatttgcttacacggttttctttctaacttaatgcagggactagttctagagcctctggtttctgtttgttttccaggaagtgagataccctcgtggttcagccatcagaggatgggatctttgatagaaaccgacctgcttccacactggtgcaacaaaaaatttattggagcgtccctcgctgttgttgtcaccttcaatgataatgaaggtcatcatgccaaccgtttatctgtaagatgcaagtgcaaattcaaaaatcacaacggtcagtctaccagctttagtttctgtcttgggggatggaacgagtcatgcggatcatctagccatgaaccacggaaacttggatctgaccatgtgtttatcagttataacaactgtaatgtgcaagtctttgaatggagagaaacgagtaatgacagtaatagatgccatccccctagtgcctcatttgaattctaccttgccaatgtggctgcaaggaaacttgaatgttgcaaggtgataaggtgtggtatgagtttgttatatgctccagatgcaaatgacggtggtctccagggaatccgggtgccaaacactgttgagcgtccatctattaaggctcttgtgcccatgcaaggtcagtccccctcacccactgaaga

SEQ ID NO: 7788 - DNA, 596 bp, Arabidopsis thaliana landsberg
tgagaaaaagctgaaaaaaataagtttcaaaacattttcataagctttatcttggcttggagccaagagttggaaggcgtcatcgtaccgcctatctcctgcaagtcgaatcgctgaaattctgttccgtatttgtttatctacccatccaataatgcgttgcgcggtttggggattctctccatgtcttcgattatttctttctctccaaatcgcatagactgtagcttggactatgtattttgtgagaaattcctccacccggctgaaacgatgagtcgaaagataatctagaagagtaggccaatctgttgtgtacctcgtcttgagtaaaccatgcgcaagagctgcccagattgttgaactgtaaacacaagcaaagaaaagaaaagatgttttttcttttttgtttgtcttgcaattatttttttattgagaatataagagcattcacattggttacttgtatggatgtttaaatacatacttttcaatataaaagaataaagaaaggaaaaaaagaaatataagtgtcttgaaaatgagaattgtgtccccaatagacatttaagacccctatgtttgggatgtcttta

SEQ ID NO: 7789 - DNA, 1478 bp, Arabidopsis thaliana landsberg
aggagcttttctaatgttgttaatgttctgaagtcgctcggtatctcttgaaaacttgacaggagctgcatcaggcttctggtgagtgagtgccgcaggcaaaggcacattctgcctcgaagaactcgttctttctctggaagaagcaatgctcgaaagagtagattggcatttcacttgctgtttgttgaatttatctagctgttcctttagagccatctgaagaataaacgtaactctaaccatcaatatctactgttttcaaaagatgatcatgaccaccaaataacttagacaacgccgattcctcaaaattagggtttatagactgtgcaatttccaataactagattctgcaaccttaaacaccacaataaaatttcatttctcgaatcaacaaaaagtagagttcgagcttgatttaatagaaacagcctatatctggagaatcctcataattacggtgagcgatttcaatatctgtgatcccgcaagctaaacaccacaattactttccatttctcgaattatagaacgaaagcgattatgaatcgaatcgatacgaaccttccttggagaaagaatacaacgcgattagaacgaaccacacgaaacctgacgagaggaagaagatcgaagaagaagatcgaagaagaagcttgatttgattttttgctttatcgacgatagaggaaatagaagtttctctgtcgattgaagggagacgaaattgagaacggtgttaggcccatcaatattcggcccaataaccccaaatttggaatttgttctatttaccttcaatagtttatacattatatgcattagtaccaaaaccaaaaactccggttcttcttccggggctctggctcgctccctctcgagctctccggttagcattggcgattttcctcttccgatcgattctctagatatcttaggtagatggttaacctctccgttatcggagaaactcgacctagagttatcggcattctaattgttgctttgagttctgagatactcgctctgaacgtagaaaaccctaatttcgtagctccgacagtcaatcaatctccattgcctctgttatctttcaatcaatcaatcatcattgtattttgcagagtttgtatccaacacaaattcgactggttatattgtaaagtgtctggttatattccatggacaaatcaatcacggtggtgcggaaaaccgttgtgctcgagccgtttgtcaagtactttttctctataccatttctatcaaaaaatcacagacatcccaaatatatgttctaacttcgcgtttttatcaattatttctgcatctcctaagttgaatttgcattaattttcaggctggtgaggcttttagtaaggattttctatgacaattatactccggaaagcgataatcagcagaaatttgcgaaaaatgttaaagggagtgctggtatcgtgctggacgcgcttaca

SEQ ID NO: 7790 - DNA, 2328 bp, Arabidopsis thaliana landsberg
caaatatgacataattttgctacttaaatgcttagtcaagacgatctaacataacaatatttgattattttcttgtaatttgtatttgaaacattaaactcttgtctataaatagacaataaaaataaatagtatacccgaaggtcttgtggatgttgtaaggggacatgaaaaggattaatgttgctactgaaaatgggtaatgtctttgtcaaatctctcttaatcctttggcttgatgtttcaccagaccctccagttgaagtagaagatccactgctcgattccaactccaaacatatctgttacacattatacaaatgacaccctttaaaaccttcctatacaaaaaaccctaaaaacattacacttattttgaaagaaaaactgatcaaaccatacctgaaaaagtctggtctccaaagccgcgattcgatctagtaacgatcctttgaaatacgcttctctaatcgccgtgcctctatcgattaacccacgcgtggtaggcgcgcttttgtctttccatttcggaagattttgttgtctttctaaattctttatctacataaaacaaaaacaaaaaactcgaataaattcataaaagtactaatgtatgttttcttaacttaggaaccaaagacaaaaaaaaacaatttacaacgaaatccaagtgttcaagcctagagagcataggcaaagaagagagtgaatgtttttgttgctcaatcgtctccataagacttgttatttttttgggatttctctaacatgtgatattatttttttggtttatatagtggaaaaagttatatagataagtaaaaaaatgtaagacgataaaggaaaaagcagttgagttccctcctttttttcctgttgacactctctacttgtacagagtcatacgctaatctgttatttaatttaaattaacaaaatagtctaaatataaatattaactccaatttataaaccaaaaatagaaaaactaaacccctatattataaacacctaaaaggctaaaaactttaaattcgtaaccccacaatataaacctaatttttatagattaaacccttaaacaaaccccttagcgaactcttaaatcattaagttcggtttagtttgatttagttaccatccgattctgtttttgttcggttcaattcggttaaaatgttaatgtcaaccactagttcttctgtgtaagaaatactgaaataaactgtgtaaatggtacataaattttgcagaaatttttaaagaatcaaatctaaaaacagagaggttaatcgcaatggaacatccagaaatcggaccaacagttaaacccaaaccgaaccggtttatcccaagcttgaccttgtcatctcataagccaagaagcaagcagcattagcaggaacactcctagccatagctggaccaaatcctttatacagacctttaactccttcagatttcagaatcttccgaaaagcatccatcgaccccgtgtatttcgggtttttgtaatcgtctacttgaagaacactcttcacaacatctgtcggatatactattccccaaaacgacgcaccagcgactccaccagccatgatcaatgacccttgtcctaagcttgaagtgtctgaaccaccggctaaaaaccgcttgaaagcttcgtaggctgcaaacattgttgcatttcccgggacttcacgggcgaatgtcgggaataaacctttgaatagacctcgtgctccaccttctgatctaagaacatgacgggctacatccattggtccaccgtatttcacggctgcaaccactgagcttgtggtagaggcaccagctaatgcaccttgtgcttgcaacctgatggagaaacaagattaaacacacacacaaagagacatgttttagttctgtttcagtctagagcttgagttaaaagcacatgtatatataggctctgattggtaatacatgtaaaaagaacctaacctgcacttgatcaactcagtaggacaagcaagaaacgaaacagcgaaaccagcgcctgcaccggccacaaactgttgattaatggtcaaaggaacaccagcttcagaccttagcagcccttccatttgacctctcacagtgaacaaaaccgcattgaaggcagcaacggttgccagtggagctcccatacctttgtacaaacctttagttccttcagaagcaacggtctgtttaaccgcatcgattgcaccggtataccttggaagttggcctggtgctggagtcggttggctctgaagtttgaccttgattgtgtcaaatggatgaccaacaactagctga

SEQ ID NO: 7791 - DNA, 1915 bp, Arabidopsis thaliana landsberg
caaagacatttacattgaattccatgtaagaagctcgtctagcaagccattgtgcatccatcatttggaaagctatacagtagagattatcgaatgccatttcgtcttcttccagaaatcccaagaatcttatcccggctattgttgatggtttacctgaattgaaacacaaacacatttgacggtatgaaacaatcgatcggtttcacgggcaaagaagggaaaaggaaatgaagcttgatcagtttttagctggtttcttgagcattttttacctgattgaagatctaacatttgtgccagcatgaatgagatattgatgccagccaccgcgaaaggatattcccattccgctctagttccatcttgtttatgtaacaatctctggaatgattcctgtcataatgatatcacaaatcttgttaggatcatagcgactcagagataaaatccctatacttagaattgtaaaaagttattagttctcttaaatcaaaaatgtagatgagaattagagatgcatcacagaccggataggtcttcgcaaagaagattagattctccagtgatatataccctccacctctacaaaaaccagttaatgaaaccaaacatcagtaaaatgactagatataagaagatttgcatgaccagagctaaaattgtgtaccgaaaatctgttgaagggtctgttccttgccaacccatttccttccagagttcagatttaagaggtggtagttctctctgtggataagctagcctccatagttgtctaagagcatcctgtgaatcatgagattacataaatttcgacaaaacattgcatgtgcataattaatatagagaatcaagcaaacagagagtccatgagaacacttacttgatgctccattcgagatccatcaaatgggatttctattcttcgcttaatatttctcagcctttcttcctaataagaggcaagaaaatacagaatggagatcaaattgacagtgacagtcaaattgaccatggataactggaaacaaaacaaaccggtaaaattttaaaaagcaacaaaaacaagcaattgagaccataagagaaagtcatcattttactaagtaagcttcctaataaaccacatacacaagtaagagacttagaggcaccaagcagaaacacactctgataaattttctaattctatacatctctttgttttccagagttaccattattcttccaaacacaagccaataaaaagtatttgtagtctacaaatgagacagtgcaaatacagttacacaagtattcttacagttacaaaagtattcttacacaaactactaaagctatctcaacaatgctaagaccaagaacctaatgtgaaaatgtaaacttaaaaaagaatatggtataggctgatgaattatagtcctcttaaacgtatcttttggtatctaatgttcaaaagataaggtagaccgtttagattacctgcaacatactaagaggtggtggcagaagcctcccaccagtacctatttgaccaaatgtaggcagagaaagaaacctcccaacaagtgagccagatccaaagactattttggctgcaaaccaagaaacaagttgtaatgagataatcccccttttaaaaaatcaaggagtgatagtaacaagacaataaaagcccaacctatccactgagcccactgtgcaatcaactgagaaaagattaacgtccagtgaacttgctgtctcttccgttcttcttcccaaatatcctccagagtacgctcctaagagtaacaccacaggtaataatacataaaagggttcttctcatctctaattaaaaacacacacactgaactactaacctcaatgtactcatttctactattatcagtactactacttcctaacaagg

SEQ ID NO: 7792 - DNA, 732 bp, Arabidopsis thaliana landsberg
ttcagttctcaagtgtccatttattcctgcctggatgccttgcatttgccactcaaacttggtgtcatatatggaatgatcactaatctgctctttagctatctggttaggtttcatcttattttatttgcttcgagtctattcttgaggatatttgggaagaagaacggaagagacattcatcttttctcagttgattgcacaatgggctcagtggataaggtttggtttttatttgtcttgttactatcactccttggtcgtttcaaaagagtattatcacattacaacttgtttttcttggtggaaccttcaccgatacatgtggattttctgtccttttaatggacccacacgtccgtgactgggaacatatcgttttccgcatatccaacttctctggtgccctttagcaaatgttaaattatttacatctaataaattaaacatttttacaaaccacattcaagtcttatggcttcgatgagtgcaggagacacatgaggaggatcatcaacaaagcttctcgtagagggtagatttatagagcttttgacattgttatttgggtagaagcttttcatttcttcttccgctccccatccgcggtaaagtatgactttacttggctcctgtgacaccagaagagctcctgtttcttcctgcataatcaacacaaaccacttgttaaacgaagcccgaaaggatcatcaagaactaactagtggatgg

SEQ ID NO: 7793 - DNA, 729 bp, Arabidopsis thaliana landsberg
ggggcaatattggggtgggttagaactacctacgattttgggagccggtttgacttagagtatattgctatggagtaaaatatttgctctatcattcgtttggattgttttaagataggatagtttatgatactaaggggacatgttttggggtttatatttcaattcagctacagttgttttctcaagtggccatttattcctgccttgcatttgccactcaaacttcgtatcatatatggaatgatcattaatctgcccttagctatctggttaggtttcatctgcaccttccatctatttttcttgcttcgttttgagcttatgatgctatatgaacctgttgttacttataggaagtcatggagatgggcatcctacaaacactgatactccattagttgcttggggagctgggattcaatatcccaaaccagcatctggaaatagtcactctgattctgttactacatttgttgacaagcatgcacatgatatgcccacaccttatgactggggccttcgtcgcgttgagagagtagacgtcaaccaagctgacatagcaccccttatggttggactttaccttcatttctcagtcaaacaacttacaatgtgaatctgcttcccaagttctttggtctcacttttttgttaatatctgtagtcaacgctcttgagtttgccatgcccaatgaacttccatggaaatctaccacttggttatat

SEQ ID NO: 7794 - DNA, 2128 bp, Arabidopsis thaliana landsberg
atattttccccttacaaggccgaaaatgggcttctgttccaatgaactcttgaatgccatcctttcaagcaagtgcgtcgctcctcggaattgaggagtctcataaatagaaccacagtctacgtataaaccaatggaagctgctggattctgaacaaaatttcactcaaaatcactttccagtagtttttaacagaaagttgatgttgggattactaaaagaagctctcaccgaagacatctcagtggctatagtcagaccatttggaagagtagtggtcttaagtttgctaggctcaacatggtcagagagtggtggtggaagagagacaccagccaagggaatgttcatagaaggaagtgaactagagtagcctccacttagccagctggaggaagaagaactcgttgcaacagcactagaacttgcataacgagaagctcgcaaactgtggttaagaatgccctataaacacacacgcacacacattctaagcatcattaatctcttgattcaattaacattgtaaaaataagaactttcgaaacagagacatttcataaacctgcaaaaagcatgaatcgtggcactagctgctataaagcgataagattgaatcaagatctataagaatcgaagagaccctttaatccaaatccaaaatactgaatcatacaaattgttcaatacttaagcattctcctaaaaaaaacagaatctcaagggaaacaagtgaagtaggacattgaccttaagggccttggctcgtgaagctgccgtacggtacatgatgatgactgcgaaaccctagattggtcagatgagtaccggtgaatgtggctgacgacgggagagagatagaggccgagtcagagctgaaaagaaaagagagcagggaacgattttttttcctaattaaggttattggatcgggcaattgcttctaattacattgataggcccatcatgatataaaagtcttggcccaaattataatatatagaaaagatgaatttaaagcccatgtattgtagtggtgtgatcctattatattttctctcaattatatttttttttcttttctttttttcacgtaccattgtgtaaaaattcaagtaacgtaacgacatttacatgcagtcacaaatgaaacaagaatttttttgaggtgtgtgtaaagtgaaacggaaaaagtattaagaaagtttatcttctctaagttaatagaattattttgaaacgtagtatccacataaatagaagactcgtgtgtggtgcatatatacaattgaactgtattatataactatgactatctatccatgggaagataagaatgagagccgaatgctaaaaagcaagggacccgaattaaacaaaaatgaataaaggagaaaggtttgtgtgattttgtcaattctcgtcgtttagtggatgtgtaaaaatactaaatactataacaggtggtgtgggtctatcttaataatgcagaaatagtgcaatacgtttcatgagtggaaaaaatcatatttgggtactctcatatatagtctcattaatcattatcaccgagtggggcgtacgatacactttttcttctttacctgttttcatctaatcatcatactgtatgtctatattatcgtagcattcatcatcgagttatgaaacttatgccaaaagaaaagaaaaaaaaatcatttgagattggttaaatttctattttaagatttaaaccaaaatgtttaaagttctataagctctaattaaagtctctgcagtccattaaaatggataattaggatttgccgaacttgaaaggagtaatgcacattttgatgctcacgtgaacaacgagttgtaacggtttcgctataattggaggcagatgagaaatggtcgtgtgtgagttttaataccacgtgattaacggagccacaatcatattcatgggccattctcatgagctataatttgaggtgtagctgagagatggtcaaatgccacgaactttgagtatttctttcttaactttgcatttttttagacgtaagtttttttttcatagcctacatttctttgacaactcataacctacattttgagaatttataaatgtcaatttat

SEQ ID NO: 7795 - DNA, 1454 bp, Arabidopsis thaliana landsberg
caccacatagtttagctaaccctaaaagtctaatcaaatccatagcataacccttattctccaagtaatctaaaacctctacagcttctctccaattcccttgaatacataacgaatcaaatgtctcaatagtaacattttgagcaacacttggagaaactgttgttttgtactgacctaccattgaattctgcgtcaatgtgtgtccggctacgtttcgcttataccgattgatcatctctgtgatctctgagctgccatactttttgaggatgtgaagatgatgagagggagctccaccacccgaacagaaccagctgtttctactctgtgtagctaacgctaaatagggtttccaaagtctgagcttcccacaccacaatcgcaccatttcacgatggtaaaactccggtgacggagaacacaaaagcaacgaatcttgcaagcaaaaaatctcagaatcgagtcgaaaccctaaaaagcatatccgtgattttgatttattggtttggtaaaccgggtccgggcaaggggagagagaccagtaatcttcctagacgcagcgttttgtagctgaagtcgtgaaattcactcttaaccaccaattttgtttttcctgattatttgtgtgttggggacagacaaaacactcaccaccctcaccaaacagtctctcttcaactctaaaatcaggttctttcttcttcttcttgtgttgtgtgtttttgattagttgagctactgatttaatacttttctgggtttttactgttactgaatcaatgtttgaaagttttaattttggatttttctgttaatttgctcatcccatatgatgttgtatgaatttctgggttcaattttgattagtgcaaattagcttaggtggagaatttaggctattaccgtcttcttcaaagctaattgtatattcgtaagctaattagaaaagaatttcagaatcttgttgtatataatcccaaggctaggactaattttgattcatagatagatgcttaggtttcagatttagagaaaatgcaagctcatttacaagccaagacacataactaacctaaggctgatcatagcatattaataaggctgaaaaatctcattttgttgagaacatttctttaggtggcaaaacaaaatcaatggctctagtggtgtcaggtggcaaagcagccatgatgccgcttcatgccaattctcttcctctaagtatcaacaccaaatcaagagtactaagtgcatcagcatttccactattctcgtccactcctcacctaccttccagatccctctccatccgcctctcgccgaatgtttcccggtctctcactgtggtatcttctgttttgtcagaggacagagctactaacgttagtggctctgggacagatgcattcaagctgacttacttggaggtgaatctttactacttgagcatt

SEQ ID NO: 7796 - DNA, 769 bp, Arabidopsis thaliana landsberg
aatcttatgaatatcatcaattcatttgggagagtaatctgctaggtagttcagctagggaacctagcattagaattgattttcagaatgacaaagaactgcattgggctctcatggtgaccataaaagctaaataaagttgaactacaaccaacttaaactgaatcaagaaaagatacctccagctgcgtagctgcctccttgtattgcctttttgacgtcatcacctgaagctgttgaacagcagacactgccaaaacattgcagcgagtctcattaatgagcatatgaagggtgtacttggtcaactttaactaagttcatgccatacattttggttactacataaataataaaataaaattcactaagaggctaaccagcaacatcatgttacgtaacccctattttgatttcaatactcttgcctatttcaggatagcttgaccagagtaaattattgataacttacctaacattgtgaggcgactaagagcagtgaccgccgtggttatgttcttctttgcaaaatctaactttttaatgtcgctgcatatgtcttggaccattgcttcggtttgttcggcttttgattttatctcttgtatcttatgagagagttcctgtgttaaaatgacaaactgtgaagagaaacaaaagaagaaaatggcatcttgacaatacaaatcaaccaatgacagactaacctcagcagaacatatggcatcattaagattttctttagctctagttccggagttaccctgtt

SEQ ID NO: 7797 - DNA, 554 bp, Arabidopsis thaliana landsberg
  unsure (1)..(554): unsure at all n locations
caaaccgggttttgttatccaagagttgtctattttacaatctttttattattaaagtaaattaattatcagataggacatgttaaatttctcaccttataacatataaaagttcgttcaaagaataaaaaggttaaaccaataattgcaactaagttcaagccataacaaaaaacaatgtgatgatttctatataaatgaaaatcgaacacaataaacatataaaaaaaattgattgatgattgtctcaacattttaccacccaacaattctggtggccgtggagattgacccacttccccggtgaattccagcctcaatagcaacccctcttgcttctctcccactctgttttatttcccctgcgtcaccttggttactctttcccacagaaccttactcaccccttttaaagctaccttgtccacaaagtaatattcagcagtcattnnnnnnnnnnnnnnnnnntcaacttacaactacctttgctcatttccactcctcattttcactcttatagtacttagattcagattctcctttgtgtatggatg

SEQ ID NO: 7798 - DNA, 552 bp, Arabidopsis thaliana landsberg
atttccctaaaatgctgtgctcctgttctataaaactttgtcttttgaagtcttagaatagcagttctgaacctgggggtcgtgaccttttcacaggggtcttagaccatttgaaaacacaaatatttacattatgattcatagcagtagcaagattacaattatgaaatagcagtagaaataattttatagttgggtggcggtcaccacaacatggggaactgtattaaagggttgcagcattaggaagactgagcaccgctgtcttagaacaatggtcacccacagagtgacaaaggtcaaggagccgcagggtggtaaagtcggtggtaaacatcttcaatcctagcacttagaaagcagaggcagtgtggtctctgtgagtttgaggccagtgtagtctacaaagtaagttccaggtcagccaagtgctacacagaaaaactaaaaactaaaaataagaattgtctttcgttggaaatgcttggcttctagtcagtttttctcatttctgtgtatctagagggacattagagaagcaagtatttgctc

SEQ ID NO: 7799 - DNA, 1808 bp, Arabidopsis thaliana landsberg
cctttcattctaaggctaaatattccccatacacatgctaatctttggttctttgcttttatgcaggagatgaacaaaatcgaagcttacaccgaaacccgtcaagatccacaagagcttgttgaaagatacaagagacgagtccaagcagaagcacgtctctaaccagatggttctccggatatctccatttacaagggtttagaaggatcaaatgggaagagatattgtaaccaaagttttttatatatataaattatattgtatcggtaaaagcatctacatgacatgcaacaattgttttcatttatatcagaattcatgagaccaagtcttcgactagaacgaaattgcgcctgctgcttttccatcattgcccataagatcgtgcttgctgcttcattaaaattcggtgctagccggagcaatgtgattcagagatattatacaaaaccaaaccaagtagattacgaccccagtgcccaaagttgaaaacagaactaaagcatcatataagagtcttatagtgcttgcccaactaatttcatttgtatccagagagaaattagtcagctttcttcaagaagaagagaggtaaatcttccattctatgtgtatatactgaatgcaaaaagcccgaaaaaagagttttttgttgctacttctttagcagtactctccatatcttcctcatataaacaactaaagaccatatagagagccctgcagatacatagagcaacccaatacccgacggtaatagtctctcaaaactgctatcccggcttgcaagaagtatggttagcgctatcatctgcgttgcagttttccactttcccaagctatttacagcaacagcctagcaacatcaatgccatttccatggattaggaaaggaacacttacgaaaacagatccaagagaacgcacatgatggtgataactttacctctgaaagcttgccgttttgagatgcagcccattctcttactgcagacatagtaatctacagtgaaaagtataccgactagtttagaacagaaagctgataagtgaaacttacttaacggtatatcagaattctgtatcttacctctctaccaatgatggcgattgaaggtactgtcactaaccatggaactggtcctaagacaacggcgaccattggtttagtgcacaacaatatcaatgtagctgctaccataagctgcataccaatgacataaatcagaatgataaaaatcattcctttctggtggagaaaagataaagaggatagaggtagctaaggaagaaggtatctgaccttatctgccactggatccaaaaatgcaccaaattcagaacccaatctcatctgaaaaggcacgtctcactgttaaaagcttacaatttcaactatgcagaagaacatgaaagggtaaagaaagaagttaccttccgtgcaatatatccatcaagccaatctgtaatggctgctgcaatgaaaatacttgtcgtagcagttcttccccaccagcaatcaacgtaaaaggctacatttcaaaaaccaaaggagatgatgaagataatgcaatgggagataaaacaatcaaaatcaggaattgaacatcaaaagatccaattcagattaaatttgaagagtggtaacaagtgaagtacacatagcaataagctcaatttcaaaaaagttgtcgaatttctcgaattcaaaccaacaaaactctgatctgagaaaaatcgcaattgcatcttcactttgatctgatgattagactcctatcacacaccgaacaagtacaatgact

SEQ ID NO: 7800 - DNA, 786 bp, Arabidopsis thaliana landsberg
  unsure (1)..(786): unsure at all n locations
accctttccatcaatacataaatccaaatgcaggtcaaagcaaaacaaaaccaatagatgaattactactactaatactacttcattagtactttccatatcttcctcatataaacggctaaagaccaaacagatagtcctgctgatacataaagcaagccagcacctgaagctacgagccatccaacattgctatctcggcttgcaagaagtatggttagtgctgtcatctgcgtggcggttttccacttgcccaagttatttacagcaactgcctgcaagcatcaatcaacgccatttcatgattcaaaaagaagagaaacaataagaaagctcttagacaccacaatatcagagatgagatgttggtgatttacctctaaaagctttccattttgagatgcagcccattctcttactgcggacatagtaatctacaaacgtattttatacagttaaggacatgtttacttattctgcaagtgaatggtattaaggaattacaatcaattatgctataaatcttacctccctaccaatgattgcaatagaaggtacggtcaataaccatggaagtggtcctaattcagcaacttggataggttttgtacacagtaaaatcaatgtagctgcaaccataagctgaaaaagccaagacatagataaatcagagatatgtgtatctagtctacatagatcactntttcaactatattaaagctttggtgttaaaaagcttaaaggaagacaagtctgcacaccttatcagcaactggatccaaaaag

SEQ ID NO: 7801 - DNA, 1125 bp, Arabidopsis thaliana landsberg
taaaaggacaacgacatatactttgcatttttgtatagagatactattattacctctagttgtcttgtttatttctatatatttggtagagttggtcttataaaatataatatggcaattagttctaattacttacacgcaactttgatggcaacacttcggaggagtcctttcaaattcgctaatacaaaggttcctcatgctgacctaggcgacagtgtctctcctacaaaaaagaatcctgaagaagaagttccaagtgatcccgtcaatatccagcttcgcggtaagaattcttataccattctcaaataataagcaagttacaaaggatagatcaaagtctcagtttcgaagataatcactaggtggatatagcacgggatactgatttattcgcatagcgtgatcttgttgttgatgtaggaaagaatacgaacgtatattatgagtatatacaattaagtcaaggaataagccaaggtcgtgtagaagtcgtgaaggacttcttgaacgatcatccggacgcagtggacgaatggataaacctttacgagacgccattgttaaaggcttgtgcttgtgggaaacccgagattgttaaagagcttctgtggcgtatgacacctgaacaaatgcttcccaagatgagccaaaacgtttcgtaccacacggctcttactgtcgtagcggttagtggaaatatggagattgctgaagccttagtcgccaagaaccctaagctgctagagattcctggaatcaatggacagattccggttgtggttgcggttgagaacacgcagatggaaatggctcgctatctttacaccagaactccggttcaggtcttacttgctgaagacggatatcatggtactttgctctttctgaatgccatcttctatagaatgctcggtaagggatttcttggaattcaagcaacccatatctttggcggttttgatcttgatctgtttttctttatacaattagacatcgcattggatctgttcaacatgagcagacgcttagccgtcacaaaacacttgcaaataaaatcgattccaatcattgtcttggattcaaagccagatctttttcctggtgactgctatctggacc

SEQ ID NO: 7802 - DNA, 408 bp, Arabidopsis thaliana landsberg
gtaaaaataaaacaacggacaaagatgtcaaaggctttaagtttcaaaagaacagatgctaatcttggggatgggttacatttctacacaaggtttatgtggtagtctctcaattttataggaatagataatttaatattgaataaaaataactttaagagtcgtaaactacataagcccgcacgtagtgcaggtactcatctagttcatataacagtttctactaatctatgtacttttactttttttttaaaaaaatttgtatatactttgtaatatattgtttttgtgttatgatttcatataatgtaataaaatataatatatttatatgtcaatactcaatttatccaaaaaaacctcataaattaaaatattatatctttccaaatataacaaaccgaaata

SEQ ID NO: 7803 - DNA, 1170 bp, Arabidopsis thaliana landsberg
tttggagagacatttagccccttccccatcagggtatctggaaaaaacccatagataaaataactgaaaccctttctcacgttcttcagagaaatatattatagagactttatgatgttatgagtactgaaggctttgaaaagaagttacgtagatttcaagttactttagattcacaaaagaacttactctgatgacctttgtttgaacgagaaggctttggaaaacttggctgctttatttgtatacctagcaagtgagagaaaaacatattggatcaaaagagaataacaatatggttgatcgttgcaaagaagaggtcttagattagtacggacaagagtagatgaagcgtttcaatggtccaagatagcagccaccggggaaaagatctggctttgaagccaagacaatgataggaaccgactcaattctcaagtgttttgtgacggctaagcgtctgcttttgttgaacagatccaaggccatgtctaattgtatgatgaaaaacaaatcaagaaatgatcatcaaaacaccctaaaacatggtttgcttgaagatcaagaaaccgacagcttacccagctttttataatatatggcattgagaaaaagcaagataccgagaaacccgtctttttcaagtaacacctgaaccggagttctgttgtaaagatagcgagccatctccatctgcgtgttctcaaccgcaaccacaaccggaatctctccattgtttccaggaatctctagcagtttagggttcttggcgactaaggcttcagcaatctccatgtttccactaacagcaacgacggtaagaggcgtgttgtaaaaattgttttggctcatcttgggaagcatttgttccggtgtcatacgacgcagaagcaatttaacaatctcggggtttccatatgcgcaagcctttaacaatggcgtctcgtaagggtttatatatttatccactgcgtccgggcggcggttcaagaagtccttcacggcttctacacgaccttggcttattccttgatttaactgtatatactcatagtattcgttcgtaaccctccctacatcaacaacaaggaatacacatatgataaatatatctgcatattcagattattatgctatgcgaatagctaggtatcccgcactatattcaca

SEQ ID NO: 7804 - DNA, 891 bp, Arabidopsis thaliana landsberg
gtcctataaaagaacatctttttttataagaagaaccaaatgaccccgtcgagatgttgatttcattcatcgaatcagctctttccacatctaggcttcgtggtaagagttctttataccattctcaactaatcaatcgcctataagcaagttacaaggagatacatcaaagggtcgggttaaatttattctgtgtatatatcttgttgttgatgtaggaaagaatacgaacgtttattatgagtatatacaattaagtcaaggaataagccaaggtcgtgtagaaatcgtgaaggacttcttgaatcatcatccggactcagtggacgaatggataaacctttacgagacgccattgttaaaggcttgtgcgtgtgggaaacccgagattgttaaagagcttctacgtcgtatgacacctgaacaaatgcttcccaagatgagccaaaacgcttcataccacacgcctctcactgttgttgcggttagtggaaacatggagattgctgaagccttagtcgccaagaaccctaagctgctagagattcctggaatcaatggacaaattccggttgtggttgcggttgagaatacacagatggagatggctcgctatctttacaccagaactccggttcaagtgttacttgaccaagatgggtatcacggttctttgctctttctcaatgccatcttctataaaatgcttggtaagcggtttcttggacatcaagcaaaccatatttttggcggttttgatgatgatgatttcttgatttgtttttctatatataattagacatcgcgttggatctgttcaacatgagcagacgcttagccgtcacaaaacactcgcaaatcgagtcgattacccatcattgtcttggcttc

SEQ ID NO: 7805 - DNA, 602 bp, Arabidopsis thaliana landsberg
agctttatatatataagcaagtgtatttgatttcaattggttcacgtacaacatttcttctacgaatcaaaatataatgcaatcatatcagttaagttaaaggaaacatgttttctattgccagttcattgctaaacattataaacaataagtttaagcattcaaatattttcatttttgtattatcaactaaagtttctgtataaatattatttcatacttactgtttttataaaaactaaaacatagtatggatttaaacaagtttatgctgctgaagtaattttgagttaatacaatctacatgaactaaccttttaattatgcaattcacatgttgcggaagtcactttctgaattcctctccgttattatatatgtaacgtttatatgataaataactatttcatattcatcattctaagaaattcatatcaaaatttatgttgtaaattacattacgagctcttaaagtttatgaattatttgtagcagtcattatgtcgatgagttcccactaccttatcttatttagtccgttgctggtgcctgtgaagataaaatgttttggtaaatcagtaaagaggtatgagttctaaatc

SEQ ID NO: 7806 - DNA, 384 bp, Arabidopsis thaliana landsberg
tttatcaccagcaccttgagagaaggacatgatgcaataactgtgttgaacacatcaacttcagctaatttttcctcaagcttgagaatcttcagattttcacactccttgaaggcatgtgcggttactaaatcgtatcgacgtaggaagagggttgcgagctttggatgcgagaaagtgttaggggaaaaccgaagcacattggttctcctaccttttccaagtttgttacaaagtgagagaaatctagtatttttctcaagagtaagcaatcgaatccaattttcaagcacaccgtttacacaatggtgtgcaaaatgatggattgagcaacccatcagatgaccattgtgattgtttataaccttgagaacaaaaatagtg

SEQ ID NO: 7807 - DNA, 1755 bp, Arabidopsis thaliana landsberg
gggagagttgaaataagtaacagggtcaatgtttacgaactttttctctccaatcaaatcaccaaggagagacaagtgacctgtatgctcattgaagattcttctaatgatagctttacggtcatcatgctcaccagcagcaatacgagcattggccaatcccttaaaagttatgtagaccactgcagttttggcgttgagtctctcatttgggggcaccatatcttccttggtttctatcaccgctttcacaatcttcagcttggacagatcgctctacagcagcaaaaccacacagttttggaacaacaaaaaccacaagttaatgattataaccaacagttgcactgactcactcatggtatgtcatcatttgatatgcagaaaagaaaaacaagacttacatctgagattctgaccctttgaattgcacagagtacaagagaacaaagaaaagctgatccagtgttgttaatctatcttaccaagtaaaatcgttttctatcattgaaagaatcatgtgacggccactgaggcaacttatcatccactgaaaaactatcacaaggtatgaggcgctcgttggtggtcacacctatgaaacattattattcatcagcaagagtgttatttctatacttgtatacaaagaaagaaaaaaagaaaggaaagaatgtttacctttaggtctagcaatcggaacgattatattcaacttgccgacacttcgttcattaactagaacctgaaagatttgatgcgaaccgctaactgaatcttgtgcaagcaacgtgatgtagtaaggggacaccaatgcatgacagcctcttgttgaatttcattacgtacccgagcttgaagtttgttccctgagaaagaagataaaatagaattgtgatcatgtgtacaagaaacaaccagcactgcagaagaaagttttcaggttgatagatgataagatggaggagaaaacaaggtcttacctccaagatattgaatcgatgaagccccgcactagcataaagcttgacccagagaggaagaggatggaaactattaggcagttgacagtcgtagggtatcagtgcaatggcccctggtggtgcttcgattccctcgatatcgaaacactaatgaagggaaacaaaaaaaaactcactaaagtaacagaacatgcacaagaagctatgagtgaataaagatgagttaaagggtcagggttgattaaaaggaacatgcaaatagtcctcctcttcaacaactccaacacatacctcggattcattcagtcgacgccagtaatccctcgccgcatggagactttcatctctagaccccgaaatcatggtccaatccatattctgcggatgctctttctaatcgattttaggttatatttatattcttctttttcaccccctaaattcatttatgggcttctgttgggccttctcaccctaaatcctaatcttatattataaacacctgagattcacaaaattctctaaagattgtttgtttgtttggtttaattattgggatttttttttacaaaacggctgcttttgtcattcaaaaacttgacaaacaaaaacacaatcatgtcgtcgtcgtccattgctttgctaaaattcttttaactttttcataccaaacactgaaaaaacactcaacaacaacaacatgcgtattttaactaaaatatttcttcgtcttcttcttctactactactactatgggtttttaaacaacgt

SEQ ID NO: 7808 - DNA, 1828 bp, Arabidopsis thaliana landsberg
  unsure (1)..(1828): unsure at all n locations
ggggattaaagtctatcggtctttgtttgagattttcttgttttgatcaggatgtgacaatgaagggtatgccgtattcttaacaaggatctcgagctatctcgcattctttctgcaactggttcgatctctaatgtcactcttggtcaacctaccaatgcaggtggcactcttacatatgaggtaacaaaacattgaatcaaatttcgttagtacctcgttttgaaatatatatcgagtaaaactgttatgtgttttttcttttctaagggtcggtttgagatactatcgctatctggttcctttatgcctactgaaaatggaggaacaaaaggtcgggctggtgggatgagcatttctttagccggaccaaatggcaatatatttggtggtggccttgccggtatgcttatagcagctggtcctgttcaggtgacacgatttgattacatgaatgaaacatatttacagattcaggagtatagaaaactctaaagtcttataatatgtgacaggtggtaatgggaagtttcattgtgatgcatcaagcagaacaaaatcagaagaagaaacctagagttatggaggcttttgctccaccacaaccacaagcaccaccacaactgcaacaacaacaacctcctacttttaccataacaaccgtgaattcaacttctccttcggtgaacaccgtagaggagcagaaaccacaagcttatggtggtggtatagtgagaccgatggctcaaatgccttcttctttccaaaacgacaattcaactatgaacaatttcacaccggcctatcatggatacgggaatatgaacactggtactactcacaaagaagaacatgaagatgaagatggtggtgatgatgatgatgattcaggcgatactaggagccaatctcatagtggttgagcaattctctgatcaaagtcagaaagttttcttgtgtagaaaggaagggagcttaaaggagtgcttttttttagaggcttgttttagttgtgtgagggttttcttcttttgtgtgcttttctaatttctagggttattcttctttgtgatcggtttagatttaatcatgtcgaagtcatagactaaacgatgttcttattgttgaggtcattgggattcaaatttagtaagacttttgtgatatggttcatattcttgcaaagtccattcataagattcactacaaacaaatgtttttgatgtataatacaaagtaggagtactataaaatcctacctgtgattcatcattatttgtctatgtcattaaaacattcatcagtttaaaaattgcttcaagtctagatcgtgcgtaattgcaaaagtctatataatttctgttccacatacacagactcatcagtggattctgggtttaaattgtaacaaataaaaagtcaagatacaaaggaagtgagcataactaaagcaaaacaactataaggtgatatttaaaataaataaagaaatataggggttaaaacataaatacaaattcttcgctaattctcaaaacccttccctttcctttatcgcagtcgtaactggcctccgttggtctctatcgtgactcccttcacgccattaattccgattaatcggagcttcgacttctcatcttccttgggtaactcgctctaccttatcttcatgtaatcaaaattcgaactttttgtctgtgtgttttagttgtttattgggtaagttactagatcttctctttcgattntgtttcagcgttcgtgcgaatcaacgtttgatttgaagaatcagtagcaatgtataaccttagtaggatcatttatc

SEQ ID NO: 7809 - DNA, 2803 bp, Arabidopsis thaliana landsberg
  unsure (1)..(2803): unsure at all n locations
ttaaacgaaaattttcaccaactcatgcaagcttttatgagttttaaatttaaactagagcacaaaagcaacattatatcggtcttgttggaaagatttgatgattcaaaaaattggactattctttatagtccacttggttaaataattggtggacatgcatgcatgttggtacttggtacgattatgcttgcattaaaatcgaccatagccatacaacaaatagtcataaatgcgatgaccacattttcctagtctatctgataactttaagccgccgttcactgttgaatacaagagattataattattattatctttaaggaataaagcgttttgtatgaaattttatctagaaatacggtctagcgaaaaatttgaaattgactgttcgtaaccaaaatatagaaaccatatacgaaacaaggtttgcgatcattttttctgttttttttttgtaaaccgcatgagttccaaaattttgactcattttcggtgtccggaactagtctataatccattccaatttaaagatgttcctctatcacaaagagccataaaatccggagtacaagagaaccaaaccccttgtactactaccacttggccaccactgccaccaccacctctttggtaggttttgcggtcattcatgattcatttctcaattttgttttataaaaatagttatctataacagttatttgtcaaacaattcataagatgtcagttatattttcttgagtattattttaaaacatattattactactaaaaccagtcatggtcaactgtccctttcaatgatacaatgttttctagtctacaatgttatttttcatactgcgttcatgagttcaactttgaacacacggtctaaaacgtagttatcatttagaagcaacgttaaaatgacacgaatctttatttcttctcacaatagtctactatggatagcatcttcttacatgtctcatgtcacctctctttttttttgctaaaaggttatcttgtcgtctctctcttgatttctttgttgtggccggcgtttgcaagtccactattggttatccgccacaaaaaaaaaacatccgtacatgataaaaaatttgaattgaaaattgttaaaatccgaatattttcaaaatatcaaattccataccttatacagaaaaaaaaaagattattatatgtacataatcttcaaagaatctattgtgataagatagaatgtgggatatgctagctaggagttggaacaaatctccaaactaaaaggccattgatcgctgaagagaaagcccaataactaagatagtattggagaagctacatcagggggtgggcaaatattagccaactttaattatagcccattttggcagttgtacgcccttcataaactttttggttcattgacgacgatcttcaatattacatgcatttattaatatatgatatgctcatatgtagaaatagaatatataacagccggtcccacaaaccaaattaacactacttcattatacaatgaaacatgagaaaaaaaaagagaaagcattctcccttattttaagatgattatatttttggttcattgacgacgagtaggcacaagttcaagagatactttcttgccaataataatcgcaccttcttcttccaaatcgatatctttcactgtccttccttcaggcaatccccaatcaaagaagtaaagtaaattcaacaatcctaattcgactgtggcgatgcccattgtcataccgggacaaatccttctaccagaaccaaacggtaaaagctcgaagttaagtcctctataatcaacagaactatcaacgaatctttccggtttaaactcttctggattctcccagaggtcaggatcacgtcctatcgcgtaaacattgaccatgatctgagttttctctggaatgtcatagccttggatcttgattttagccattgcctctcttggtaataaaagtggagctgctgggtgtaatctaaatgtctctttgatcactagcttgaagtagttaagttggttaagatcttgttctgtgattctgtctcttttttcaccaagtactgtcctaacctcatcttgcactttcttcatcactcttgggtttcttattaactctgtcattgcccaaagaatggtcgttgcacttgtgtttactccggctagaaatatatcctaaattcaatcgcaaaaaagataaaattttaatacacatgccatataaggaaaaaagaattaattaatgttatataaataattaaggaatattttaaagaaaattaattctcttagtgaaaaatatgagaaaaattatgaaaatataagattctaatttctaagtttttaactcaccatcaatttgttgttactgacctaatcgattacctttaaaatgtcataaattcttaaatttgatttgtccgtatctcctcaatttgttcgatattataataacctatttttttctacatttatttatgcatactaatcaattcattccacctaggtcaacgacggattaaagattatttagaaatgcttacagagatgattcctttgatatgatcagtagtgagcttaaaagaaccatcttggctttgtttattcatcatatcaatcatcacatccacaacatctggagtctctaatacttttcttcctggctttagatgatcatcgagcacttggttaaagaatccgtcgagatcagcaaaattttcgttaggctcttgctntgaccggtgatttatcagaatccaaccctcgggaaga

SEQ ID NO: 7810 - DNA, 2143 bp, Arabidopsis thaliana landsberg
  unsure (1)..(2143): unsure at all n locations
ctctcttatggcctgctttagaggttggtgtgtgtttgattttgctaacggtgtttcctgtgtatttgttaattcagttaagtttgaggcgaaacttgaggatggtactgttgttgggaaatctgatggtgtggagttcactgttaaagatggttagtgctctgaattcttttaagatatgatgggatatgttggataatgtattcgctctttgacattctttgtgatctatgatcattaataggtcatttctgccctgcacttactaaggctgtgaaaactatgaaaaagggtgaaaaggtccttctgacagttaaaccacaatgtaagacgatttgtctcaattgttttttcactgattctggtatggtgtgtatatcatctcttattccaatgtgcttctgaatgagacagatggttttggggagaagggcaagccagcctctgctggtgaaggcgcggttcctcctaatgcgacgctcgagatcaatttggagttagtttcgtggaaaacagtgtcagaagtaactgatgataacaaggttgtgaagaaagtcttgaaggaaggggatggatatgagcgtcctaacgagggggcagttgtgaaaggtttgcatttcggattttagtacactcatgtcttcaccagatataacggtttcttacggggtttcatttgtttctttctggcagtgaaattgatagggaaacttcaagatggtactgtatttttgaagaaaggtcatggtgagaatgaggaaccgtttgagttcaaaacagatgaaggtaactacactgttcctagtatttttctgataactttcctttggatagttggatgtgctggattttccatggcttacttagtcatggtaactcatttactggatgcttaaacagagcaagttgtcgatggacttgatagagctgtcatgaagatgaaaaagggtgaagtggcattggtgaccatagaccctgagtatgcctttggttctaatgagtcacaacaggaattggctgtggtgccgccaaactcaactgttacttatgaggttgacctattgactttcgacaaggttagtgaagtattttggatgcttatgccgctcacaattcagtcaatatggaagtataagagtccaacacttgtttgtcattggctttttaggaaagggaatcgtgggacatgaacactgaggagaagattgaagctgctagtaagaagaaggaagaaggaaattccaagtttaaaggaggcaaatattccctggcttccaagagatatgagaaggtatatgatacgaactacttattgctttatgagttataagtcgaacaacatcttacatggttaagtttcttctcaggctgtcaaattcattgaatacgacacatccttcagtgaggaagagaagaagcaagcaaaagcattgaaggtggcatgcaatctaaacgatgcagcctgcaaactcaaattgaaagattacaagcaggccgaaaaactatgcacaaaggtaataataattggttgttaagaccacaagtcctttatgtcagttttaaagcctagctgaacaaaactgatggagatggtggttttggtatttaggtgttagagctagaaagctccaatgtgaaggccttataccggagagcgcaagcgtacatggagttgtctgatttagacttggccgagtttgatgtcaagaaggcccttgaaatcgatcccaacaacaggtttgtctcttactctttaactcttatttaatgttacatttggcttttgtatcttttaatccacagcatgataatgtcttctttatatactaacagaagactaaatttgctattttatttgctaatgatagggaagtgaagctagagcagaaaaggttgaaggagaaaatgaaggaattcaataaaaaggaagccaaattttatggaaacatgtttgcgaaactaagtgtaagtatctcaatggtttgatcatatgttataagtagatgatagtagttagtgggaatatgatgataaccaaatcttgtattggtggcaacttgcacaaggaataatcnaaagatggaaaggcaataagcacctgaggtcttgaaaacgatgcaagaactctgcatttgtcattttc

SEQ ID NO: 7811 - DNA, 1828 bp, Arabidopsis thaliana landsberg
aattttaaagattaagttgcctccaggcgtaccatgccatgtcgtggacgctaagactaacaaggtcgattgttgggctcattcgattctcatggatgtcaacaccggcgcccttaagcctctaggggtatgttcaaactcacgacaccatcttttttttttttttttgggcctaggcctagacacgggttatcttcttctcattaaatagaatcatattatacgaacttgaattaaatatttgcattcacatgtttcatgatagctttccaccgatacatggtgctcatccggaggtctgaccgtaaatggtacattggtgagcactggaggatacggaggaggagccaacaccgcgaggtacctatccagctgtgaaaactgcaagtgggaagaataccctcaggcattggccgcgaagagatggtactcaacgcaagcaactctccctgacggaaagttcttcgtgattggtggaagagacgccttgaactacgaatacattcctgaggagggacaaaacaacaggaagctctttgactcattgctcctcaggcaaacagacgacccggaagaaaacaacctttaccctttcgtctggcttaacaccgacggtaacctcttcattttcgctaacaaccgatccatccttctaagccccaaaacaaaccaagtcatcaaggagttccctcagctcccaggtggtgcccgtaactacccgggatcaggttcttccgcactcctccccatccaactttacgtgaaaaaccccaaggtcatcccagccgaggttctcgtctgtggtggttccaaacaagacgcgtattacaaggctggtaaaaaaatatacgaaccagcactacaagactgcgccaggataaggatcaacagcgcaaagccacgatggaagacggagatgatgccaaccccacgaatcatgagtgatactgtcatcctccctaacggagacatccttctagtcaacggagctaaacgtggttgttcaggctggggatatggtaaagaccctgcctttgctcccctcttgtacaagccccatgctgcacgtggcaagcgtttcagacagctcaagcccaccaccatcccacgtatgtaccactccagcgccatcattcttccagacggtaaggttcttgtcggtggcagcaacaccaacgacggttacaagtacaacgttgagttcccaacggagcttcgcgttgagaaattctccccaccttacctcgacccggctctagccaacataaggccaaagatcgtcaccaccggcaccccaaaacaggtcaaatacggacaattcttcaacgtgaaggtcgaccttaaagaaaagggagcaaccaagggaaatctcaaggttaccatgttagcccctgccttcacaacacacagtatctcaatgaacatgaggatgctcatcttgggtgtcaataatgtcaaacctgctggtgccggttacgatatccaggccgttgcaccaccaaatggaaacatcgctccaccgggttactatcttatctttgccatctacaaaggtgttcccagcactggagaatggattcaggtcgtctaatgacgataatttttacccattttgtcttatgaccgtaacatcttaatataaaacaatcacataatatcagtttttttttccttctatatatattggttatgccaccattaatggatccaaattacttgtgttttctttcacttctataaacttttccgttcatgtaaaccttttcggtgagtttttatgactaaattttgtattggagaaattcttttattattacttttggctcta

SEQ ID NO: 7812 - DNA, 1061 bp, Arabidopsis thaliana landsberg
gatgcagacacctcctcatgggttcatggttaagagaaaaagcagcagaatcaagatcacgcctggatctggtgaagcccttttgagaggacaagtcaaaacccttttacacaaggttgaagaaggatcagagcttatccattcaataaagactcgtccttttatccatctggtcacttctccaatgagacttctcgctccaactccagcaaatactccccaatttccaaacttttcagatgatgatgtcaagattaagatcgcatctccgattgttgctggaaacttgagaacctctcagatatctgaagagaaagaagacaagagtatgagcataactcgttctttactgtttgacttcaccgacaagtcagctttatgaggaagaagaagaagaagaagaagaagaagaagaggaggttgatgggttgtgtgaaggaatgaagaagatgaatgtagagacgaatcaagctgaatttgcagggaaacataacagatttctttacaacagtgaagacgatgagatcgtagaggctaaagaagtgttgcatttgaaagggattccaactccgagaggaaagcattttaggtttgctactcaagaagaataagaatctttattgggctttgctttgtaatattggtcacgagatagtgatctgtgtttttcaggcctaaaaaggcccatttaaataggagagaggtcgttgtctaataaaatttggtggtaaaactaacagaacacatgagaaaacaaaaggacgttccaacgaacctttctacttgttctatatttacccaaacttgttctttagtgtgaagtaaacgccaagacattttcaactatatcttgttcctaaattctaattttacaatactaaaaaacaagcaccacgaaaaacttaacaacttctcatcatttttgtcatttagtggaattttccgtcggcaatgtgttacattttaaaataaatgattatataatatggtggaaccatcacataagtatgtatcaactatggaactagatcttcttgattattgattatactattagtttt

SEQ ID NO: 7813 - DNA, 1006 bp, Arabidopsis thaliana landsberg
agatgaaaactcctcccatgtcgtgttctctttgttcatgaataatctgtaaagcttttttgcattcggcctaacagtgggtttatgtcctaagtatctcctgcaaatttcatataaccaaaagcttaaacctttgcaattccatcaaagaaacaaactgaaaaatgcttaaacaaagagatgagccaaaaaaacatagaagaagaagaagaagatgtttcagtacctcctcccagccaatatttttgccatattgccattgttgttggttacaaatacgtcgctttcatcacaaacaaggaagtcgagtgcagccattctagaagagtacgaagaaaaaggttctaactcttcctttgtagctatagtgtcttttgaatagaagtgtggaaagagtgctttcaaaggagccaatgattcttctcctccatatacttcaccagacgcgacatatatatgaacatcactgccatatcccaaagctctaagcatcagtccgacttcttctggagtgagtggacatcttccttgtcgcctctgtttctctgggttgttaatctgcaataaaattgcaaaattagtcatcggtaccttgttaatatagagtacaatgaatcgcatgtaatttctgaaacattatacagaataggcattacatgtaatgttttccatctccttctaattgctgcaagttctctcctttccttatcaccaccaccataatagcatcccgagaatgcaagcatatcaggttcatacctgcaacacaatcaatatcacttgcgtcaaacactagtatttatagagattcaagaggtaaatgtaaaatatcataattgttgactagaatatcaaaaatgtgatggagtcactagaggaactccaggataaacatatttatgtatttgattccactcgtttcacgatgcaatctcctctattagatatgagtactgaggtttaccaaaaaaaaaaagctaagagcattcactacaggaaggttcag

SEQ ID NO: 7814 - DNA, 1604 bp, Arabidopsis thaliana landsberg
catatgatattacacaagggtggtcaatttttatttatatttcagaagaatagtgattaatcagtcaatttaaatccgaaaacgtatttagtttaaatatgttattttgatcacatatcgttatcggatgttgttttttttttaattccgtctggtttatatggatagaagtcgaacatatgagacaataaggtaggtgagttttgtttgatttattttggttcttaataaataggtagaagaacttaagaactgaaaacaaataagaagaaattcttgtgaacacgaaaccaaccgaaaaaacagcagtaggtaagtaaacttagcatgtcacacaagaagcattgcactcttttacttcaaatatacgaatttaaagacatcttaattaacggtactactaaaagatgggactccatccagtctcagaggccaacgcctcaagcccctttggttccctctctgcggctgaattctactcccgccactccgtcacccactccttcgcttacgtcaccaaccccaccggtctcaaactctttacccaatggtggactccactcaaccgtccaccactcggcctcattgctgttgtccacggcttcaccggcgaatccagctggttcctccaactaacatcagtcctcttcgcaaaatccggatacctcacttgcgccatcgaccaccaaggccacggcttctcagacggtttgaccgctcacatcccaaacatcaacctcattgttgacgactgcatttccttctttgacgacttccgtaaacgtcacgcttcctcctttctcccggccttcctctactctgaatcccttggtggcgcaatcgctctgtacattactctccgccagaaacaccaatggaacggtcttatcctcagcggtgcaatgtgctccatcagtcacaaatttaaacctccatggccgttacaacacctcttaaccctagctgctactctcatccccacctggcgcgtcgtcccaactcgcggctccatcgccggcgtctctttcaaggagccatggaaacggaaactcgcctatgctaacccaaacagaaccgtcggtaaaccacgagcagccacggcctatgagctcgtacgagtctgcgaggatcttcaaaacaggtttgaagaagttgaagtcccgttgatgattgtgcacggtagagacgacgtcgtctgcgatccagcctccgtcgaagagctttaccggagatgcagtagcagagacaagacgataaagatttatccagggatgtggcatcagctgattggagagtcagaggagaacgtcgacttggtgttcggtgatgttttggattggattaagacacgatctgaaatctccaccattcatggtggtaccaaagcttaaagtttgcatatataataaataaacaatcaaaattcaaattttatattggtatacaaatccgagaattttgtatttgagatcctcaagaataggtcaactaaaatcctaaattctaaagaaatattgttaacgaaaagatgagagtaagttctaatctcttgtggatgccactgaagaaaaatgaaagatataatgaaggaagtgaagggaagc

SEQ ID NO: 7815 - DNA, 2066 bp, Arabidopsis thaliana landsberg
tcgtttacctctatcacagactgtcactcttccattgcttgacttaaattaattttcctttcttctctgctacatggagtagaaaaaattaaagctttgagatttctttccttatcgatttttctctccgcgaattgttcgttgttttcttctggcacctgattctcatcttctttcttgtggaatctgggttttgttgcggagttttcgaggttcctcattcgttgcttctgttgaaactctctttttttttttgggtggtttactttgttttttttttgttgttgctttcaacctttaaatgccctaattttgaggttctagttgtggtttttaagattaggagcagaagccctttcgactaaagttcatgttagctgcaatttgctgaagtattcacagttttgttctggtaaagttcatctctttactcttttttaagatctttgtgtgttctagtttgtggcgtttttctgtatgtgatgactagagatgggttttcaggaaaaggatttagtgttcagatttcactggattttcaataagagtcttgttcgtgatgtcgttttatagatctgagttacattgtgggtgttgcctttgaaggtcttgagctactttgacttcattttgattgatcttagataatgatgatggaaagaaaatgaattcagagtcattactggtccctgcgttttgcttgataagaagtaatatcaagagatcattcaatcatctgaagtttctctttttctcttagcatcattttctgctgataagagacttcatagtagaaacaagactttgtgttttgtgaaatgtgggtaaaggatgctttttgtgttaatttcggtgcgtcttattgattgtttcgccatcaatctagctttgctcaattcttcttttcccacaagctctctctggttcagtttctctgtacgttttggatgttatggggcttgttttgaatatggtttagtgggttgtctcatttcttgtggagtctgtatcacgtcgtgatgcttattatgtttatgcccaataattctgtggatttagaaactgtttgcttatgaatctcaagtttactgtggtattagggaactgatggatctcaatttctctctttttagttggaagctctatgtgtttccttctgtgattgaaacacagagagaatgattttaccaaagcagtattgttgcacacactcgccgagctgccaatgcaccaaaggccatttaaacgaagacgtgttgttattagtgttccaacatttgaattggaatccgaaattagttgcaacactttcctgtgtatgcagatggtttgatgatttcgccaaacgggtactatggaaagagttttgcaagactcgtgccccaaaaatgatgcttgatttgcagtctagcggtagtcactgcattgacggtaactggcgagcccttgggaagcttctcatctactgctcaggatgtacacaaggtggtcttttcaatagctctgttcaaatcccaggccactttgtttatagaacccggttctcaagaacattaggaagaagcctccttccgcctcagtgtagaactgatgtactctatgtttgtgatccatgcgagcatcttgaccaaggagaagaaggcgacgtgggtttgttccgtgggattttcaagtcattcccaacatcgaaagttcggaaagtgatcattaacaaggcggttccttttcatccatccgaggtttgcccgtattgtaaagctaagctatggagcatgctacaagctaagataatacctcagagtgcctgcattcgtttggaagcttatgaagactgcattgagtattttgtttgccttaatggacatttgctgggtatctgcactctcgcgcctttgtctgattcagaggatgcaattccaagcgaagataacaatcacacagagaagaaacaaggtcttttatctttcctgtaaattacaaatcaactttttttgtctgacaacagccaaagttctaacctagtttttttctggtgggtttttttttgcaaaccattggcttttcct

SEQ ID NO: 7816 - DNA, 2059 bp, Arabidopsis thaliana landsberg
ataataattttttaatttgtctaaactaatttttaattatagtcgatttgaatattttgattttaaataatcgcgatttgaaattaagaaagatatttagaatgttaacaatacttctaaatctaaacggtttttttattcattctaatatgtcgcaaattcaaaattgatttttgtataacctctaatttctaaatatataaatcaaaattgtggataattctccaacttccaaatatttatcatctctctatatatatcccataaatatgattaaattattgactaaataaattaaactgtaaatcatgtatacttgaatatatttcatatttaattgagaatggaaagataagtcagctcacaaattaccgaccctttcttcgcctaaaattatgaacatgtacgcatgtttttaactaccaaattcacaattcttgagtcaaatcttttgaaagttcaccaattgataataccacatcgtgtcatcgttcataaactcaaataaataagatcgtgtttcaaccaaaaataaaataaaccgaatataacgtcgattttgtcagaccggttataccgatttggtctaagaacctatgagtattttactaatttaccccttcgtacatcctccacaacggacagaattatcaacccgagagcggagaagaaaagagagagaaaaaaagaaagggaagggacaaaaaaataaatggtgactcaggcgacccacaagcccttccatggctgcttcttcttcttcctctcacccagagacacgaattgaagaaatttgaattctaacaccaattttctacactcacatttatgattttcccgttcttgttggatcctacgagattttgactcgatcttcagaggcagatctgatcgcgaaaatttcttatttccagctaattttcccgtaacgttgttttttttgtttaatcggagatggaggcactgacggagctttgtgacattatagcaaagaatccgaagcaattctcggagaagttagcttggatatgcggtcgttgtccacaaacggaatggcttctcgctgaatcgcccagggtttctcggagtcatctcaacgctgttttagccgttgctcggatcatctccaagaatccagaatcaatcgataatcgtgccaaatccgtcgttaatgagtttctcagcgctatacctgcatcgttccgccgttccttctggccgcattctttcccttcgcagctgatctcttcgttttattgtgatttcttgagttatctttcgtgtgcggcggatctatccccggaatttggtacagaggttgctaggtttacaggggaagttgtgatagccgctattgcaccgagttctggtgatagcgacggggatccagcaatttctaaggctttcttggtcgcgctttctcagcatttcccgtcgattctgcagtctgatggagataaattgataacaatgctgcttgatcagtttgttctgaaccgtgctcctgcttcgcccaaggaacagcggcagcagaactcggctaactctgaaactgatacttcgtcgtctcagggctctcctgttagtacgaaccgttatccctcgggaaaaactgaaatggctagtcctggcgatgaggtggctagccatgggtccaatttatcctctaagagttcatcgtctgtagtgatgaatgggggtagtattgtgtggaagagtggtgttgatcagctgagctttggatttagcgaggggagtggaggtgctaaccctgtttttagacaacaagtggcttcttttgaagacgaatccattgagagcttggagaagcaagagattgcctttagattgataacccatattttggataaagtcaaaattgactctaaacttcaggatcaagtgagatttatagccaagaggcagcttcagtccatgtctgcatttctgaaggtaatgcttttcttgtggtgatatattatgggcttttctagaatatgcccttaactaggaatgctagagacgatatatcttgctgaaacaattgttagttgatact

SEQ ID NO: 7817 - DNA, 2353 bp, Arabidopsis thaliana landsberg
aaaggagggattctaggggtttttcagaaaataaccgaaagcgaaaacattcagatttgtaagtgattctatatatggagatagatattcaggttttgtcaagacacttctatggaatttaaccaaaaaaagaaataaaagttattttgagaaagtcgacactaataaattaaaataagtgcaaggaaagcatgtgttagtggaattacgttgccttacacgtaattacccatctcgtcttttccatgacgttggcttttgccacgtccacttcttcacatttttctcctaacattttcaagttttgctttagaaacttatgttactattaaattatattttaagaatatttcacaaagcatttatttttatacaaagtacaatttaagagattttagtgggttttctttttggtttgatgatttattagtagagtccacgtaatagttttaataattattattagttaacgatttgtatttcgcatgaagaatttaatttgctaaaattgtagttatttgtagatttcattatcatttttttatttgatttcgttagaaggtggaacaataatgaagtagtcattaaatacaatccaaccaaagaaatgttaacatcatcttgacgaacacggaacaattattaacaatcattcattcaattctttcatctattctggtttctttcaaatcaataataatttggtttaactctttcttaaccggtttctaatctaattttccggttaacagtgaaccaggggctggctacactagccttctttggagttggagtgaacttggtgctcttcctaactcgcgttttgcagcagaacaacgcagacgcagctaacaacgttagcaaatggacagggactgtttatatcttctcattggttggagcgtttctcagcgattcgtattggggtcgttacaagacttgtgctatcttccaagtcatttttgtcattgtaagtaatagcaactatcaaaatgtgattcatcttttttaagttggaacgttttaagctcataagaacgcttttttggatgtgaaaacgcagggactttcatcgctatcgctatcatcatacatgttcttgattagaccaagaggttgtggggacgaagtcacgccttgtggttcacattccatgatggagatcacaatgttctacttctcgatctacttgatcgcattgggatatggcggttaccaaccaaacattgcaacgcttggagcggatcagttcgatgaggagcatcctaaagaagggtactcgaagattgcgtttttcagctacttttaccttgctttaaacctcggatcgctcttttcgaacaccatcttggggtattttgaggatgagggaatgtgggcactcgggttttgggcatccactggctctgctatcattggtttgattcttttccttgttggaacaccgagataccgatatttcaagcccacggggaatcctctttcgaggttttgccaagttttggtcgctgcaacgaagaaatcatcggtggaggcaccattaagagggagagaggagatgtatgacggagacagcgaagggaaaaatgcttcagttaacacagggagaaggatagtgcataccgatgaattcaagtaagtcaccaaaaattgcagtttcaccatatacttcaatgccatgaagtgttctaacatgttccttttggaatttcaggttcttggacaaagcagcgtacatcacagctagagatctagatgacaagaaacaagactcagtgaacccatggaggctctgtccagtgacacaagtcgagggagtcaagtgtattcttagactgatgccaatttggctctgcactataatctactcagtcgtcttcactcaaatggcctctctctttgtggagcaaggcgctgcaatgaatacctctgtctcagatttcaaaatccccccggcaagtatgtccagcttcgacatccttagcgtcgctttgttcatattcctgtaccgcagagttctcgagccagtagccaacagattcaaaaagaatggatcaaaaggaatcaccgagcttcacaggatgggaatcggacttgtgattgctgtcatagctatgattgcagccgggattgtggaatgctataggcttaagtatgcagacaagagttgtactcactgtgatggctcaagctccttaagcatcttctggcaggtaatgaacacagaccttaaaactcactttggtcctaaaatcaacaacttacagaagaaacttccgagtattgacactcttctactctttgcaggctccacaatactcactcatcggggcatcagaagtgttcatgtacg

SEQ ID NO: 7818 - DNA, 1860 bp, Arabidopsis thaliana landsberg
ttatcaaccgcaactgaccaagaactggcggaaaggcagctagatctgattaaggtaatataagtttcacgttaatctctataaggataagtcaatgtgtcaatcataattagtaaaaggaagtataagactcgtagctatgttttaagtgactaagcagcatctattacattttttttcttcagccaaatcaacaatctagagcacaaaaggaaggttcagaatcagaacagttctgggagttattaggaggcaaagctgaatattcgagccaaaagctcacaaaggaacccgagcgtgaccctcacttgttctcttgtacattcacaaaaggtacaaatgatcatattttttcccataaagtttaagcctaagatgataaatgcacacaatgactgtttttttttcttctctccattgctgaaacgcaaattaatccagaagttctcaaggtgcgtatacttttaaaatctttttttgtcacaaaagatttatgcaatcataatggaaaagttttgggaatgtagctcaatccccatttttttgttttcttgtggtcttttggcaggtgacagagatatataactttacacaggatgacttgatgaccgaagatatatttatcatagactgtcactcagaaatctttgtctgggttggccaagaagtagtcccaaagaacaagttactagctttaactattggagaggtcagatatagtagatacattgcatactaaaccatgccttaactctagaaaaaaatagtctcaaaagatcctgaaatttttaagcaagtttctcatttatataccttttgtttccttagaaattcatcgagaaagattctctcctggagaagttatcccctgaagcccctatttatgtgatcatggaaggcggtgagccgtcattcttcacccggttcttcacttcttgggattcctcaaaatccgctgtaagtacctaacaaaatcaatcggtttctctgagaaataggcacgaaaggaacccctaacaaagggttaaacactcttttttttttgtttacagatgcatggaaactcattccaaagaaaacttaaaattgtcaaaaatggtggaactccagtggcagatgtaaggactattcttcctttaccttttgattgatgattcttcagagtgtgcattttaaaatttgtttgttaattgttctcttttgttgtgcatttgttaattagaaaccaaaacgaagaactccagcttcatatggtggccgtgccagcgttcctgacaagtcgcagcagcggtcaagaagcatgtcatttagtccagacagggttcgcgtgaggggcagatctccggcgttcaatgcactcgcagcaacatttgagagccaaaatgcaagaaacctgtcaactcctcccccagtagttaggaaactctacccaagatctgttactcctgactcctcaaagtttgctcccgctcccaagtcttcagccatcgcttctcgaagtgcacttttcgaaaaaatacctccacaagaaccttcaattccaaaaccagtcaaaggtatattttctgaataaattatctgaaagtgtgaatagttatcatcttttttaaggattcacattttcgcagagtgatcatctgaaagtttcaatcctttttgcatcttggtttagagattcacctgtcttattttactttcaatattgatctttcttattttaattggacatgaagcgagcccgaagacacctgagtctccagcgccagaatccaattcaaaagaacatgatgagaataaggaaaatgaccaggaggagggatcaatgagcagccggatagaatctcttaccgattcaagaaa

SEQ ID NO: 7819 - DNA, 1783 bp, Arabidopsis thaliana landsberg
tgatagtagcattgcccctcagctgtgtcgtctcctctactccgatggtatggctaatgtaagtaaaagcaactagaacatcaacattacattcatttctttttcatagccattgatcgatgtaaaatgtgtatgtagggatgtgatggttcgattcttttgcaaggaccaaactcagagaggacagctccacagaatcgagggcttggaggttttgtgataatcgataaaataaagcaagttcttgaatcacgttgtcctggtgtcgtttcttgcgctgatatcctcaaccttgccactagagatgctgttcacatggtaaacatattcatatacttgaatgttcttactaacgtagatttatcgatttatttgaactttattgtttggtgttgttttgataaattcggtgtaataatgattaggccggagcaccgtcttatcctgtgtttacggggagaagggacggtgggacattaaatgcagacgccgtagatctgccgtcaccgtccatctcagtcgatgagtcattggcatatttcaagtccaaaggtcttgacgttttggatatgactactcttctaggtatctcatcatcgtcaatttttttttctatttattttttcctttagaaacaagcatctttcaatccacaaccatacgtatttaaatcaaaataagtttgtaattataagagtatacaccaaatgaattgttgcgttgctttttggccgttgcgtttgaactctgcaaaagtattttataaaaatctgaaaatgttaaaatattaataaataaaaacaactgagattgtagttcaattgtctacctatgtttagttactgtaaacacatttaactactttaaggattacaaatatttgaattaattctcatcgtatgcaatactttaaataatataaaatttacaagatagtttcacatcctagaagaatatccaaaaaatagactagtaatccagaaaggaaaatataatctacaagcaaagtggagctaaatactcttgggtgaatataacaacctctaataattgtgtaattgaacaggagcacactcaatggggaagacacattgtagctacgtagtggacagactatacaacttcaagaacacagggaaaccagatccgaccatgaacacgacattggtgtcacaacttcgatatctttgtcctccaagaacacaaaagggccaaaccgatccactggtttacctaaatccagactcaggctcgagcaacagattcacaagctcatactactctcgtgtcttgtctcataacgctgttttacgggtggaccaagagttgctcaacaacgatgactcgaaggagatcacgcaagagtttgcttccggttttgaagatttcagaaagtcttttgctttggcaatgtcgagaatgggatctatcaatgttttgacgggaacagctggagagattcgtcgagactgcagagttaccaacgctaatgacggggcctaaactatattataaattttatattatgtttgtcccaaaaaaaaaaaaaaattatattatgtaatttttgtgtgtgtgtgtttataatataagtataaattattttgataacaaaatattatcaataagactcggaaataaagaagagaaattgcattctatgacaaattgacaaaacattaaaaatttataaagcaacacaatttacacaaagactatttgaaatgcattatcatatgtgtaaaaaacaacaacactcttaataaaatgtgaccaaattaac

SEQ ID NO: 7820 - DNA, 2245 bp, Arabidopsis thaliana landsberg
tacttacaaatgtggggagatctgtttcttcactatgacctaatccactgtttcttttacgggtaaggagtctcatgtacaagaactccaaagctataaacatctgtcttcactgagaatcttccgtgcattgcatactctggagccatatatccactacagaaaacaaagacagatgagacattgagattgattctggtgttagttttgaataactagacttactaagttccaacaactcttcttgttactgcttgagtattatcgaaatcgaattgtcttgccattccaaaatctgagatcttaggtagcatttgttcatctaaaagcacattggaggatttgagatcacggtggattatcggaaactccgagccttcgtgtaggtaaagcaatccccgggaaactcctacgatgatattgtaccgtttttcccagtctagttgcttctgcttgataggatctagattcattagcagaggaaagaaatgaaacagagaaaagctaatcatcggaaggagaaaagatcgaatgagagactatatataccgaacaagaaccgatcaagacttgtatttgggataaactcatatacaagaagtctttcagattctttgatggagaaaccaaagagtttaacaagattcttgtgttgcagcttagtcattaagagtacttctgtcttaaactctgcattgccttgtcctgaatgtatggataaccttttcacagctatctctagtccatctgggagatgaccctgatggattttatgacaggcttattgaatcacagtgagtaaagttaatctgtagattaagattagggtaaaaaagagtatagtaggatgagtttaccttgtagacaacgccaaaaccaccttcaccgatcttattcgttaaggaaaaatcatctgttgctactcttatggtctcaaaatcaaaatgcaatgagtctgtactctcaaattcatctgcagatcaaaattagccagcgcaaactttcataataaggtagaagaatagggtttagcatcattagttatctcaatcagctccaaaaacttactttcagcattttccttcagggtcttctttttcctcctcctctttaagtagataaagagaaacacaagacctaatatgatcgccacaatgggaaccaccgcaaagatgagagttttagaccggtctttactttttcctgcaaataacaacagagaatcaaaaggtagattctaaattcctaatcaatttgatgatattagcttaacttgtaatataccttgatcacttcttctggtgttattattatgagaagaaagaggttgcttctgttctgaagtaactgaaagatcgaaaaacggatacacttcaaacctgaaatagcaacttggattagtccaccatccacctgtctttccatcacaacaagtgggaactccatcaaagatctgagcaagacatattctacaatctgattcaaacaaatctggtgtacactgagccaacacgtagatcgttcctttcactcctgctgcaaacttaacctctttggtctcattcgcagcatcgatttttgctcctaatgaatccaataggtcacctaaacccttgctgaaacctttcttgtctgtcacactaacattacttgatgtataagaaaaaggaaccggctccatttgacctaagatttttcttcttgtgtaacgaaacatgcatttctcaagccaaatattggcttcgatgatgtttggacagctctctacgagctgctttgcggcggtggtgatgcaactgatgcaatcttgatttggcttgacatctcctctgcataaagctatggcgttgacttctccattgatggagatattgtagaagccgttgatggttggagttagatcaggtaaagacgagatcagacggttgagattaagggaatatgaagtgttggatgtgaagttacctccatcgtagtagcaaattgtgtgaacggtgacgttttgctgagcataagtgacaaaaaaagtcaagaagaagaaggagaagaaggaagaaagcattattgaagtagaagccatgaaagagtgaaagacaatgaaaagcagagtaaatcaagaatctgacaatgacagtttttttaaaaaaaattctcgttcattcgccgattctcgaaacctttgaccgaattcgttattcaaagaaaaaaaatcagtcagatgttaaatactcaaatatattggtcg

SEQ ID NO: 7821 - DNA, 2118 bp, Arabidopsis thaliana landsberg
tcaattatcattcttcatttaaaattattctgtttaaacttaaacatgtttggagatgtaccaatcaagtttcaaaccaagatttacaccaacctaaatactgtctcataacaaaaatgattctaacaccttccaaatttttgacattcttttttcctaatttttttccatcaaatggttttttcttaggttgcaaatattagagtatataatatgattatgaaaaactaaatgcagaagtggtgcgtcgactagtttatgtaatgaaaataaagaatatcgctgactttttagagcaaaattccaaggaccaccactccatatctagcacatgaagatgcatcataccggccaatcaaatattcagatttgttgtggcgtttaatgcaatatttgtggacaaatagtagatagttaaaaccgaagaagactatacattgccaattactagaaaatttgccgcaataccaaagagattccaacaatctaatttaaatgatggtcttaattttaaacggcaagtcattttgacttgtgttatgatcgaacctaaatatatatacaatggaaacaacgattaaatcattaatttacatatagcatttagctgctcaaatgtttaacatcactacaattttcatatatatcattgataacacaaacaaaggccatattaattaatcaatttacacatggttaacgcctacgcaagttcatatgatcaatccacattatccattcatataatcaaccaactaaagtaaacacagacacgatagtccctttgagattaccagtttgaatacatgtttttatctaacgataagagtaacatgatcaaaatgaattttctaagtgatgatatgatattcataatgttcgataaaaacattcgctgcctcctgtgattcattttctactgagaaaatatatagagagatacaagcaatgaaataagttacgtaggcacccacaaaccctaaccctaaaatctcattactctaattaattaatcaagaatctttattttttttagaatttgagagttatttcacttccattaatattgctgtgatcttcacattcttccctaagagcagccaacccttttctctctccaccaccactctccggtgacttcccttcaactgtgggactgtccgtcacctgatgatgagtagaatcggtagaggcggtgccaccggatgaaccgttaaacgtttgaaagtggtggtggtggagcggctgaggaggcggtggagttgtgtagaattcttgagaggagcaaaagtgtggtggaggcggccctgccgtgttggtatggtggtggtggacttggtggtggtagagagtcggagtgccaccatgtgcggaggtgtactccggtggaacccatatgccacctaggaccaccaaatgtggacctggcccacctgacgtttgtgggcttgggcttggtcttctagtgtgaagccgatacttctgtttgtttaaaatcaacacaccagtaaagtacttaaatatgagttaaaaaaagttgtaaagcatattgtggtgacttgtgatttaagttacctggagatggcttttgacttcatcattggtcaaaccatcaactttcatgagttcccttatttgtttaggtgtagccactgcaatgatataaccaacatataaatacggatacaagttcgattcaaaaattaaacactttttattaggttaacaaggttattttaatctatatttaataaactaaatccatatctaaaccggaaaaaaatagaattagaattagaatttatttggaaactaactacatatatttgaataattgttaagtacttaagttgatctctcatttttttttgttgattcaagttgatctatcgtatattcaatttcactttatgtactgttttttatcaaccgaaaaaattatagaaaacgccaactaaaactttatattatgccttctgaaaaaaataaaaatagcaaaatggaaatcatggcatggtaaagctacatcaaattaatacttagctggttagaataagtgtatttgtaccttgcgaaccaccaagcatttgaagagcttggacaaatctccggtgcaag

SEQ ID NO: 7822 - DNA, 513 bp, Arabidopsis thaliana landsberg
tttagaggaggctccggctgatatacctacattgttggtgctaaaacggatttactatgagctaatgattcggtaagtccttgatttggtttaatacattcttcgccagttattggtgtcaaaatatttgaatattattctcctctgaattttgatgtccctttacttctgtgatctttatagtaaaaatataatgtgctgattctgttgtgtaggtattattctcacaacaatgagtacattgagatatgccgtagctacaaggcgatatatgatatcccttctgtaaaggaaaacccagaacaatggattccagtaagtctcgtattgttgtttggatgatcttgtggtagtctacgttctgtaattagcttggattaacttttctcccttgatcctctaaatataggtcctgagaaagatttgctggtttttggccttggcaccacatgatccaatgcaatcgagcctactcaatgcaaccttggaagataaaaagttatcagagattcc

SEQ ID NO: 7823 - DNA, 587 bp, Arabidopsis thaliana landsberg
ttcaggaccagttgcaattataaattaatctcttctccctaaaggccgtccaaaattttgcctcctttggatcccatgttgccaagcatctctatatctatccccgggcgggtcagaatcatcaactgagttctcccttcgagaatttccatttcttggaaatgttgttgtgctcagcttcttgtcgtcttctgatggtgtccctgacctggattcagggtgcatatcgatggatctggttcttggcccacctgatctgaaacctctagcattaggtgcttttgggataaagctaggtacctttggaaccgggaaatccttgggaagagactccatctccataaaacaattccttgctttggcgtcagtgatcaatgctgcccaatcctcgcacttcatcagagcagatgcatttcccatcacctgttgaagaaaaacgagacatagaaactttaacaatgaaaccagacctatttaaccataacaatatgtatgtgcatcgagagacatcatacccataaagcccttttcgcacgggtgagagcaacattcatccgccggatatcagcactgcagcaaccccgtga

SEQ ID NO: 7824 - DNA, 570 bp, Arabidopsis thaliana landsberg
  unsure (1)..(570): unsure at all n locations
cttggcccttagcattgccaagcgtcgtgcttaaggcatttcaggtgcagtttgtacggggttattactcccacagagactttacccgcacccaacgacttcagagttttctgaagatgcatgtacaccccaacacagaatcgagcttcatcaacattctcgtaagatacagatccacctctatgagactcccgcccatggctgatattgaagaaaaggtaaggcctaagaacaggatctttatagtaaatctcatcaggagcgctggatatactttcactgtctttgaggcgtccttggtagaagnnnnnnnnnnnnnnnnnnnnnnnnnnaggatgcattctgtattgaacagtcaataacaaagtcggacagcctgctagctgaaacctttcaaagagacttctactatataaaagagttccagcagccttgctaatcactgtcgcaggaagctgctgaggatcaccgacaagtacacatcgcgcagcaccaagagcaaggtgaggaagaaactccacctcactagcttgtgcagcctcgtcaatgacaaccatatcgaagccatgg

SEQ ID NO: 7825 - DNA, 967 bp, Arabidopsis thaliana landsberg
attggtgtcaaatggttagagcattgctttgtttatgttgggaacgcattaatgagttgatggaccttttttctatgcgttcgcggttggcaggtgaaaagtccaaagatgggggttcggtttcaaagaaggcgagtgggtaaaactgattgcttttgattgaatcaatctcgctttgctatcgtagatcgaaagagcttggtcgctcgtgattttgctgatgagttatacacttttgatatgtttgttaccaggcttgagtaaaatattattaatcatgtatttgtaactagctgaggtcttaggaatgatgttcttgggtattgcttgataagttgaaattcattcgtgtgttcttgttatatagaagattatcgtccacttaatctttgtaggtatgttccctctttccttccaccaccactggcatccaagggtaaagaaccggagaagaaggtcagtagcatggattttgtcactgtaattctcttgttcattgggtttgttgtttgaagcacaattatttagttgtaagttcatttgtttcatctttctagagggaggaggagaggcctagggaaagagaaaagggaaagactcgaaatatagataatttcatggaggagttgaaacgtgaacaagaaatgagagaaagacgaaaccaggatcgtgaccgtcagggcgatagctcggttagttcatcatactcttgctccctctgcatcatactcttttgctctcttcatcggtgttctgctctcatattaactctggactccctgctttctatactaaacttattctgtattcagccatctagccgctttgatgagctacctgatgattttgatcccagtgggaggccacgatcgtttgacgatggtgacccacaaactacgaatctgtatgttgggaatctgtccccaaggtcgtttttcttttcttacttggatcatgtgttggtttc

SEQ ID NO: 7826 - DNA, 1044 bp, Arabidopsis thaliana landsberg
attaacaaacgcttctaggctaaaaacgttatcgtaatctttaatcttcaggcttcttttctaaaatcccgactggttaccgagggctagaaaatccggtcaccgtcgccggagacaacctcggtttctaaacgaaaccatcgtgaaggacgggaaaaaggagcttgaagacaaaacaatgacgagcgttttcgacgaacataaaccctccgatgactctcacgagtccaagatcgtcatcaatggtaatgtatctctatgttccttcggtttatttcggtttatcccggttttgtttcgattctttaaatcttctagtcgtttatggttggttggtttaagagtgtgtgtttggattgaattttaacgtgcaggagaagaagaggtgttggaggaggagaatgataatccgattgaagaagtccggttaacggtaccgataaccgacgatccaacactaccggtgctaacgtttcgaacatggactcttggacttttctcttgcatattgcttgccttcgtgaaccagttctttggtttccggtcgaaccagctttgggtatcttcagttgcggcacagatcgtgactcttccgctagggaaactcatggcaaagacgctaccgacaaagaaatttgggtttcccgggacgaattggtcgtggtcttttaaccctggtccgttcaatatgaaggaacatgttcttattacaatatttgctaacaccggagctggtggagtttacgccaccagtattattaccattgttaaagcgttttataatcgtcaacttaatgtcgcctccgccatgttgctcactcaaaccactcaggtatatagtttttacatgtcttaagttttattgtctttttgtttttataatgggtggatataacagtagctacacacacaaaaaaaaagctattatcttcttgattacgttcttcaatctttatgattactgattattatttttctcgcattttatacatttacaaattattatattcattttgttgttgtgggtaatagtcatttaaatac

SEQ ID NO: 7827 - DNA, 1207 bp, Arabidopsis thaliana landsberg
agcatgtatcgttggtgatacacaaattaaatacaatgtgaaagcttggaaaattcattgtctatgccgtattctaagatgcaaaaacggagactatcaacgtcaaaaaggttccttcaactctttaaactttcgtattttattacaagcatctaatttctaaactaaaaacattattttattctcacgtcataagcaagcatcatgcataattttgtaattctatcttcattttggccactagtcactactaatagcaaaataataacaaagtttcattggttcaaacatcatatcttcatatagttgactcattagattccaatcaacaattatatcaaaataatctaaaaacaatttctctttattaaaaatgaaaacaaatcttgattagtataaaaatagagatatggttcttgtcagtctcacataaagattcctagtcttatactctgtctctctctctctctctctttttcacactcacacacaaactaaaccggaatggccaccgccgacgaattctccgacgaagatacatcaccgattgaagaagtccgtttaacggtaacaaacaccgacgatccaacactaccggtttggacattcaggatgtggttcttgggtctaatctcatgttctctcctctctttccttaaccaattcttctcgtaccgaaccgaaccgctcgtaatcactcaaatcacggttcaggtggctacactacctatcggtcatttcttggccaaggtgcttcccaaaacccggtttgggttatccggttgtggatcggcccggttctcgctgaacccgggtccgtttaacatgaaagagcatgttttgatatcgatatttgcgaatgcgggtagtgctttcggatccgggtcggcttatgcggttggtatcatcacaattattaaagctttttatggccggagtatctcttttattgccggctggctcctcatcatcactacacaggtactcgtaactttaatcattttctcagctttgttgttatatataagtataataaatatatcacttttggtaatagtcaccaaataattgaagattcggaaaaaacgcgttgaaagattaagatatttcaagaaatttacgtcttaatgttaatgatactctgcttcgttaattcaatgtaatcggttaataattatatgaaacaaaattctctgtaaattgggat

SEQ ID NO: 7828 - DNA, 1318 bp, Arabidopsis thaliana landsberg
accctatgcttgatattgcaacctcactaggatcagcagcattttatcatcacttatctcaacaactgtatctatcagccgctggtttatttcctttatttcctccaaaagggcatgctcggtctgcagttcaagattgagtcttcaaaaaaaaaagaatatcgaaaccttgtgcttccaaattttctttgttacgtgtgtgtgtgtgtgtgagtgtgtgtcaatattcaaatatagctaggggaagtctaactgagtatcatacctcagttcttgccttcttgccatccgaagtcgcagtagattctagatcggatgtttctgaaccagcaaactgcttgtagttatcaccaacacttcctcccagtgaagcaacgcttagtggcattgcggttgtgtgacgcttcattttcttagtcgccatcattccctcttgggtcatgaagtttcttgcttggagacggcacttagtcattgcaaccaagtcttcaccaacggaagctcttgaaccatttcctggtgctgaaccagctatccgatcaaccatgcttacaacagatccgatgtcacttactgcagaagaaagggcttgtggtgagatggacttcacctgaaagcaaagcatacatcataagcagaacaatgattatattacaaaacgggtttgcagcaataacaccgtcctgctgcgatatacccttaaaaattggaaatttacttacggctctaataaggcgttcaataggcagctcagtagcactcggttttccagatgtaattgtcgaagaatttaaaatattcccatcaggactagtaaactcctgaaggagaggagaggcagagatccctggagtgccaattgctagggactgaactacaccttgcatgccggttgcttgttggcgtgcaatatttcccattgacaacgaagaagaaccaggtttctcagagtcaacttgcataggggacggagccaagggggttgaagaaggagatgggacaacaaaaggggaatttgcaggttgcaatggagttcccatcttgttgacagtatttttctggtcaacctgaggagacaaatgttgtgacatctgaggagatgcaccttgcagaagttgaggcgacgaaacagctcctggttttaactgttgaagaggataattcgcacgctgaccctgcatagaatgttgctgaaacatcccacgactgacattcatcccctgcctcgatgttaaatcattcatatcattcatctgctgtaattgtgccgcttgctgtcttgcttgcaactgttgctgttgaagttgcagtcgtgctt

SEQ ID NO: 7829 - DNA, 1903 bp, Arabidopsis thaliana landsberg
cctgaattgtactcagggatctctgcctctcctctccttccggagcttaccagtcctgatggaaatattataaatcctttgacaagtacttgtggaaaatcgagtgctactgagctgcctattgaacgccttattagagccgtaagtaacgttactaattttgaagggtatattgcaacagggcagtgtcattgctgccatccctcatttgccgtggaaacattgttctgatcttgatgtttgctttctgttgttttcagatgaaatccatctcaccacaagcgctttcgtctgcagtatgtgatattagatctgttgtaagcatggttgataggattgctggttcagtaccaggcaaaggttcaagagcttatttggtgtggacttggttgcaatgactaagtgccatctccaagaaagaaacttcatgacgcaagatggcgaccatgaaaaggaagcgtcagacaaccccaatgccatcaagtgttgcttcattgggaggaaagcgtttgtaatagctacaagcattttgctggtttggtaacatcagatatggaatctactgtgacttgtggtggcaagaagccaagaactgaggtatggttttcagttaaacttcccttaggtatatctgaaaattgacacacacacaacagataaaatttggaagcacaatgttttgtgtgctctagtgtagactgtgtagtgtcctgagctcaagatctttccgattacctcaagagtaagatcactccggcaggcttagcgtcatggttatgtgtgtaaacagagcattttttgagaaaagagtaaaaagtgataaaagctgtaaagaagttttgactggaacagagacttaggccaaaagcaaagactggagagacagactcattacaatgaccccacacactcacatacacacctgacaccaccactcaactctattttccaattgttaactaacaaaaattaactagcctaatcacatacaaagacaaaatcaagaaaacatggtggaagaaccctaaaacctcatctctcaccatcaattctgatataaagaacgaagaagaagctgaaagagaaaacataaaacagaacttagagatttttctaagtaggtttgagattctgaaacattgaatcccatttgatatcttcaaaataagtatcttgagcgtaaagtttctcatccttgaaactgtaatcgaaaaccatgggacttgagaagctatcgattctacaaggagtcccattggtcaacaacaacctctcttccttctccaatccaccatttccattcctcggcatcacagatctcttgttcctcttcaggaatccacctctccacttcccaatcccgttgctagtcttcttcggcaccaacaccagagctcgagacgacgccgactcttcttcacggcggatccaggcgcgtacgtgatcggataaacatttcctggttttcttaatcgcagtcacgactctggagatggaacgagaggtgagaggaggagagttcttgcgatctcgacgagcgagtttgagaatctcgagacggtgtttggcaatagagattcccatgctctggagaaattcgtggtcgaagtaagaaatgtcttcgtgttcgagctcgttctgagagaaggagaagccgtattcgttgatgagagaaagttccaggtttggtccagagagccatgaaaacaccaatcttccattgaagaaggtttatgtttgtttgtgtttgtgtggtagatgatgtatatatagaggaaaagtgagtggggggcttttttacttctgtcaagtacgggcttcgtcgttaaggtagttgagacgtaagagggctatatctgattaagtgaaatatagagggcaaagtgaaacaccggacaaatat

SEQ ID NO: 7830 - DNA, 640 bp, Arabidopsis thaliana landsberg
gccacatcatttccctgatcagataaggatgtactcattaaaacagtttaacttattcgaacataatgcacgacaagcggagaagggaccaaataaatagtgattctgcataagagctggttaagggctctctaagaaactaccaaaatacacataaggatggttcagtgaccaaagatgacaagaacgatagccaaattcacatccttatcaaagagaagatgtatgagtctctctgttcagtttcaaacataaaacctaaattttgtaccaacagaacatgaaatgaatccaaagtattacatcatccaaaccctagatttcaatctatttagagctcaatatttcaagcaagccctagaaaccctagaaatcttcctcaatcaccaaaatcaaaacttaaaactcacaaaatcagacattctaaagagcaaaactttcgttacctgccgattcaaagtggtgggatcatgcttagaccagaacaaatcaagcagcgactggtaactacactcttttggatcatattgaacacgaacaatctcggcatgattcgtggtacctgaacaaacatctttgtagaaggatcgtgagtgatcccttgagaataaccaacctctgtttgagtcactcctggaac

SEQ ID NO: 7831 - DNA, 1299 bp, Arabidopsis thaliana landsberg
cacagttcatgagaaaacccataagaccaaactggttgatcctgtggcattcttcaagtttcaaactttcaagtgacaatgcagatttggccaaagcgacaagtcctttaccagaaacaagcaagcatttgttcagagagacatgcttcagatcagggcaaccatttccaacagcttcgagcccaacatcggtcatacctctgcacgacattactgagagggacttcagtttcttcaacccttttgcatttcccataacccagaagcctttctcattcacaccttgaagtccatgaagcacaagatcagtaacagctgctccgtagtgaccaataacagcaagagacaaaccagatacgttcagcatctggagtttcactttcgtcaagtaagaaccagcttgagccaagaggaaggcaacaccttgatcaccaatacgtgggcagctcctgatagagatagatctcagattgacacaacgtcttgcaatagcccttaaaccctcattcccaacaccagagcaagaatcaatcgtcagatcactcagattcacacagttctcagcaatagcaaccaatccactgtcagttattccaggacaccgtgaaaggtcaagtttttcaatcatcgggcatgaccgtgcgatctcagacaaacccaaatcactaacagcaggcaagttccataaagaaacaaccctaagagatggacaaccatgagcaacagcaccaagaccaacatcagtcaccttactctcaaacccactcccacgaatctgaagcttccccaacccaccacgactcgacgtcccaaccgcaatcgccgccaacctcaaatccgtcgccttcttcccctccaaactcctagacaaaaacccttcaccctcctccacatcttgaactgatgactcattcacttcactcctactgatactactcaaaagattaagccaatgcttggaaacacaagcgcaagcactcctctcttgtccagaaggtaaacgtcttagaatctcaaataaacactcttcaggcaatacatcgattgaagtttgcttctcctcaaaaccgctgtaaaacgacgtcgcagcaacacgtaacctcttacgcgctgggtaatatacaccgggacagctccctggtgatagatacatcgatcccccaagtaaacaatcttcatcacctatatataatcaaacaagtcacaacataagaacactcaaagaacaaaccctaatgtaacataacatagcaacatcaacgaaatgagacttaatcagatcaaaccctagaacctaac

SEQ ID NO: 7832 - DNA, 597 bp, Arabidopsis thaliana landsberg
cctacggagctaaacaaaatcatatgctcgggatctacctccaaaggtcatggatcgtccttacaggttgtaccatttgcctcacgcccgtctatatcttctctggccctatcctcttagccttaggtcaagaggaacgcattgtccgtgtggctcggatcatagccctatgggtcataggcatcaacttctcttttgtgccttccttcacttgccaaatgttcctccaagctcagagcaagaacaagatcattgcctacgtggctgctgtctccttaggggtccatgtcttcttgtcggggctacttatggttcatttcaattttgggatcactggtgctatgacctctacgctagttgcgttctggttgcctaatattgcccaactcttgttcgtcacgtgcggtgggtgtaaggacaacatggagaggattctctatggatggccttcaaagatttattggcccgttttcaaactttctatgtcttccggtggaatgctttggtaaggtttcctctatttttttaagcagccaaccatataattatcaattagtctaggatttgatcctaaagttttggttacaataaaaaatt

SEQ ID NO: 7833 - DNA, 610 bp, Arabidopsis thaliana landsberg
ggaacaacccacaccacattttctcaattttctcctgagtatgtactcgtatctatcctgatattctccttaggagctcattaggctggtgggtgagagatctactgctgcattttgaaatcctcatgaaatgttcttcaatctcatagaccacattatcccaatgaacatgttgattgttccgagatatcaatatccatgcatttgttccttctgctattagctctcttgccatgttgatttgatagctgaaatttcgaagaaaaaacaaacttcatttcacaatatcagtatatcacaataaagattctttcttagttttcttctctggtaagcatatgaccgttaggttcaaattacctatggtgtgaacatccagagtacagagaaacctgatttgcaaattccaaaacttcatcgtctgatgagttgcttgtgatttcctttagaagtagagctttgtcgattaagtttccaaggcagtacttaaagatggtggaatctgagattgtgtatctcatttccgagttctctgaatccattgaggagttatcttcttcgtgcaatctcatgccatttccgttcttcaacttctcacagcaaacaatgc

SEQ ID NO: 7834 - DNA, 1911 bp, Arabidopsis thaliana landsberg
  unsure (1)..(1911): unsure at all n locations
tcttcaattttcatactctctaattatctcgggaacagagtttttttctcagttctcttcattacatgattacatcttctcttctctttttgttattacagtaacacgcgtctccatcaatcttctagctggcaatgagatccattctttagcttctttcttctctgtttttttttttttgaagaaaaaaaaaatggcaccaaagtttgaatggtgggctaaaggaaacaacaacaacactcgtaaaggaacaccagtcgttgtcaaaatggaaaaccctaataactggnnnnnnnnnnnnnnnnnnnnnccttctcatgacgatttcctcgtaagaactcatgagaaatctcgtaacaagaacgcaagacagctcacttgggttctacttctcaaagctcatcgtgccgcaggttgtctcacttctctcggttctgcattattcgctctcggcaccgccgtgcgccgccgtatcgccgccggccgtacagacattgaaatctcctcctcgggagtgggttcattacagaagcaaaaccatacgaagaaatcgaaacttttctactcttgcttaaaggtgtttctatggctttctttaatccttttgggttttgagattgctgcttatttcaaaggttggagctttggaacttctaagcttcagcttcagtttatcttcaataaagggttctttgattgggtttacacgagatgggttttgcttcgtgttgagtatcttgctcctcctcttcagtttcttgctaatggctgcattgttctgtttcttgttcagagtcttgatagactcattctttgtcttggttgtttttggatccggtttaagaagattaaaccggttcctaaaccggattctatctctgatcttgaatctggtgataatggtgctttcctccctatggttcttgttcaaatccctatgtgtaatgagaaagaggtaacaaccaaaaacccaaaagctaaaacaaattttgagttggttacaaatttttactaagttttggtttttgtacaggtttatcagcaatctattgcagctgtgtgtaacttagactggcctaaagggaagattttgattcaaattctcgatgattcggatgatccgataacgcagagtttgattaaagaagaggttcataaatggcagaagctaggtgcacgcattgtgtatcgtcaccgtgttaatagagaaggttacaaagctggtaatcttaagtctgctatgaactgtagttatgttaaagactacgaattcgttgcgattttcgacgcagattttcaacctctacctgatttcctcaagaagaccattcctcattttaaggtaataattggttaatttgatccaagaaaagattgtatactaaatcagttgtgttttcattgataggacaatgaggaaataggattggttcaagctaggtggtcttttgtgaataaggaagagaacttgttgacaagattacagaatattaacttggcttttcactttgaggttgagcaacaagtgaatagtgtcttcttgaatttcttcgggtttaacgggacagccggtgtgtggaggatcaaagctttggaagattccggtggttggctcgagagaactaccgtcgaggatatggacattgcggttcgtgctcaccttcacggatggaaattcgttttcctaaatgacgttgaggtatagtaacaataacatgttgttgttattacgaatacaaactagtttgttagattcttagctaatgtcatactatgtgttgccttttttagtgccaatgtgaattaccggaatcgtatgaagcttatagaaaacagcaacatagatggcattcaggtcctatgcaactatttcgtctttgtttgcccgcggtcattaaatcaaaggtgcgc

SEQ ID NO: 7835 - DNA, 1306 bp, Arabidopsis thaliana landsberg
catgtataagccctaataaatcttatctaggatctagctaatgttatatggtgtatataaaaacaggagattgatcgtttatccgaaagggaacgtaaaggacaatgggagtggatttatttcgatgtatgtggaaatagaaagcacaagcttgatggaatccacaccaccaactgaggcgtttgcggaactccgcttctatgtctacaacaagaaagaaaacaagtactttactattcaaggtgctgcactacaaatctcatgctctttctttaaaattttacgtataaattcacatattattgagtaagcgatgtttatatatttagatgtggaagtaaagcgtttcaatgcacttagaatggtgtggggattgctaaaagttctttcatatgatacatttactaatcctgaaaatggattcatctttgagggtggtgaatgtgagtttggtgttgatgtccttgttgctccaccccttactaattgggaaattctctcttttgatgagaaactctctcctcccaaattctcttggaatcttaagaatttttctgagttgaaagaggatgtttacacatcaaacaaatatcccatgggaggaaaggaatggtgagaagtataaataattttgctaaattttgtttatggactaacaagtatgtatacacatgtatttgaatgttaacaagtccatacttaatgttttgtagggttctaaagctgtatccaaagggaaactctagagcagatggcaaatatttatccctatatgtgcatttagctgatagtgaaacactaaaatcagatgagaagattttcaagcaaggacatgtgcgagttcttaacccacttggatctaatcacgtcgaagtacaatgtattttctaaaaaaataagtcttcttatatatacggagatattcatttgaaattgtctttctcactaaccatgttttgcattttactttcttgcagcgagctgctggtacaaggaatcaagcaggggttggggttgggatcactttctgtctatagctaatcttcggaagacttacttggacaaagaagatgcgttgaatgttgaaatcgaattcaaagttgtttctgcaaccaagtattctcccattatctaacctctactttttatttttagaatatcagtcatctaccattcttctactatagtactacgacacaatgctatatgtcctggaccagtttgttatatgtgagctctctagtaatccatttgtttgcttttatagcaaaatatgttatatactctgtttgagatcggactagaa

SEQ ID NO: 7836 - DNA, 2454 bp, Arabidopsis thaliana landsberg
ccgtgtatatgatagtgcttaatatatagttggttctttatacaattttaaatattaagattgatttgtaaaacctactacctaattccctaaccaaaattgtataatcaactttacggtgagaaatgaaatcgcataaaagctgaatgatataaaataactatccaaacttatcatttgaccaaatataactccatttatgcaccatttctatttgtttgtatcagattattattacacaagttgttactctaaatatggaaatatatttaaatacataaaaaagctaaaatctagcgttttcgaaaccatgcaagtcactgactctgttcatatgtttcctcaccatcgccactttagccaacctctccgccgctttccaagccgacgtcggagtaagcgactccaaactctctgatgccgccacgtgtcttcctttcacactattaagatcagctatctctgcgtccagtccacgtatacacgcatcgctcgagctcaaaccgtgctgcacaagcaatgctctagctgacgtcagcaatctatgagctccggagtaatggttacgctctattagccgccgagactccgcgacggctcgagtgctgacgtggaggtttctgagccgtgagatgttgggatttgatgatgatcggacagttagaggagtaggtattaaaagcgcgcgatcttcggggtttcttaattcctgagttgttggatccacgtaacgagatctaacggtcatgattttgtgagatctactaccggttaaggaattgttaaccggtgatttgatttcaaccagcaacgctctttcttcctccgcatacatatcacctaaccggattgaaccggttccaagccaagcgggtcgaccggaaagagagtaaacagaagttatctctccttgacccaacccggaaactatcccgagctgtaaaccgagatcctgaaccgacaaactcaaataaccgatgatggtcctcgcaaacgcgtgttagggaatcgcgtggctaagccatatggtgtgtatagggattctcgaatgggctaattgcgccacttgatgggctagacggaacgataaaacgaacacggtagagaaagggttcctctgccggcgatcggctaacaccttaaccgctttcttcaacgcgtctttcacactcatcccttcaccgtagaaatcaattccggcgccggagacagaaccaggaacggtgatgatatctacgattcttcgcgccgatctcctcccgttcgccgtcatcctccgtaacggcgataaccgtttcgagctggacgaaaacgcaataatcgataaacgatccatctcccggagattcgaaagcacaatcctcatcgtttgtttcaacatctccaatttcccaccggaatttctcccgcttacgtctaaaacagcaaccaaatccaccggcactctacgcgcaaatccacgcgccgtcggaaacggtggcgatttcaccttcatgacgacggagtaagtctcgtagcctttacccgacgcaacgatagccgattccggagagagcttaacgtccacgtttcgatccgttaacaatttcgccgttaaaggtgacggagtattaacggaaaatcctgtaaactcctcgcagtcttcgttctcatctgattcaagtattgtgtgaaatccggcgggagatatcggagatgaaatcaaagcttcgtcatcgttgtaaactctcaacgacttgtttttaatttccggtttgatttgagattccggtttagcgtaatttcgaatctcaagcaaaagcgaggatccgcataccggacaagaagcaagacggttatgattcgcggcggcgcgtgaggttacgcaaggaaaatgaaacgtgtgagaacactccgccgtgaaaatcgccgtaccttgacctgatttcacactctgtaaacagattccacatttgttactgctactctgcttgaatcggagtttggatttgaggagagtgaagctcgccggagaaataggagaagaagaaggtgttaaaagagagacaaggcttctgtttctgggagttgtttctccggtggtggtggttttgcacttaagctttggagttccgggaagagatgaagtagtggagacggcggtggctgttgaagtcctgcaacggaggctgtaagttccggtgccggaatcagaacgaggcgtagaaggagttgagaaaaagccgaatcgagaggttgatttgtggcggagaccaacgagtccgtcgtcgtcgacgtcgttttggttagtttctttgggaatggaagtgcaaaaagctcttctccagccgtttaacatatttgcttcttcttcttcttcttcaacctcgtgactcgtgtcccgttcttgtttgttagagactgagattttgaaatttagttctgtgagaaagagattttaagaaaatgagagag

SEQ ID NO: 7837 - DNA, 2170 bp, Arabidopsis thaliana landsberg
tctcgcaaggtgctgacggttcaaatagtatcaaaaacggctacatatatattactacatgttgattagccaaaatttaggaatacatttggaaaagtatatgactaaaagtttggtatccccccaaaaattggtatttgtaacaattcaatatagtttttttatttattaagtaactaaaagatttatataaatgtactttttgagttatttttctacaaaacattagataacaagagcttaaatgttttatgatacggtgatttagatctcacctctataacgatttgaatgacaatgcgatgatgttctagggctttcgaacgatacttcatcggcaatagatgacatctcgtcgttgtttctatgccacgaccaatgtgctcgtttatggtctataatccttaatctcccatgtccaaaactcgattcacggaattccgacaaaggtgactgaggctttttgaacctgtagtattggtttgcttatacaattcggttaaagaaccaaaacaattttacaaacaaataaaacaatttaattgggtgaacatattaattatactagtaatggcctaatcggaggtggcatacgtaccgtaaagcaaggccttctcggttgccaccgtcaccaatggttatgtacattggtccacatggatcggctttcttgttgtatatcggcttctgcattgtccataattttcatataatagtaaaagatgtgtaatgtacagtattcacttcattctaaccactaaattaaagaaaagttaatgaagatgggaggcacttacgaaacgttcgtaggtatgaacgtggccggcaaaaacgacgtctacttgagcacgatagagcaaactctccagggcacttctcattttctctccttcaccataatgcgccttgtttgtgctgtaccatggcgtgtgcatcaccaccaccaaccatggcgtctttttacggtcaacctcctcacacagaaaaaatttatacttttcgagaactaattaagaggaacagttgaattgtttttacttttaaaacatgaagtctcgtgtaaaaatccagaatagtcttcgtgtggtttctgctatgtaaattttgcaatgactaacttagaaatgttgcaaacaaatagtgcaaattttaatttatatatcccaactagttacctttcttaaatcagcttggagccaatgatactgatcggagtgggactcatagggggtgtaagaaccaagcataacggtgtggacgcctgctacatcaaaagaatagtaaagattggagtgagagagactctcagcgtgaggcatgagccatcgcgcattgtatgacttgaagcttatgtggtcattggtttggaaagactcgatctcgtggttcccctccgtgaccatccacgggcgggtgctagctaaagtctctaagaggcggccaaaggagtcccaaagtggctggtgggtgtctgcgtaggagaggtcaccgggaaggaggaagacatcgaagtcccgtttccgtatctgatctaatgttcttacggtccaatcggtttggcctaggtcaccttcaatatcacatcaaaaccggtttttagtatgtccacaataagccattgattatagtgttcactttaggaatcaatatgtaattgattatgatcgtttgaaagaatatttacaactctaacccacaaaatattatttgagttaggaccaattcatgcatggataataaccgacgataattgtaaaaaaaaaaaaaaaaaagatgagacgtgtaaaactattaaagtttgagattctggcgtatatacttcaaacaatcaaactccaacgggaaagttgtggacatggtataaaaagtggaatacatgtaacttcatgcacggtttgcatgctattgtataaatatatttagtccaattttaagtattctattaagcctgaagttaattgaaaacctaaaaagaaatagatggacaagattaacccaccagtgacataactagacaaagtatgaacaaattacaaatcgaaaataagaaaaatactaatctttctatataaaatattgggatcaatctcactttaatctgcaatatctctatgcacacatttgttttgcaaaacatgactaagatgtaaagttttatatatataatccc

SEQ ID NO: 7838 - DNA, 816 bp, Arabidopsis thaliana landsberg
tctgttctgacagccaacagtttgaagtacatgcaaggtttttaaaaaagtacaatttttgtgaccgtgagtaatcaacctaaccaccatatgaaatttctgaattagcacgtatttccactcaaaaatgtggaaagttatataatcaaaacgaattggttggaacaatcgaatcctaaatatatggatgtacatacatgtacacgtaagaaaccgcagtttcaaatatactagactttttggggtgaagtgactaaatatttcctcaaactacaaaatttaggataatacgatttaatatatcaaacggtaaacactacagaacaagtaaaaaccccaaaattttgctctctagtaaaatttacatttgtaggaatcatgacgaggacaattctccagaaaactctcaaaaagacgttaatttagaaaaagaaaagtttagtgacttgtagtagttgtctcgccggtatctttcactttctcttcttcgccttctctcatcttctcttcctctttggcaacactttcctcctgagaaatcaccattttaccctcgtgaccaccacacgtacactttttcatcgccggtgtcgccagatacctcggcaaatcttctccggccattatgacaagaaacttctcctcgtaagctccgttcgccgccttatctccagaccggctctctttctcttcatctacgttttgaccatcttcttcgccggaggaagacaggcgccagtaagagcaagcgaggatgagaagagcaaaggcgattagtcctagcatcgtcgctaaaccgccgaagaggtaaggaac

SEQ ID NO: 7839 - DNA, 536 bp, Arabidopsis thaliana landsberg
taagagagattttcccttgattttcttcttattaaacattttacaaagaaatatcaaatcggttgttaataaaataattaaccatttttgtccatttttgtttctgcaatatatggcttaatatcttacaacttgtttctgttttcttcctcttcactttaatataaatgactcttcactttaatataagttacattattcctatattttatctatgattttcacatcatttaaagtaaaatataaagttaaaaatatatgatgataaaaaaagatatacagtataagatgttaattttgattttttgctacatatatagcagatagccctttaattagaagtttatctctactacatactgaactatgaagtctatgattggtgtcgataatcaagatatttagtgacccacaaaataattatataaaatgtttaacgattcttgtttagtaaaccaatattatctgaattaatgatgatttaaacggcattgtttaacattaaaattaaaccatagaaggaaataaagtttctt

SEQ ID NO: 7840 - DNA, 878 bp, Arabidopsis thaliana landsberg
  unsure (1)..(878): unsure at all n locations
caactcatgtcaatagagtgagcaaacctgtctccaattgttgagctcttgaattgattgagtaagtaaaaactgaccctgattctgttcaaagtagtttggcagtacattgtgctctccaagaataacttcacctttcacaggcttctctaaacccagaattagcttcaataacgtacttttcccacaaccgtttggcccaaggatggcgattttctcccctctttctattgatagattagccttcttaaatagcatctgctttttcaacaatacacatttttcacagggtcaaacgtgagcgattaaggatttatactattgtcatgagttatactctagtaactcaccttatcctcgaaaccaaaatcaatgtttttaacattgactaccgatcttccacttgtcccacgctctggaaacctaatcttcatctgcttccgctgaaatggcttctctattagctcctgttcttgaagcttctctagtttctgttacaaacaatacaagaggaaacataagcttcaacgtctccagacggttcacagataaaagagcaagccagaatattggcttaggaaacagtagaaatttttttccattaatgtcacgccctagcaatcaccacaatagttcagcaaattagcatattctttttgtttgcaaaccttttctgcagtggaagcacgaccagaattggcaccagcaccaagcctggcgatcaagtccttagttgagtcgatatctttctgttgcttttcccacgctgcattctgagtttcgatccactcagcctttgagatcacatactgagaataattaccctcanatgtcctggacacacccatctcagtttccacaaatttagtacataactg

SEQ ID NO: 7841 - DNA, 2628 bp, Arabidopsis thaliana landsberg
aaaatgacccgatgattgaacattatgcttgtgtggtcgatttgctgtcccggtcacagaagatttcaaaagccgaagaatttatccaagcaatgccgataaaaccagatgcaagcatatgggcatctgtgctaagagcttgtcgaacaagtggggacatggagactgctgaaagagtatctaggaggatcattgaactgaacccggatgatccaggttactcgattctagcatcaaacgcatatgcagccttgagaaaatgggacaaagtgagtctaatccgcaaatccttgaaagataaacacatcacgaagaatcctggatatagctggatcgaaatcggtaaaaacgttcacgtgttcagctcaggagatgattcagctcctcagtcagaagccatctacaagtcactggagatactttacagtctgatggctaaagaaggctacattcccgatccaagggaagtgtcacagaatctagaggaagaagaagagaagagacgtttaatctgtgggcacagcgagagacttgctattgcgtttggactgttgaacacagaaccagggactccattgcaggtgatgaagaaccttcgtgtttgtggtgactgtcatgaagtcacgaagctgatatcgaagattgtgggacgtgagatattagtgcgggatgctaatcgattccatctcttcaaagacggcacttgtagctgcaaagatcggtggtgaatagtttatttgatgtaatttagagcatggatttgcgaaaattagactgaaaatatacaaagaaaatagtagaagaagagaacgattaagaaatatcttgaacaagctctgaaaattttccatggccctcaataatgctgtgagaattgaaaagtgatttattatcatccaaaatcatgaatcatattttgctgcttcgttaaactgtctacgcaatttattctcttataccgacaacgcaatcaacagtggtgaacctcttattttctcgatcgaattacagaagatggtgaatttccattagactgtaaaagttgatcaatatacaaaacccaaaacgaatcctttttcaaaatgaagatacatcagagtcgatgacatgttctgcatcaaacacttactttgttcacaccaaaatgatcttgcaccattaatctcaaaagatgttcagtcataatgctccaatgacatggaagaagcattctccaaatctaataatagtataccttaccgggaaaccaaatcgagattcccgatttgaacaagaatatttcagaccgaagctcttatcgtcgcagaggtaagcttcttagaagctttcgagcattgtgatatcttgaggtatagtaaatttacttgtagcaccaaatacattggccatctgaaacacagcggattgaacagcaggagcagttggtaatagcgattctgggagagacggacagcactctggctgattttgtttgttattgaagactggagtgtacagtgccaagacagcccggcagaatatgaatctgcagataagggagacaaagtccaaaccgcagatatataagacaaaaaagttcagagatttcgacaatcgttgatagataaaaccaacaatatttatggttcctcgttcctacacaatctatgtccaaataagaacctccaatcgtctaatgttccattagatcaagttggctacagttttagacttttagaagatcccgaaggtgtcttagaacttggaagaaaaacttataccttaggagtagtcgtctcaagaagggatcttttagtatctgtgaccaaacagggtgaagggtatctgatgttgccaatgtcgaagcccattcgttcatagacgaggaaagaagcttctcggccttagtaaaaatatcctaacacatgatggtagtcagcacgcaaacaaaagaagtgaagagaaagaagtatcaagcaagtgatgaagctttatctctacctaccgtttccatatcagaggcggaaatctcacttaacaagcaaaacgcttggactggtgacgtgagaaaaatggtgaaaaggctaccactaggttgacgagagaaatcagcagagataagcggaggagtatgtgatggagacagaagtaacgcggctggttctcctttctccgctccacaaatattcttcacagttcaaggaaagaaatattcatatcttctcaatttactaaacataggtatcaaatgaattttaacataagaatgatggaatcaggtgtacttactttaaaaactgtgctgctatcactgtcaatgattatgaaaagaggtttccttgtaaatggaactaaatcagagggatatatgtagcttgatcctgagggaaagacagttcagagagacttcaggaaatagcaaattctagataaactataatgacaaaagtatatgttgccattagttgtttatgaatgtctggaaatttcggtgttgatgtgcttcagatgtgaaacatatttatttggattatttacggaggcccaagttgaacacaaagttttctacttgcacgtaatactgcactctgtcctctagaagacaacacggttagatactacttattggatcctatctctacacgcgta

SEQ ID NO: 7842 - DNA, 1060 bp, Arabidopsis thaliana landsberg
  unsure (1)..(1060): unsure at all n locations
taataacgtctccaataatcacttcccaaatcctcaaactcaaacaaaccaaacacatcacatactgtctcttctccagtaaccgtcttctgcatttcaacttcttgacacatagaatcttcattactccttcgtctctttcttaaatcgaaccaagtttcttcactcccacgcaaaccacgagtctccgagtgctccttagttgaacaatagctaagggcacaatggttttcaaccatcccatcaacgacttcatcataagccttaaccgcctcttttcctgttctcaatccgattttgcggctgcttcttaatggatcggacgtatttgagttgttcatccggtagtagtttgggttgcaatccatttccatagcttttataactgtttcgagctgaaaatttgtgtgagctttttgagtacctctaattctaaccgcggctttatcgtaagccatagctgcttcctctgcagtttggaacgttccgagccaaaccctaacaccgtttctcgtcgaatccctgatttcggctgcaaatttcccccacggacgcttccgtactcccctgtattttcttgttttgcaagaaacccgagaagacaaagaacatgaatcaatggtagggttggttaatggatcatgattggttttgtttgggaaagaagcaatagcatcgagaatctctgtccattcctggtcctccgtcgacatatctaggctttgaagcatttctctagaaccttctggtatgtcatcaagggtaggcaacgcttcccaagttctagaaacttctggaacatgaattgatcttgtatcggtttgtggtgttccgatgtaattcgcccaaacgttctttaggatctcgccgtctggttcttggatattgccaaaagccattgttgaatcagagaggagtatgtgttggtgagatttagggcattttaaagagattgttgctttgggggttctgtgtgtacgctgaatgggaaatctgcggcaggataattgngaagtacagttggtgaaacttgtgttctaaggtactgaccgcatttcat

SEQ ID NO: 7843 - DNA, 1744 bp, Arabidopsis thaliana landsberg
acatctttaaaaaggagtggtatgcaacaaaagtagctgctcaagtttactataaggtttaaatcagccaatcttcttagcccattttaagaaaagaatgacaaagcaaagattcctatacctataaaagataaatattgactaatttgatgacgaaatcaataatactataacctaacaaggttcggttcttatcatcttatggttgccaaagaatgtttttgtgatcacggtccagaggattacatgtttaggggctaatctttcattattaattaagccaaatcacttcttagtactagtctgatatttgtcttctcattggaaggaatataatttaaagctaaagagcatcaagccatgtaaagagtttgatgatattcactaataagggttgcatgcacgagtttctgtccttatcaacagatgctcaacacgagccaaatgtataaaagagatcactcagataattctattaccaaatttgctataagagccatgagacaagaatggcaagaatcgacgaagtgggattgtgttttatttttatgacattaccaaatgacttcgactatatatggcatctacgaaaagacatatcatcactaacctatccatcataaacagatatttgatatttccaatcaaaatggatggagatcaaaagaagcatcaaacataatctaacaatgtcatgtgtttataataagcatccgatactacggtctagtgatgactagatctatacaagagccttaaagaggtaagggaaggtccacaaacatgcatgggttactgacttagtcgtttactgtacggaaatatagtagcaattaatacaaaagaaaaacggggaagaaaacatcttatatttctctattgcaaggtcaaggaatctcaagtttcattggattgtttcacaattgtgtgtaccttctctaagactttatgtggttgctaaaagaaatagtcactctcttaaagtatatattcttccaactggcttaaccccacaccatgctttttcctcctacttataaggagcttctccttctcttagctaaccaaatcaactccttttttatcaagtcatagatacatcttccttcttatttttttctccctcccaagaagcagatcttgtactctcgatatacatacttattttatatggcttccaactcaatgagctctagcgcttcttggacacgtaaggagaacaaattatttgaaagggcgttggctacatatgaccaggacactcctgaccgttggcataacgttgcaagagccgttggcggcaaatcagctgaagaagtaaggcgacactacgagctcctcattagggatgtcaatgacattgagtcagggcgttatccacatcccaattaccgttcaaatggaaacaaccactgaaagcattaaaggaactccaaaaggtaaacagaatatcacaacaattatccataagaaagcatccataaataatagacatgcactctccagtgtcttatgcgtgtcttcttgttccaccaggccagagaaaaaaaaaatctagctttatgatatagtaaacaccaccgactcccatatctatgaactgtcccaacttctaactgtggggccaaaagcaatctagtaacagagaattcaaaagttagttttgtcaagctcttgaaattgatcattagcccattagctctatatatatagatataaagtcatagacgcaaaaagccatttc

SEQ ID NO: 7844 - DNA, 1776 bp, Arabidopsis thaliana landsberg
gacacactcgaaggaagttgacttcaagtttttccgtatattttattttatttacctaatttagatgtcattttttcgtttttttgattatcgattctggtccctagccgccaaccatttctcttttttctttttttcgtctctctctgcatctgcacgtctgttttatcttttcttgatctttgttttcctgtaaacttatcacagaaatatttatgtaagccaagagatttttaagtttttaagctgctcataacagaaagttctgaagaacaagaagacgttgaaaaaagaaaaagaaatcttatattttgctatattggctttttgtctaatttgtaaggctttgatgtaacagtctctctctctcctttgagctgattcgtcacttgtccataaacaaaggaacccaccttcctcattcttcttacctattccttctctttggtttggacatttgattctagtttatgtaatggtttcttgatctgatttttctgggtctcttgccatttggtgaaacagatcttgggttttgtttcagattcagacaggaaaataatcaccaatctttctgacatcttcttaagatgttgacgagccctactttgaagagtttatggttcttgttcactattcttggactcttaggacaaaacctcccttgtgttctgtctagttcacaccgtattctagtggatacagatgtcgacacagacgatttattcgctatactctacctcctgaaactcaacaaatcagaatttgatctagtcgtaagctcactactactttttctacaatccacactctaattcttcaactttgttttaatgctctgtttttgaaacaggggattacactgagtgcaaatgcatggacaaacgcaggacacgccgtgaatcaagtgtatgatttattgcacatgatggatcgtgacgatatccccgttggtgtcggcggcgaaggtgggattagcgacgacggtactattcactctgacgtcggtggttattttcccatcatcgaacaggtttcttcttatatattcttcttatttgttttcttgaataagttttgatattagtttggttttgaaaatgtaaaaaaaaattggtgtgcttaggggatgacaacaacaggggaatgtagatacagacaagccattcctaaaggtcttggaggccttctcgacatagactccaattatggattccgtaaacagtttcttcctcaggtatttattaaattttgacttatgtatacgtaaaacagaaaattttgacttatcgtagtaacaactatatacttactataatcgcgtcggttatctaaagcagtataatagcttcattttatatcatatagatcgcatgatcccatcgcaccaactaagctacttttaattgcaaccaccatttagaatcctttatactttgtggagggttttgtgtagacagacacttgtgttggtatctcttcggctccacgtgtcgtgagaaattagaatcattgtaatggtgggattccaattgaagtagctgactttgtacatccaaacacttgtcggcaacttataagattccgatatatagtagtgagacatataattggagctttaggattggtcttgtcgtgatattccatatacaaaaaacataaaattaataattggattctctgaacatctttatctagcctttatccagtttttatttttgtttttaaaataaaatcacaatttcttaaaacttttcaaataatttgaacgtgtaa

SEQ ID NO: 7845 - DNA, 2330 bp, Arabidopsis thaliana landsberg
aatctatttttcggttgtcatttaataattagattttgtaaaccaatgtagatcttacattaagttgaaaaacgcaaagtgtttaggatgagtaagcaaagcaaactcatgttacaagtctaataattgttctatggcatggcaaaggcttacatttttttctacattattaaacttggcgtgtaaaacgttgtgggtccaccgtatatgttgaaatcataatgtcacataaaaattatacagcttctcacattggacattaagtaattattaaagtagaggatacagaaactgatgcaatcaattgtttacataaaatataatgatgcatggactagttttaaatctaatcacatgccatgtttttaggtttgtaataggtacaagacacacatttaaccaaactttatgtttgagatctaagataagacattgatctaaaatttgtatatatatgtgtgtacttttctttactacctatagatggtattactattactttgatggttcgagtttttttattaagtaaaagtttctatatagacacactttaatgttcttgttgagaccataacccacacgtctttagataggagaccgatggtacgagaacaccatttgcgtttgtttcatgagttatggccctccttaattcactcgcacttccaaactttagagtttcatttgtcttttgtaaactttttgggaaatctccagtcatttttttcacttttttttattattcaacaaatattacagtacaaaacttaatatagctagtcatcttactaaggtcatcccaaaggttttaagcaatcactaacaaaattaggcaacccttacaaattgtgaatcacatgtgctctagctagttttgtacataaacacaaatacatacaaactatacaagtaacttaccatccctagtaaataatatatttttttctaaattcggaagttacgtccattttcccttcccattttatatagttttaccttacttactccatactatattttatattttattttcgttttccatgccaaaaagtaactctcatttctaaatgcgacattctaactttatgtatgtatatacgtgtatgtaaagacacaaacacatataacaaacccttctcaacctctcacttctccaagaagttttctctacatccacaaaagaaaaaaagtttcccaaaaaacaaaaacatacacaagtttagatatggatcttgaattactacaagatttgtccaaattcaatttcccaacacccatcaagatccgatccaaaacctcaaaaacaaagaaggacgaaggtgatgacgacgaagatgacctccgctgcagcacacccacatcccaagaacacaagattcccgccgtcgtagactctccacctcctccgccgagaaaaccccggccaccaccgtcagcaccgtcggctacggcggctctgatgatcagatcgtgcaagaggaagcttttagtgtcgacttgtgagataatcatgaatcgggaagagattgaccgtttcttctcctccgtctacaatgagacgtcgactacggctaaacggcggagaagttacccttattgttctcgaagatgaggcttaattcaatatttacatttttttacagttttactggaaatattgtgaaattaattatctgttggtgttcggttttaaatatttttaatttaattatgaatatggatggataattttctgcaaccgcgcatattaatttcgcatggaggggtcgatgttgtaaattgagtaataaatgaaatttaattccaattgccaagttttctatacaataatgtgatatttatgtcatttataagagacaagatcgttttatcatccaacttcatggaaaaaatagtttcaaaacatatattgtcgacttctaaagttgaagaacgcgtttacctactatgaccgatatgatgtaaaatatccgcagccaatatgaaggatcaaaatatctcctggtaaaaaaaaaaattgtgttatatatgacgcatgcatgtatatgaaatctttgaacaaacttttgtatatatgtcgcctgataaaaagttatttatcaatatattaaattacagtgatgttagctagtgatcaagcattgcttgcttcatgagcaatgggtggtacatgttcttttaaatataaaatcattgcatttatgtgagaatatgatggcaatcaaatcaaaagataactattactcgtatagtctcaaacaatataatgtcatagagtttattttttaatatacaagtcgatatttgtacatttaacgtttaatatgtta

SEQ ID NO: 7846 - DNA, 1546 bp, Arabidopsis thaliana landsberg
gtcatagctgaatagcgtgagaaacatacaaacaagttaacaaaccaagaaaagattttaaacctaattaagtaacaagaaactagaaacacccacctctggagccatccatctgtatgtaccagcctcaaaggtcatgaaacctttagtctcctctctagcaagtccaaagtcagccaactttacatgtttctgatcacctgttaagagcatattacctgcacaaaaaccaatcttcttcaattcacaaatcttgattcctcttttcgtgatgtctcagtttaacttacttggtttcaaatctcggtgaataatgccatttgcattcaagaactccattccccgagcaatatccaacgcaaagctaatggagagcttcagatcaagaggctttggacgaacactcaacataaacttctgaagagtattgccttccatgagttcagtaattatcatcaactttggttctatgcacgccccaatgaactgtcatcaaaaggatcccattagggatattataccatcgacgaccaacgagataaggctgctaacatatgaaaacaaacaaaacatcaaaggctccaatattacccgcacaatgttttcatgtctaaacttggaaagcagcaaaacctctctctgaaacttcttcctctgctcaatgcttaaagcagatgttcttttaggctggaatatcttcacagacacagggacaactctcctgaacctataatcatggataaagaaatgttctttaacccatatccaaattccaaaaatcagtaacaagtatgccacaatacaaagattactcattcaaacacccacatcagaatcttccttcttattgtaattcatggtttctctgtaacattaatccttttttgaggcattgtgtaggaaacactagagctgagactacataaacctaagagtgacaaaacctaacactaaccagcatgaaagattccaaatttcaaggttaaacccaaaattaaatcaccaatataccctgaaacctatactcttcgaataaataccgaaatcaagaaaggataaacaggaaaacaaaatctgcaatttttgcaccaaacccagaagcaatttcgaagtaggagattgagaaacgagaaacccacaatcctctgtagacagtagatgatgaaccttcgccgatgaagtcccctatagatatgtctttgacatcgacaagcaactctgtgttgatagtgaaagcgaattgatcgttggaggagtcggagtcgtcgtcttcgtcgtccgattcaaaggacttgagaccatgagaggacatgagaaatgggtaattcggatgaagcgtcttatccgtcggataatctgttggtttctgcattgacggagctcgttgatacccgcgaggtctcatttctggagtgagcgatgaagacgacgctgagtaaaaagtgtgacgctctatatttatacacccgaaatgtttggggtgtttctgttaactctataaaataagagggcttttctgaaaaagtaatatttttcaaaaagggct

SEQ ID NO: 7847 - DNA, 535 bp, Arabidopsis thaliana landsberg
aagcgcaaccaccttaatgtcacgtcgacccgttttcattaagctggcattgtaaaagcaatccacgcaaatattttcctgccacaaacgaaaaaacacaaattagattaaaccctccttatcaatagtatgtgaactattagcaataaatatttgattaaaagttctaaacaatacatacaacaatcatatatctcttttcaagaaaaccacggattaagtgctcagcgggggcggtggttgcgaaagaggaggcggcaattgaggcggcagagacagaggaggcgaagatgtcggagatataggaggcagagacgatggagacggcgctggtgatggcaaaacaaaggttctatatctcaaaatacatttaggagtaaaaatcagagccgaacttggtacaccgcaacaagttgaaactgttgcatacgcaaatctgaggcaaatggtacagtttgatggatcaagatcaggactacactgaatcattgacactaaatcatatgaaccctctaactgagtcacacgttcttga

SEQ ID NO: 7848 - DNA, 1262 bp, Arabidopsis thaliana landsberg
aaagcccttcttaaaattttacctgccaccatacagattcaacatttctagagttaatccagaattcgactttctctaatgcagcagtgaaggtttgtgattcctgccaatcttcgaaaacctgcttaaaaccatttgactgcttagtccattggttcttcttccttcttaccttccctaaaacattatgttcactcccatttgatgcagaggtctctgtgaaatgactaggaacactagttttaccaaaagcctgcaaaatgatctctctgagagaaatgatgttcgataaccagaaggtcaacctgaaacataaggaaccaagaaaaagctgagaagatcaagatcttaaaggctactacacgcacaatgttaaactgtgtttttgttaccttgaaacatcatttccgcaagatttagcagctaaaatgagaccagacacagagtttctagcgacagttgctcgttttccttgactccaatgtttacaagcatgaatatagattcttgaaattcttcgagcaggtgtgtgaagcttgtgagctgagctagagtggtctggtacaaccgaatagagcgaaatctcgagcgctgcaacttctcttagctcttcttcaagtttctcaactcttgtctccaaagtctcaaccatttgcttcaacatttcttcatcctcctcaaaattctcatttttctctttgacatcacctgcctcgttctcacttccaccgcttagaccaccattcgaagcatcatcccaaacttcgactaccttatcaacattgacaccttcgcaagtttcaggagaagatacagaatctgtcttctcgtgagctatagcatctaattctttgctttcttccttctcctcctcatcttcatcatcacaagccaagccatttatagtctcttccttctcagttttctctgaagagtcattcactgcatgatcatcatcatcagagagctttgattgtgtagttgtatcatctactactactgagacattagattcctccttagtagctttgagtctttcttgctctgaagatcgtttagcaccatttgtcttctgtggcttttgatctcttttcccattcttcgtagagcgattcgactgtacactgttgttggttgttcttcccttcatcatcaaactcttttcagttttcctccattgcagccaaagcaacagttacttaacaactttcaagaaaagcctgaaaaaaagaacagctgtgatcaatagtctgaaacagaag

SEQ ID NO: 7849 - DNA, 1482 bp, Arabidopsis thaliana landsberg
agcttaaaataaatgcgtcattttatatattagctaagtctagtaatctgtttaggtctgtgttctttttcagtaaatgttgattttatatataattgtgtctgacctaaattgtattgcgtatgatggaaacgtgtatgatttgtagaaaagagagagaggaggagtgtctatatgtttttatttctttttgtcttggatccattaccatatctataggtctcagattctatgtttacaacctaaactgttttcattatctacgaaatatttacaatttagcaaaaaaaacaatgacaatctagtcatcaagaggactagatgatgactttcaaatcttttttttttggcaaagatgactttcaaatctatgcaaacaaaatcaaaatgtaaaaaatgagagagagaaaccaaaaataataatgagaaaatagtctattaagaaaagatgtacgtaagaattaagttaaaatgtaacactaaaataaaagaaaaaatcaaatgtatgataagaccctcatcaaaccattatattgaagtaaattatatatgtatgaaaatgaaatatcaaagagttctttgactctcacttatgacacgctaaattaaaaccactaaaaaccataatattaatttcacggctacaagttgatgcttcctcaaacttactacgttccaatgccgggcactgattaaatatggacttcacatctttttttttttttttagatattcatttccaaacggtctattgacagatgggctaagaatttcacgggttacaaaaaagtggtccaaatcggaacataatagaaacaagatcagtaaaacgacggttcaccggccggagacgcagccttcaccttctatatccgatgcaaatttaacatatttcgaacgaatctatgagatctatatgagaattttgcttcttgggttttatacggttcgggaaagtggatgtatcaagttgtgacaagaagcatcaaagaatatgactttgtccagtcatttttatggtatagtgatgatcgtcaatgatcataattggctaggaagaaagagcacatgtgcattcatatgattatcataattgtgcatatcatatgcttttatgggcatagttgtcgatagaaacaaaacatgcgtcgaggaaaaaacaaaagaatagttaaaacttagaatctttgattctcatgagccatgaggccatgtgctttttctctcccacgttatatgttttaccatccttataatttgctcccccgacttctttcactttcagacgaaaagaactgctgtcgcgatttttgaacaattatggaaaataatttagatgtgaaggaagccgtaaaaatagttattatactttttggccatatatatagaattcgtgatgattgtgttgtggatgacaaatggtggtagatagaaacctttactatcgccattgtatgggctattaatctagttggtactaat

SEQ ID NO: 7850 - DNA, 1108 bp, Arabidopsis thaliana landsberg
cgaaagacaaattaaacgtaggggtttagggagatacttgtccaccagtgtcaggtaagcctaaaacattggcttgcccgaaatatccatgtggagataagatcacaacgttgaaaaccattggtaccatcccaagaaacttctccaaggacgaaggatcaggagcttgaagaatatcagagagaagatgcatcatttcaagaactctccctgcggtatctccccatcctttctcaaaacccattccttgcaacgcgtattcgaattccgagaacggagtttcttgtgaaagcttagagatatgatcttctgctttactaagctggatttgaagcctagatatgctttgaatccgatcattcaacatcaacggctgcgaacaaagtgaaaaacttacaattttcagcagtttcataacatctttaattagcaactaaagaggttttataggaaacttacatgacctttgtacttatgaactctaaggaaatcaagcagaggctccaagcaatctttgttacggaacataacagaagacaagtgacgattcagaaactgaactccattaccaatcgaagacgaacgagaaggacgtggcacgtttgcgttaaagggctcgaaatcaagctcaagacaaaaagggtcactattaggtccatcaacgagttcttctttgaaacgaagatactcagagactgttaattgttcaacacttagctcgaagacattaacacgaacatattcccaaacaccaggtcttggtctaacggctaacgcaacaaaaggtggtacaactatagcttcctacaccaaaattaacaatctattattagtttcaagatgaattttgaagaagaggaaaagttttttttaccattgctgatttaaggatctctccaaaaggaccatcagagagactcttctttgtttcatcgtctccgataacagattcgagttcgtcaattaagttatgtggttgaagaatccctttcccctgatccacataccttcacaaaaccaataagaaactaaattaaaaagaaacgagctttgccgggagaaagaaacaggggaataaggatcttgacgacgaacctggagagaagag

SEQ ID NO: 7851 - DNA, 883 bp, Arabidopsis thaliana landsberg
ggaaggttcattttgagatttgagagaaaagaagacaacataagtaggatatgtttgtgcagtgattccagagagtttgtgtttggtactttgccttgtaagtctcgatttcttcggttattgggactttcttttataactttgttgataattttgtaaagaaagattcaattaagagagaagaactattatgtctcttttaatttaacttgcttagatcgaatcagaataccaaaatcatcagatgattgcaaaaacttgtaactgtgtgtttatatgaaaattgttccaaaaatctcaacaaaaacaaaaaaaaaaaacctcaaaggagtgatcagttggtcttaggatcaggcatggggaacaaaccaccagcaccagcagctcctcgcggcggagaaaaccctagaaatttctgtagattggttctgatactaattgaacacagcagatagagaaaagccatggaacaatccgtcggatcatcacctttcagtcccctgtgactcatcttcttcactatcgtgatcggatggaaaggaagcttcgcgacgactttaccttcgaatagtgaattgagcaatccgaagacgacgaagagaaccagtgccacaacggcgccggatttgaacttgaagagtgacagatctcggctcgattcctttaagctggtttcaacgcgatcgatcttcttcgtctttgatttctttatggatagctttgacgatggattctctgtcttcattgtctcgagtttcttcgtggccttgtcaatggagtatttcaaggatttgtatgagctggtacggtagattaagatccatgagatggcttcgcagaccaacgcggtgcagaaggagattcctacgaccgttaagctatc

SEQ ID NO: 7852 - DNA, 1914 bp, Arabidopsis thaliana landsberg
attgttgttcttactgcaggctaagctatttgcactcagagaagattgtccaccgcgatgtgaaaacagagaacatgcttttggatgctcagaagaatttgaaaatagcggattttggagtagcacgagtggaagctcttaatccaaaagacatgacaggagaagccggtactcttggatacatggctcctgaggtaaaactaaaaccctttttttgttctctctgttttcaaaactgaatcgaattaaacttagtgttgggtttaggtcattgatggtaagccatacaacagaaggtgcgatgtttacagctttgggatatgtttatgggaaatctactgctgcgatatgccttatcctgatcttagcttcgtcgatgtttcttccgcggttgtcttacatgtaagttttgacctaaaaaaaccctagctagttttccttgatacttacgtaatgtcgaattctgaaactttttttctatgattttaaaaaagaatctgagaccggagataccgagatgctgtccgactgcattggcgggcataatgaagacatgttgggatgggaatccgcagaaacggccggaaatgaaggaggtggtgaaaatgcttgaaggtgttgataccagtaaaggtggcggaatgataccggaagatcaaagtcggggctgtttctgctttgctcctgctcgtggaccttaaatttccctttctacctctgtttggttttattgtcttgtttttgtcgacatttaactgaatgccccttttgcttcttctccaagaaacttctcttaacaagatttgttaaataaattattttgatcattgtgaatctagtcattgtgtttttttgttttataatgattaggaggttcttgacccgtggatctgaacattagtccgcacgacggtagacaaatcatgtattttttttttttttttagagagcaaacttttaccgacacgaatcgaacatgtgagattcaaggtctctacgttgttcacaaactaaatactgtatcgtaaatctaaagtcgtgtgggtttgtaagaaacggttaaaaacacttgtaaaattttgacttcaaagttcaccctcaaccagaaatactagagcaactcatcattggtttctcaagttctttaaaaaaaatattgctttaattatagtaaaaattgtgcttctaaaaatggaagccgattctaccgatcattttgacttggctcatccttattttctcaaacttatcggaaaagttatgttgttgtggttattgtatatatactaccagtgtttacaagtaacaacaataaaatatatttgttacgagaagttgacaaaaaaaaaaatttggccaaataatagagagaatatttatcaatattgaagcatgaggtgtactactttgattatggtttcttttgttgtcagctgtttgcttctaagccttgttgaaggtagtatattaatttcttttattggttgtttcaaataacaaaaagtagtgttgcaaaacgagaaagcagctcaagaatatgacgtaacttaaaactatggtattactaattgcttatatctttataacctaaatatatattttgattgataaaaaattagaatcggaagctggagcacctcccgtagagtgttggagtgagatcctattttctggaaaatgcgggtttcatggaaagaagaaatgctacaaagaaatggaatctaagctaaaacaacgtgttcttaaatgtagatgtgaggatgttaaaaaagattccaatacatctaacgacgaacattactgcggatgtcaaagagaaaatccctatgagtgtaactaaaatcttttaaaaatttcagctatcaatacgcaaatttgtttactaattaagaaataacaaaataaaaactacgt

SEQ ID NO: 7853 - DNA, 1337 bp, Arabidopsis thaliana landsberg
caagcgtccataagctaaatttctcacaaaaactgacattgtatttgtcacacaatacctcagtttaacttacatagccaaattaggctactttggactcttggactttggccttggtgctttatccatggtggatgtgcgcaaaactcctatcagaaaatatgttcattgctacattagtcatgcactacaataataacccgacgatgataatcaaaataagtaaattaagcgaactacttcatttcagatatgattacatttcaattaaggtattgtcaaccaaatgaactcatttcagccattaattgattcgttcttttcgagtcgcactagctttgaatctgccgttaagtaaatttcaagcctagttaatatgttattgatggcccaatagttgaatctaacggacgtagtctggcccaaataaagggattggggctaacaatgtggtcttaaaaatattcgcggcaaagtttgaatttaatcaaaaatataaggaccgaattcaaaacaaaatataaaaacagagagagactgagaaagagagagagagaaaaaaagaaagacagagagtttgggggagaaaacaccccttcggagaggagcaaagcctctcctggggaagaagaagaagaagaagaagaagaagaacacgactttttgcttcttctttttaatccagattttctaaaggtcttcgtaaattttgcgtctgattatcaaattaggttttttttgttgtttccattagttgtctcattgtctgtgaagagaaaggaacagaggaaaatgtcagacctagacaagcaaatagagcagcttaaacgctgcgaggctttgaaggaatcagaagtgaaggctctttgtcttaaagctatggagattctagttgaagagagcaatgttcaaagagtcgatgctcctgtcactgtaagttcttttcctcgattcaagtttcagattttatctctgcctatctttgaagattgagttttggagagaacccatgaaagtcaaagcttgtgagttgaggaatctgacgaaaattgaatttggggttgttgaattttgtgcataattgtgactctgaactgttgtacttagattggattccgaatttagaaatgatatggtttaaattagggttttgtggatgcattgtttgatattggcttttgaatttgtgtatgatttttgggtcctatgtttacaagtctgaagatttcatggagaatgtcttgctagttgattatccttagattttgctctgttttatggatttagatatgtggcgacattcatggacagttctatgacatgaaagagcttttcaa

SEQ ID NO: 7854 - DNA, 2100 bp, Arabidopsis thaliana landsberg
aagaaactcagaaagggactagaaggtcgtaaaagtacaaaacacaagacaaactaagctcgctcaaacgtaattcatacataaaagaaaaataacacacacacaaacacacatctaaacgcaaattcaaagacacaattcacactacaatacatcagcacaatcacaaaaaggatcacttcacaatcatttacatatcatgccaagaatttactttcgaactcgttgttttctattaattttgaagcacctatatttatctactcattttgcaataatcagctgttttgaattctaattccagtatatgtaacatactaacatcgactgattcaactttttgttattcattatgttcaactactggcaaagacaaattcaagcagacaacatattatgcaaggtacatgtggtttataaaacgttattttaatctgagacgtggatttttgttaactttacaaccattttttttagaaaaaggcaattacttgagttaaaacaggatgaaacagagtctctctatcaattataaattcctgcaaaactcagtcttggatgaattactcggtcaaatgataagtgataaatttattcacacaaaactatagtctatgtagaaaacttcaatttgcttgtaagacacgaaatatatgatgacttcaacgacctaacaaaagtcaagattacattcgttgatcataagcgccaaaacaaacggtagaagacggattaatgtatcgtacatgaggtttgatatattgtgcaatggacaactattcttttatccggcagtcggaactcgagatcgcttcaaaagtcaaccttctctccaaacgaatccgctctcaagaacaaggtaaggatttaaccgttggttcagcagaatattttttttaatggtaacttggaatttgtagtgtaaagagagattttctttataatttctcttatcacactattttcttcatggaaaaatagaagtctaaaggaccagttataatattgtgtgattctactatctgctttttgtattcggatttagattatccatcgtttgatttgagtttcttatgacgaatcatgacatagtagtagtagcactaatcaagctgatataaaggataaagtaaattgattcatattcaatggtggttatatagactcaaaataaaaccagtaacaaaatgatttgatgattatatatgtgcactgtctatgatggtcattcgccaagtaattcgaaagacgctgatattaatattaggatctttaacagaagttgctgtagatttttctcatatgacattggaggatgagctcagtgaggaagaggatcataaagattcaagtagagaggcttttggttcgagtcttgagaatcataaactgtcgaggaagcaaagaacgcatattcgggcgataaacgtgaagagaaaaagagactttgtttgcttggagaaagttaatggagagcttgttaacatactagagggactcgaattgcataccgaagtttttaatgcagcggaacagaaaaggatagttgataaagtgtgtgaattgcaagaaaaggttcaaaaaggagaactaagtaagtagcagctaagattccttgttctttcttctatatagttttgatctgaaatcctaatttgtttatctctctatgtagagcgtgcttttactgctcaaggcaaaggacgttcaactattcaattcggctgttgtttcaactaccgtacagtaagtaaaactagttcttgatcaatcttcttctcgatttatgagttctagtgagtgccacaacgactgaatgagtaaacttgtagagcaaaactggaaacctggcggggattcttaaacatgaaactgttgatccattgcctcatcttttcaaggtgatcataagaaggttggttaaatggcatgttctgcctccaacttgtgttcctgattgttgtgtagtcaatatttatgatgaaggtgattgcatacctcctcatatcgaccatcacgacttcctccgcccgttctgtactgtttctttccttagtgaatgcaatattctcttcggatcaaaccttaaagttgaggaaa

SEQ ID NO: 7855 - DNA, 1470 bp, Arabidopsis thaliana landsberg
catcgcaaaggaatccatattatcaacactctaccgtaaccagaaaacttgttatacttatttttgggtaaaagactataaaatttagatttccaagcaatctacgagcaaatttttaacggattaaatttgagatggccatatgggtaaccaatatataaattggtaacttaaattgaccaaaatcttaaatattagttacccaaacagccatctgaaatgaatccatgcatatgatcaactctctaatgtaacaagacaagtttatccactctaacgatagatagatccacaacgtcatcaacataattaacgaaagatagacgtcgatatctatctactgtgaaaccaaacatgagtattatgaatcaaaaagatccattaatgttaattcatactcatgtttgacttcacaacagagagatttcgacatctacctttatccatcggcgactcacttttgtttttctaaaccctaattttctgtctgggtctctctgtctttggcgtatttatagtacaaaaaaaattgttgcccaagaaaaaaaaaaaaatgaaaaacaaaccttctgaatccgacagaggctttaatctgttaccgttaaagtgttgtatgattccgttagaatctgcaactccgttaatattttttccgttttctttcagggaagagaaaaaaaaaacacagacctctcttttctctcttcatgttttcatcgatagtggaagagatcaagtgaaagaaaaacactcagatctggaaattcagcttcttagatctatgaattttcaaattcgttgatccatttttccgcttcaatcgtctccgatctgatttcatcagcttcgtaccgctccggtcatgaatccattctcttccggcacgcgtctcaggttaggaatcactttactccgatctccaactagtaatctgctttttctctattgcgactttgcgatacttccattttcgtgcgttttctagtgtctaaatccataatgtagcttgattcttctagtaatcggcaaattcaatcggaaattgacgattatcagaaaaatgttttggctgattgtgtgagattaggcatgttgtatgatagaatcctcttagcatttttgatgaagcttcgattctttataaattgaaatatgtaaatgtaaatgaattcatcattttaatgacaatttgtgttgcagcgacatgatccgagctatacgtgcgagtaaaaccgctgctgaggaacgtgctgttgtgaggaaagaatgtgctgcgatccgtgcttcgattaatgaaaatgaccaggactatagacatcgggatctagcgaagcttatgttcattcatatgcttggttaccctactcattttgggcaaatggaatgcttgaagttaattgcttctcctggatttcctgagaagaggattggttatcttggattaatgttgcttcttgatgaaaggcaaga

SEQ ID NO: 7856 - DNA, 2526 bp, Arabidopsis thaliana landsberg
ccaaaagagtttccatttaattaataaaaagtcttccttataaacaaaaaatcaaaaaggttggtttcataaataaacgctagaatatatattgagaaaaatggtacatgttgaaatgtcttcgtgatgtgttaaatatgtcacataactgctaaaattatgccacaaaactatttgtcaaagaacttgtacaacctttgtgagcagaacaaaccggtatattaaattttgaaacataagcaagagtgcaagccatttaaaaaattattcgacgtttatctttctcttttcttcgacgtttctcttctcaattctcatcgcgttccatggaattcgattccgatttccttgttttgttactcaatttaaacatgatttcgtttctccgagtgtttggttatgtcggattcttcatctccagaatcactgttatccatcggagaatcgattttaccccaatagaagaacggcgaatctgcatcggaggacaatcaatgaattagggttcttaatttttcattagttttttttccatgaagagataccagcattggactttgcagaaaaactaaaaagaaatacttagattctcatctcaaaaaatggaaaatttattcataaacaattgagagaaccatgttgggtatctctccatcggagatggtctaagtaaaccaagaataatttaaacaaaacccaaaaatagacaatattattgtgaactgaaccggttctcttccgttggtcaaatcgtgacccatcaacaatattaattaacagatccaactatagtatatgtcctagttataagaatcgattattcaacaagttgttaaaatggaaactgttgggctacgtttcgcggctcgatgggtgtattgggtgctaaggctcaacttattggtacggcccaatatcacttggaaaagcccaacgaaaaagttgtggtttcgtatgttgtctcttgtcttctagtgcatgtgcaatccttgtctgtgttccggccggttattgagcagatatttgatgcggtcgacaatctgagttaaaaggacgaatcttttgataatttacctttaacaatctcgaggtttacgtaagtgtaaggccagtttggtgtaacggtattcgagataagtgaaaaataactaaaaaaatgttttaaatctcgatgtgtttattagctaggggtttcttgttttagtcttccattttcgtttcgaaagggttttatttattgatcttctgatggactgatactacatgaatatatcatcatacaacaaaagaaatatattattactaatgcttattaggaaaggccttgaacaacattttggcattgtttatttcctggcgcaacttagagaaccgggtatgaagtgattttcttacggcatccgagatccggcccctggcagatatctttcccggatccgcgaacgggctggagcaagtgttctcgacgctatgactctcacccgaaatggcacacacttcagcattctttacgtgaaacaagcagtcggtccaactgttacaattcaccacctcttggagtgcttggacagaacactcgcaatctgtactgaacgtatcggtcgatggtgcgcagtcctgaaggatttggaactggctcttcctcaggtgtgagatgaagagcttcgtggacagcgcttggttcagactcacggtgatagctgcatccaagaggtgtcgagggcttgttttgatcgtattggcgtaaaccgagagagtttcaacgcacagggattggtatgttgtggatttgcatgaggattgaataaagtttagtgcttttgtggtagttccggccgggttgactgtggcggtcgtgagcaccgacgagaagaggtagaagacggagaagagtagaaagagagcttggtattgttttgccattgctgtttttcttgaggttgagagaattaaggtgtgaataggaaagagttagggttcatatatttatagtactactggcgtctggcgtgcactattacttgatacttgctagttgatattataatcaccaatattcaatttgatattttggttatttgtttcatatagaaaacacgcatcttccactcactttcgtttcaaatcttaagtttaaatatccataatatttgtaaattgtattcacgtaaccagaccagatccgatcggattgttacacacagacacacatagataactgttttgttgacagccaattgcagaaaattttgtaactaccgaaaataatatatataaatgactcataactatttgtggataagtagttgactgagataaactcatttatcgatattggatctcaatgcagtagtctttaacttatcttaatatacacgactctcatcttttaacagaaaatggcatcccatcccttatatgatttattatttttagtgaaaataaatctttataattattttgataatagttacctttgatatatccacatccttcactgccttttaatgtctcaattataaactt

SEQ ID NO: 7857 - DNA, 943 bp, Arabidopsis thaliana landsberg
tttcactaagtcaactacatgttcatatattattttgatgagtcattttctatattagttttggtaaaacaattaacaaaaaaaaaaaaaaagtatataaacatttataagggaaaataattataaattggctgtcaacaaaatgtatatctgcatgtgttgggtgtaacaatccgatcggatctggttacgagatagtaatttacaaataccatggatatataaaattaagacttggaacgaaagtgagtggaagatacgtgatttttatttgaaacaaataaccaaaatatcaaattaatcatggtgattactgattagtatcaatatcaagtaatagtgcactctaaaaaggtagcccgtactataaatatttgaaccccaactcttttctattcacacttaattatttcaacctcaagaaaaaacaacaatcatgacaaaacaatgtcaagctctctttctactcctctccgtctcctacctcttctcctcagacctcacggctgccaccgtcaccgcggccggaacttctacaaaagcactaaacttcattcaatcttcttgcaaagttacaacgtaccaatccctgtgcgtggacacgctctcggtctacgcaaatacgatccaaacaagccctcgacgcctcgtggatgcagctatcgccgtgagtctgaaacaagcgctgtccacgaagctcttcatctcacacctgaggaagagccagttccaaacccttgcagactgccgaccaacaaccgaaacatacactacagatgcgcagtgttctgtcgaagaactccaagaggtggtgaattgtaacagttggaccgaatgcttgtttcacacaaacaatgctgaagtctgtgccattgcgggtgagtatatggtcgagaattcttgctccagccccgtcgcggatccggtaagatgtcagtccggg

SEQ ID NO: 7858 - DNA, 1885 bp, Arabidopsis thaliana landsberg
aaacttattatccttcaactttaactctttcctcactaattcaaattattgaggtatataaatagatatacgcattaaatagcctaactttagtttcttatctacaaaaccaatggagggaaaattataaataaattaattaattatcttatgttatcaaaaaaaaaaaacagaatagatttcgtgttattttaacaaatatcatgttaatttatctaatctcatgttattccatatactgtaatatcaatgctatttatttagacaagtgataagatgtggaagtgtacgtatgtgctgtcctctgaataatttggcaatgttacatggccttcttttgtcaaattattactcgagcctttgtagtatcgagcccaactgtctttagagccggtatatgtccagtataccatcaatcttactgttataaatccaacttcttttttcccagaaacttgagcattcacaaaaaaagacttgcttattttgttaaactttcttcatttttcaaattacaattcattacataatttttttaaaacatacaaagtacaaacatatatataaatggaggaactgcaaactggagataaattatttcaaaaaaaaattgaaccaaagaggtaagaacttgctcagaagtttttagaatgtggaagaacacaaattagacccgccggtagttctcagctccgaacacggccaaggactgaccttcagtgaagttccactgacatccgaacatttccacgtcttatacgaattcaagcttccatgtagattaatctcactcaaacatatacccgtaaatggtgagcccttaagaccttgaatagagccagcgtttcgaacgttaactccccaaacgttcttgatatgtattcccttaacaactggaagagcgttcgggttataattctcgtccggatgatctcccgtgtcgccggcgatcttgatcccatactttgcggtgtctacatagacgtctgatattttgatgtttttaatgtatcctccacgaccaatgtttgtcttgatgttgactccaactcccatattggagagagtgatatgttctgctataatgttcttgattcctcctgatgtttcgcttcctattgcgatacctgcgaacggggaagatcctgtgatgcggcggattgttatgtttgagcttggacggccataggcgattccgtactggtcccaaccgcttttgatggccactaggtcgtctcctgttgagatgtaggagtcttctatgcagacgttgtagctggaatctatcaacaaattcattttgttcagatgttaataaacagctttgattattatgcacacaaaaacatttccaagttcatatctagacatgtttgatcacagcaaccaatctagtagtctactgtggattggaaaaagagttaagagtaagatgaacctggatcgattccatcggtgttgggagaatcttgtggagctaagatcgtaacgtgatggatgacaacgttgctgccacggatcaaaacaagtaacaaagtcaataccataagaagaggaagatatattatatctacgtttgggagatctaaagggtattaactagtgttatatacctgcaatacacaggatgaatgttccagaaaggtgaattttggaaaataacattggagattatgatctccttagagtccttgaactcgattaagttcggtcttgtgtactttagcgttctactacgccacatgttccaccacacttctccttgaccgtctattgtcccattttgtcctgtgtacatagtgttgcaatttaatgtcaaaacagtgctgcaacaagaagaatatttcttgtaacaaaatatctattttgaactgtatcatctaac

SEQ ID NO: 7859 - DNA, 569 bp, Arabidopsis thaliana landsberg
  unsure (1)..(569): unsure at all n locations
aagcatanntttgctcgtgcaacactaannaccttaaatcttaatttcttaaacataaatcctacaccctaaacgcggacccccaaaccctaaaacctaaaccgtaaaccttaaatcctaaatcctaaaccctaaaccctaaaccctaaaccctaaacactaaactataaactttaaactttaaaacctaaatcctatatcctaaaccctaaaccctaaacccaaaactccaaacctaaaccctaaatcctaaaccttaaaccctaaaccctaaaccctaaatcctaaacccttaccctaaacccaaaacactaaactatagaccctaaactttaaaacctaaattctactttagcttccggaatccagttgcagttctagttcttatactcaatcatacacatgacatctagtcatgtttgacacaaaatcccaaaccatgcttctacttcgttcacaaagatttgaccatgtaatagaaatccatatgatnntttgttttccgattttccaacaagggaagaacactttagctncaatgatctggctgtgctttcagttctaatact

SEQ ID NO: 7860 - DNA, 1949 bp, Arabidopsis thaliana landsberg
  unsure (1)..(1949): unsure at all n locations
ttgttacacgaaaccctaaatcttcagttaagttctgcaacttttggcgttcctgatgatgatcgtctcatagaagaaacggagatggttgtattcgatgatcagatcttggcgatttttgagagtaacgacaaacctacaggaaacttggaagatcaagagatagatcttgatcaattcctagattttgatcaactcatagatttcgagggtttgatcgatggcgattactagagcactcaannnnnnnnnnnnnnnnnnnnnnnnnnnnnnnnnnnnnnttcgaagatggaagatgtctcgatggtgatgaaaaatccaaatctgtggtctgattcacagaggtttagatgaaagatgatccttttcaatgagttaccacaccattgatgcagtttgaagatagctcagcaactaattttcttatatgcttttgtatgtattagtattatatcaatatgtaactctgtcggtattgaccaattgaaattaatagaatgtaattggttctgtcaactttgtttacaaatatttcttgtcgatccagtttaacacgaaacaaccccaacgaatctgaggttaacctaaaagcaaaaaagtatctaaagacttttaacttttggtgccttgtttgggttacatgtatggctcatctgaccctgtaagagagatgggaccaaatgaaccattgccttccaaagttgcaagaacataatagtcgtttcttctcttgtgtggtctctctttaaaccgcacagccaacacctgaaaccgcacaacaactccaacagcaatctttgagaggtcgtctttctgaaaatgcggtttctcgtcctccgacaatggtgagtggacataatgataatgtggcattttcaagagtgagaggtatgcgtatctgagtggtcctgacctgataaaagctccgttccacaacactttttttacagtcccttgcaagatatctcctcttgcaggcaagaatgtgcggcatgtgaaggacaccgggaatgtgaggatttttgcttgatgattgttttcgttgtcgatgttgttgttcttgttgttaccgatgctttttagagcggtgatgccgagatagaatccgtgttccctgcacgctttctcgtgtattaaatcttggagtagtctgcatagaattggttggtgcggcgattggccattcaagtgtttggcacatatagccacgtctcgagccatttctacttctgaaaacattcgtgtttatctgttacctgaaaaaaacacaggagattctaagttgaaggatgaatcataaaatccgcaaccagaaatgataaccatcaagccttaataaagattataaagcagtataaacgcaggtcataggtcataggtcataggtcatagagaaaacataacgtttaaagcaacgaagcagatataaaatgttttgacggctaaatagattgaagttatatagcattgaaccttatatggtacctgcataagaagaacttagttactgatcagcccactcaattctacatcagagaaaaggaatcaaccaagagacaaaattaagagcaaagtactcaaaactgaaactgctaattttacatcaaacaaacaaaaaaggtactgaaactgcagtaacaagactagaggtcaataatttctgagaaaatcacacaacctgaagtgatctcaacaagatacaagaagatatatgttgcacttctcaaagaaaatcacattaagcttccagagatatgggcattgatccacgattcagacaagaactagctacataaacatatgtaactgtctcagacaagaactagcaacataaacatatgtaactgtctgatctccaaaaacttaaaagaaatatctttttgattagacaaacgaccatttgaaaaatcactaaaccagtaaatgaaacacacactttatgttaatta

SEQ ID NO: 7861 - DNA, 1671 bp, Arabidopsis thaliana landsberg
ttttgtttaatttgcacaataagggaattctctgttccgagaatgtaggaataaataacccttacccatctcgacactaacatacgttgtacaaaaaccaaagaagacgcatactacgttatatcgagagggatatcgatatctccaccgtgacgaactcgtcgtgttggcgatggtgtggtaacttctcgtcttctgttcaccgcctctgttttgttgaaaccctagagatcatcacgtcgtatacatagtgtaaggtttagttgacttaattgggcttactaataaaaataagcccaagtttgttttatagcaacagaagaattatcattggttttgacaaattcaattgtcttctgttaagcgttatcattgtgacaaaagaagaacatatggttgttttataaatgacaaagcattgatctagagaatagctcccattacataaggaatttttatttgtggaactaaaaacattaggattgctcaaacattggttgttgttctacagaggaggcaaccatgtgatgataaccgggctacgaactttatgtgtagtgctcttccacactagaccaccaaactcaggcctcttcatccggaaccttgtcctgaaagtaaccgtgtaggaaagcttctggtgcttcgaagtgaagttgagtgttttgggctggacagttacggatgcgcctttgaatggcgagacagaaaccttgtagcttgaaatgtgaggaccaacattggtcactgttcttctaagtgtcatagctttaacatgtgtgttctctgggaacaaagctgatatcgccgggtagttcaagtttcccggattcttggcaagagtgtgtttgcaggttctgtttgaatgttttgtgaataccttaagctgtgatggacttaaatcttgagtgcagaggaattcaaaatactcttgaggtccaatgtcgtagaccaaaccaggatctgtagctcttaaaggatctatatgtcctgcaccgtgatcataaggcgatgaaggagctgctcctgatgcatccgtaagaggcttaaacatgttgtcatgaacataagcagttgtcatgagagctgatttgattgctgcaggactccaatctggatgccttgatttgatcaaagcagctacaccacttacatgaggacatgacattgaagttccagacagtatattgaacttaaccctccttggatcagatgataaactcgatggtgccatgtctccagtccaagctgcaagaatattcactcctggagccaacaagtctggtttcaagatctccaaagacagaaaatttggtcctcttgaagagaacgctgctacaactggtgaaggtttgataccaattcttgttccaagaatctctaaactcgctgtcgcttttttactcgtcatcgcgtactgtttgattagtttaccttctttctctccaactgcaacagctggaagcatatgagaatctgcaacaagctcttcaccatttgttgcagtgttagttaaaaccatcccaattccaccagctcttttcacaacctgacccttttgcacacgtggagtaacaccgcggtcgcatatcacgatctttcccgctacatggcgccgatccaaagctccatctagtcagaacgaggttggatcaggactacttgcattcc

SEQ ID NO: 7862 - DNA, 1080 bp, Arabidopsis thaliana landsberg
  unsure (1)..(1080): unsure at all n locations
ccagtctcaatcccctcgaatttgacttgaaactgtcgaatcggttctgtgatccttcattaagctcatcaccgccattgtttctcgcttcttgtctccttctccgtctttccccatttctctcttcttaatttgtcacaattttaatctttcgcttcttattctccttatctccctcatttatgccggttccctgtttctaccggatgtattattgggcctcatttgcccattataatactacattactttattcggcccataataataatagctacatgtttttttaccgttgccaacaccatgttattcattttacaattttgtaaaaaaaatcgttagattgcttttgacacaaaagtataattacatttcttcccataattattatcattttctatgaaagttcaaacatatataaaataaaaaacaataatcttcatacatcttaaacgagatggttaatcatcatgataattattaatactcatcatgatcttcactacataacatatccaaaatatccttagcagaggatgaatccgacccgatgagccggtctagcttatcctcactccaccaacttgtcggttgtagcttacggcgacccttagatttatggcccgacttgatagccggcgacacatgacaattactgtacttggaccgctcactttctccgatgatatttgaatggttggtagtctttggttgcattttggtaaaatctccaaaaactggtggtgaatcgagtcggttggtgtgtccaggattaaagccccgcggatgaatcattcctgtccttacgannnnnnnnnnnnnnnnnnnnnnnnncatgtttacttatttagatttgagacttgatgaatagtcgaattaccattgtcttgtctatatgtaggaggagcataccaaatataagtttgggcacaagaaaatgagaatggtcaaacatgctcgtccaccaagacattaatattatattctttgcgtgccctgttttatgtcgggactcgtcattatctttactctattggcatatctgggctaatgctaattttttcctgaaagatgaaagcc

SEQ ID NO: 7863 - DNA, 773 bp, Arabidopsis thaliana landsberg
ttaggatttagagtttaatagtacttaaatcatataattttcatttacattttacatagaatccttaaagggtccggaaaattaggaagagcaaacgaaaatgttttcaaaaaagacttttctttcaatcctcagataatgccgacaaaaacaaaaggtagacaaagaatataatattaatatcttgctggacaagcatttttgactattctcattttcttgtaccccaaacatatttagtaagctccacaaatataaatataaacaagacatcggtaattcaacaagtctcaaatcaaaataagcaaacatgaagagtgaaggtcgtcaccaaggcatcgtaaggacgggaatgattcatccgcggggctttaatccgcgacccacctccaaccggctcgattcaccaccagcttttggagattttacaaaagttccatcaaagactaccaaccattcaaataccaccggagaaagcgagcggtccaagtacagtcattgtcacgtgtcgccagctatcaagtcgggccacaaatctaagggtcgccgtaagctacaacctacaagttggtggagtgaggataagctagaccggctcatcgggtcggactcgtcctctgctaaagatattttggatacattatgtggtgaagatcatgatgaacattgattaaatcattttgtttgagatgtatgatgattatagtttttttcttttatgttttgaactttgataaccaatgatattaattatgggaagaaatacttttttg

SEQ ID NO: 7864 - DNA, 1770 bp, Arabidopsis thaliana landsberg
aacccattgctgtcaaaacacatcacaaaataacccaacatatgaaagcccttcacaattagcccaatcattgtccacaccagcccaatcttcttcctcttcgccaagcccgacaacctcagcttcgtcatcttcaacatctccgactccaccatcaatcctgatacatccacctcctccgcttgctcaaattgttaacaacaacaaccaagctccgatcaatactcattccatgggcaccagggccaaagctggcatcattaaaccaaatctcaagtattctctagcagtttctttggccgctgaatcagaaccacgaacagctattcaagctctcaaagatgaacgatggagaaatgccatggggtccgaaataaatgcacaaattggtaaccatacatgggatcttgttccgcctccaccaagccatgtaacgattgttggctgccgttggatcttcaccaagaaatacaattccgatgggtctctaaatcgatacaaggcgcgtcttgtggctaaaggatacaatcagcgacctggacttgattatgtagagacattcagccctgtaatcaagtcaacttcaattcgaattgttctgggtgttgcggttgatcgctcatggcccatacgacagctagacgtcaacaacgccttccttcaagggacactcacagacgatgtctacatgtcacagcctccaggattcattgataaggatcgtcctaattatgtctgcaaattaaggaaagctctctatggtttgaaacaggctccacgtgcctggtatgttgagctacggaattatcttctcaccattggttttgttaattcggtttctgatacgtctctctttgttcttcaacggggaaaatcaattgtctacatgcttgtctatgttgatgacattctgatcaccggcaatgacccgaccttacttcacaacactcttgataacctatctcaacgtttttcagtcaaggatcatgaggaacttcactactttctgggaatcgaagcaaaacgggtgccaactggtttacatctaagtcaacgtcgctacattcttgatctgctggctcgtacgaatatgatcacggcaaaaccggtgacaaccccaatggctccctcaccaaaattgtcgctctattcgggtaccaaactaacagatcctacggagtacagaggcattgttggcagcctccaatatcttgcatttacccgtcctgacatatcttatgcggtcaaccgattgtcacagtttatgcatatgcctacagaagaacatttgcaagccttgaagcgtattcttcgatatttggctggtactccaaatcatggtatctttctcaagaaaggtaatactctatccttgcacgcatattctgatgctgactggacaggggacaaagatgattatgtttcaacaaatggctacattgtttatcttggtcaccatccaatctcttggtcatctaaaaagcaaaaaggggttgtacgctcatcaaccgaagctgagtacaggtcggtagctaatacttcttcagaaatgcaatggatatgttccttactcacagagcttggtattcgactcacacgtccaccagttatctactgcgataatgttggcgccacgtatctctgtgcaaatccggtgttccactctagaatgaagcacatcgcgatagattaccacttcatcagaaatcaggtacaatccggagctcttcgtgtggttcatgtctttacacacgaccaattagcggacac

SEQ ID NO: 7865 - DNA, 927 bp, Arabidopsis thaliana landsberg
gaataattccccacacatttattcctatgaattgtcagttactcttttatctgtaatttttgtcaaagcatgcgtcttttgtatgtaagtaactaattattgttcatttcagctaaaagacatggcagtaaaggcttcaggggcatacaaaaactgcaaaccgtgttctgggacaacaaaccggaatcagaatcgaaactatgctgattcggatgctgcttcagattctggaagattccattattcataccagagagctgggactgcaacctcaactcctaagatttgggggaatgaaatggagtcaaggttaaaagggatttctagtgaagaaggtacacctacgtctatgagtggtcgaacagaatccatagtgttcatggaggatgatgaggtcaaggaatgggttgctcaagtggagcctggtgttctcatcacatttgtgtcattgcctcagggagggaatgatcttaagagaattcggttcaggtaatcgtttcttgccaatattgaactgaatatatgttttgtgttttcccattgatctgcttttactgtcttgttacggcatgttaggttctgaatttggaaatagtggttctttttcttcttcttttaacactcatgagtagtacaattgttgatgatattatttgtgggactactgtactgagaacacttgtattgtttctgattcaattgaagtctagatgaccctgagctttaacaagtctttcgttggcaatggttttcatgctattgctgaaattaagaagcaccaggtttccatattaccgagaccagcttctgttgtggtgccgtcaaggatgggtattttggccccagaattggaatcaaaagctcttggggatttttttgtattctgcggatgctgagtttttttgtgttacacgttaaacctgtttc

SEQ ID NO: 7866 - DNA, 431 bp, Arabidopsis thaliana landsberg
caaattataaaatggaacgggttaataaagttttcatgatttaaattattacataagcaaactactgtatgtggtatttattgaagactataaaacaataaaagtgaaagtacacaatggctttccttacaaagctttatttgctaataaacagaagagtctgatggataacttgagaactcagcagagctggttagatcgcgaaatcggattagggtttcgaaatctctgaattgcaagagtaaaaatatctgagcttcgtccaaacgattccaaagagagtgaaagatatggttgaactctgtctaaattgggttttgttttaattaatgggcctacaatattgatgggtccttgaaacaaaaacattgttattaagggaaatgaaatatcttaactaaaccaatttgttatctatggtgctctacttt

SEQ ID NO: 7867 - DNA, 1524 bp, Arabidopsis thaliana landsberg
tttaattagatagccaatcaatttgaataaagaggtcaaactccaaccaatcccacaacaaataattgtctttgatttaacgttttacacttaaaagacaaacactgcacgatatctctctcagatttataagtgaaccctacaaagtacaagtcgtaaactcaaccacaagagaaaccttatcttcttcttcttcttcatcatcaatctctcaagacatgctctcttttttctctaaccagatcgaccggcaaaaagatgtgtctaatgaggaaaaaaccctaaccaatctcgaaaaatctgacggttcacaattccctggcgatgactaccgtccgtccgatcggaaaaactggatggctggtcttacgttggagaaactaactctaaacaagatcgtgtggccaggaacgcatgattcagccaccaacgatatcggaatacctctgatctctcgtcctttagctgaatgccaatcgctctctatctacgagcagctcgtcctcgggacacgtgtcctcgatatccgtgtgcaagaggatcgccaaatctgccacgggattctgacgtcatacgaaattgatgttgtcattgatgacgttatcagattcttgtcggagactcactcggagattgtaatcctggagataaggactgagtttggacacaaagatcctccggggttcgagacttacttggcagacaagttaggtcaattcttgatacatcaagatgatagcttgttcaacaagccggtatcagagattttgccgaaaagggttatatgcatctggaaacctagagagtctccaaagccgagccgtggtggaattctctggaactcagattatctaaaagataattggatcgatacggatcttccatggacgaaatttcagagcaatttgaagcatctgagtgagcagcagccgacatcttctagaaaattcttttaccgggttgagaacacggtcacgccgcaagcagataatccggttgtgtgggttaaaccggtgactgatcggatccgaaaacacgccagactatttatttctcagtgtgtttccaagggatgtggagataagttgcagattttgtccactgatttcattgaaggagatttcgttgatgcctgtgtcggccttactcacgcaagaatcgaaggaaaggtttgatagaactctggaacgatcgatggttgatctcaagcattggaaccaagattatttgcttttgggttgcgtgtatcttaagttatgctatgtattaaagtgtgtaatttaagttttctatgattgtacattatatctgtttttcgttatccgtcctgtttgaagaatcaaacagagagataaagagaaggcaggggaatttattcagttgctttattttgctcagattcttgtaccaagttacatatcctagtgaaatttcgaaacccttttcggcaagattagcgtctcaatatccaaaacgcatccgccatctaatgacctcttcaagaaagatactacatatatatgt

SEQ ID NO: 7868 - DNA, 754 bp, Arabidopsis thaliana landsberg
attgtaaggaccatttcaatgtcgtaacttaaagattgtgctctgataatgtactagagcagagcttatcaagacagtagcacattagcgatagagaacttaccgcctccactaaagccttccactccacgaacattatgtatcataaagccttcatttgcttttgagccatcactgaccatttcagaaaatgcagaggacgtatatggactaccatttgcaaagttgtcgacgtactccgaaaaagaatgaggatggagatttggcatgctttggatccccatatttgaattatcaaaatggtggccatgctcctgaagtcctacaggcttacttgctgagatgccgtttgccgaaggtgggaatccaataggaatgctgagactacgatgtcgttcaatgaaggaattcacaggtgatccaatagaattatgtataacccgcatagatccaccatcactggaggttgaagaaatcattcctgggaaatgtctacctgaaacagagatatttaactgcaatgatttgtgtccccagatgattgatgattgaagaaaaaagaactataaaccatagatgtaaaggcatacctatgtgtcccgatgatgtattactataagacgttttaggtagacacccttcagtatcatttgcagcacactgcgacgtgtatctgaaaaagataatgaatcatacattaatacagttgacgtccatgtaaagacttgataacaaatcacatgtacaaatcagt

SEQ ID NO: 7869 - DNA, 490 bp, Arabidopsis thaliana landsberg
tgaatgtgtagtttcctttgtatttgcttacgtattcttcctttgtacttttatctcttgccgcaaattcgtagtccacaccaaaactcacagcccctttctcttgcattccgaggaatagcccaaagcagtggaacgagctttgctggtccatgttgcagtgcgctgagaggaagaaaccttgacctcctaagtggaaagcctgagaatagactcttcctgaagggaatagtcctgcgcattcctctcgcttcaagtccaggtacactacacattgcgggcgaggaagctcaaactccaccacttttacgggtctgtatttgtaagccctctctatgaaacggcggttcatggagtccgatccttcagctgcgaggatgcgttgcctgtgtggggcttctgctttgaagaagagcgcttctaatacttgctttgatgctacttcatgctcaaaatcactgcacgttagtacctttttcagctttcgaca

SEQ ID NO: 7870 - DNA, 1426 bp, Arabidopsis thaliana landsberg
aaaagctcgataagcccaactccgcaactatacacatcgcctttgtaagtagcagccgaagttgacccgtattccggaggaatggaacataaagtccaaccgaatcagcactcacatgagtctcgtaaggactcatcagcctcgggagtccgaaatccgctaaatgagagttgaaattctcgtcgagaagaatattactccatttaatatcgcggtgtaagatatgaggatcacacccttcatgcaagtaaagtaacccttgtgcagcaccttgagcgatcataagacgtgttttccacttcaacaacgctggaccgtcgctacgctcgtgtagccaatagtctaagcttccgttttccatatacgagtagattaaaagccggtcgtttttgtagaaacagaatcctcggagaagaacaagatttggatgctgtgctcttgagagtgtttcaacttctgcttcgaattctctttcgatttgaccgcaatcaccggataacttcttgatcgcaactttcttaccgtctggtaacgttgctttgtaaaccataccaaacccgccacagccaatgatgttagcttgatcaaaactatttgttgagtccaaaaggtcatcataagagagctctttatcattgctctgaaacaaaaccacaagcttagatccaatctctccgagttctttacgattcatgctctcggattcttctatctccggatcaacttctcctgaccgtctacgagcacgtaacacaatcaacgagagaagagtcaaaagaaaaaccgaaccaaacgctatcccaatcgccattccaatgtcacctcctctgcttcttcttgaccgtttgatcaatgcactctcagtaccttcagaacaggggaatctgtgttccccgcagagatggttactctcaaagctcgagtttggaaacgtctgaaactgaccaccggaaggtattactcccgagagattgttataagcaacactgaacttcgacagaaacgagagctgttgcagagaaaccgggatcgaacccgaaagacggttattagagagatcaagagcttccaagctcgtcataccagaaagcgagctaggtattgatccagataatgcattccatttcaaatcaaacacatgaagcttcttcagattaccaaactcctcccaaataggtccagagagattgttatgaccaagctcaatcgttggcgggaacccgaaaatctgattgtattgcaacgctctcgcgctctcgtttcttttcataaagaacgggaaatcaggagatggctcattgactgagatattacggctagtgagactctccaacttagttaagctcttagggatctctcctgtaaacgagttgttagataaatccaagtagaacagagccttgaagtcaccaatccagctcgggtc

SEQ ID NO: 7871 - DNA, 1768 bp, Arabidopsis thaliana landsberg
caaaccagtattgggtgaaataaaccttcaaccatatcccccccacaaaagatattcttataagctcaccaaaatgtacctggaaaaatatgagtccaaaagtttgaaccgttaccatccaacatggaagtctcttgctctttgagcagcgtcattgtctgctttactactcgtaagtggctcaaaccaaacaaaatccagtagaatcccaacccttcccttttgtttctcctgagaagaatttgtcagttagatctttagtaatcatatacatgtttaatatcatagaaacaacttgaaggagcctataaggttattacatacctgataattttggcggtatctctggacggctgctgcatgtgccaagataaggtgatgtgcaacaatgtatggttcagttgcagagtttccatcagtgcagtttccaaatgcttcagagcatctacccggcgcaaaaatgccgttatcttaacctagagcagctactacatgaggctcgttaaacgtcatccagttcttcactctatctccaaatgtttgaaacaaaactctgcgtaatccgcaaaatcttccctgtaaattgcctcatatcaaatgattgtagcttttgaggatgttgcagtaagagactaaagattaaaagataaatcacaagttggtgcttacactacttgtttactaagcaggccttgatacttttgttccaaggctaaaggaaggtcatagtggtacagattcgcatacggtgtaatccctaagaattaagttacattcataagacaattaatgatcaaatcaaagtgtctatgaatgttcaatgtactaaaaatctatacctttttcgatcaagtaatcgatcaatctattgtaataagcaactccattcgagttgattttaccggatccctctgtattcataagctgaagttatagactaatcttaatctaaaatataagcaatgtaattaattttatacattatccagtaataccagggaatattctagaccatgaaatggaaaatctgtaggcatcaaagttcaggttctgcatcaaatctacatcttcctgaaatgtgattaacatgaacaccaaaggatgtacattataatataccacacaaaaaaaaaaatatatacatgatgatttaggaacaaaagattagtgacaagaagtaccttgtaacgatgatattggtccactgttatctcagcagtggcattgttggcaatcttacctgtgtttttttaccaatggtaaataagaaatcgaaatgattaactaatcagtttaattagtgaattgtaattagattgattatgagattaaccaggaatcttgacgaatgcatcccaaatgcttggaccacgaccatcttggtgggtctcgccttcgacctggtaagctgacgtggcggttccgaacaagaatcctttcggaaaactctttctgttaagaccgccggtggccaatgggacggcgactcttcgccggagcgggaagcagagaggaggaggagaaaaagaaacatgtgaagctcactatgggacagaatgtggggactggggagtgaattatgaacgaggatcaatgcgtgtcttcttgcttcaggcttagaattataagcgagattaattatttaatcatttttgttaataaggttgattaactattgatcagataaattaattgaaaaatctcctctgttttcatctactttagaaaacaacttttgtaagaaaaacaaatattatagagccccaaa

SEQ ID NO: 7872 - DNA, 635 bp, Arabidopsis thaliana landsberg
  unsure (1)..(635): unsure at all n locations
ggaatgcatatatagagctttgcatattggtgcttacactacttgtctaccaagcaagcctttatacttgttttccaaagccaatggaagatcgtagtggtacagatttgcataaggtgtaatccctaagcattaaattagatttgttaaacttcattctataatcaaatcagtgttttataagaaacgttatggtttgatacctttttgaaccatgtaatcaatcaatctattgtaataagcaactcctttccagttgactttaccacttccctctgcattcataagcttaatgttattatactaatcttaatcagaattatataactatatatggttacttatataataccagggaatatcctggaccatgaaatggaaaatctgtaagcatcgaagttcagtttcttcatcaaatccacatcttcctaaaatgtgattgtcatgaacacatgcatgtaaataaatcagaagcacttttctaatatttggataatatttattaagattcgattagtatagtttaataccttgtaacggtgatattggtccactgttatctcagacgtggcattcttggcgatcttccctggttattttatttttatattagnntaacaattgttaattatgta

SEQ ID NO: 7873 - DNA, 1804 bp, Arabidopsis thaliana landsberg
tcctcttttcatctccataaaaatttctatcataagcaggctcatctatcgatgtatggacattggacacatgcatacactcacacatacaaaataagtatatacatcgtgatcactaaatctttcacttggtattttacttgcctttaaagccttctttggctatcttccttcgcaccctctttaagagtcacttgactttaatatttctctttttgtttctttctccttttctctgttttttcttttcttttctctttgcgattcgctgagagcatgcctgaatgtcaagagaaaggtacgaagtgaccatctcattagtgaaaccctttttctctacaatcatttagattttattccctcaactggtggatatggttgatctttaccttttagtcgtataaatattcatgctattattgaaaactaaagctcttttcaataccttttgtccagggagagatttgaagagatagggaagaagatcaaaagagaagcagatgcttggcctcatcaaatggctggaattagaagaccaatgtcgggtcctcccggaaccctcaataccattacgccttgtgctgcctgcaagcttttgcgccgtagatgtgctcaagaatgtcccttttcgccatatttctccccacacgagcctcataagttcgcttccgtccacaaagtctttggagctagtaacgtctccaagatgctaatggtaatagccatttcaaaacacacatagatatggtcttgatttatgcatgcattattacatatgtaacaataaccaactgatggtaatctagtggtcatatatatagctacgttagattgattcttattagacacatatataatttaccatagcgagaaattagatggttataaaaagttcgagattattactctgtatttcactatgcaaaccctgttaaaagaaaaaaagattaatggttttggcaaaattctcacaatgtgtaacaattccaaactaatcaggaagtacctgagagccagagagcagatgccgcgaatagccttgtgtatgaagcaaacgtgaggctaagagatccggtgtacggatgcatgggagccatctcagctctacaacaacaagtccaagctttacaagccgagctcacggccgtaagatccgagattcttaagtacaagcaacgagaagctgtcgccactttgatcgtaccttccaactcccaagttgccggatttcacaactccggcggtgtttccgtcattgcaccaccaccacaaagaccaacaactccaccacaacctacaacggctcatcctccttctccatcttcttgtgttttctctcaaccaaccacaagagacttagaatacggcaacattgaaagtgagaacaactacttcggttaaatttttattgtatcattctacaaacacatacaaatacatataatttatttcgataatttgtgatccggtgactaataaattaaattaaattaaattaatataagtgaacaaggttggtcttgaatagcctgtcattactcattaatctatcaaacgtatattaatattgtttagttggtaagtacgtagtactagtagtagtatttagcattcatattactgataattaaatgaggttgaaatatcgttttattgatgtacaaagtagaagtcaattgttctacaaaaaatttcatttaaccttgatgaagaagcattttgaattttgggtagcttaaatcaaaatagtgagtcatacatacgaaaactgagttttcctttttttttttcctttttttttttt

SEQ ID NO: 7874 - DNA, 421 bp, Arabidopsis thaliana landsberg
  unsure (1)..(421): unsure at all n locations
gactttttcaaagagagagacaccatcggcgtccgatatgggtctccacccgaaatgccgtggagagctccgcaccatagcgttgccaccttgcttgcaatcatggatatgaatcccatggatgataatgttggtcacgtactggatcgtaatacaaggcccaccagagatgtgtacggaagcaccacggccatcgatggtcttgaatgagttcatgattagctcttctttgagctgaatcgtcatgtcttgttggaagatgatccagagtggctcgtcttggaccacggcgtgtattaaagttccgggcttggggctaactggacagtcgcttcctgagtcggagaccacgtagatccgaccnnnnnnnnnnnnnnnnnnnnnnnnnnnnnnnnnnnnnnnnnnnnnnnnnngacgttga

SEQ ID NO: 7875 - DNA, 2312 bp, Arabidopsis thaliana landsberg
tagaccagaaccctctgacaatgaaaccgatttggttttgctaagcgatgttagtgatactgccccatcaaccgaggctaaaggagttaatcagattttggtaggtagcacagaaacgctgatgcatgataatgatcgaactggagaaactgtaccagataaagaagatgtacgagctacgcagtctaatgaagaaacatctgcaagtgggatttcagcagtgatagatgaggctcaagtttgcggttgtcctgatttagagcaaagttcttcatctgcaaatcagggggctgatgaagagcttgccttgatggttgcagattctcaggttctgtatatgccttataaagatcacttattctatgatgattatatggttgcagaagcttcctcgtcattcgtgagcggtgaccatgaaccaaaaaaagactattttgactttagcagttttcttgatgagcctgagatacgcgaaggacctgtttttagaccactatctaaatctgaagtttatgaagctggttttaaggctgactgcagtgatgataaaacagttagtgcaggtaagggtgaagcttcctcgtcattcataagtagtgaccatgaacaaaacatagattatgttgactttagcagtttttttgacgagcctgagatatccgaaagacctttctttcgaccgctatctaaatctgaagtttctgaagctggttttaaggctgactgcagtgatgataaaacagttagtgcaggtaagggtgaagcttcctcgtcattcgtaagcagtgaccatgaacaaaacatagattatgttgactttagcagtttttttgatgagcctgagatatccgaaagacctttctttcgaccgctatctaaatctgaagtttctgaagcaggttttatggctgtcagcggtaatgataaaacagttagggcaggtaagggtgaaactttttcttcattcatgagcggtgacaatgaacgaaacatagattatgttgagtttactaacagaatattcgatgatcgtgggacatctgaaagacctgtttttggaccaccatctaaagctaaagttcctgaagctggatttgtggctgtcagcagcgactctgatcctgcagttcttgatgaatcggattcaccagtgtctgtcgataggtgtttggctcagttcacgaagcatgagattttgtcagaagacaatgcttggcattgtgagaattgttcgaagaacctaaaacttcagcggttgagagaaaagagaagaactaaagaaggattgagcaacagatgggtgaatgaaaatggagctagttcggcttttgatgagtgtagagacagttcactaaatcaatcctgtatagatctcgaaaacggttacaaagctgctcctccgatcacaaaattgccaaactgcaaggaagaggaaagcgcaatagatgatggatttgtgggagaggaaaatacaaagcaagctccaattacttctgttactgaaacacctctcctcggtggagaaaccatcagttctcaaccagccagtgacaatgaatgtgaaaattgggaagacttggcagtagattctgaagaagtgatagtaaaaagagatgctaggaaaaaggtacttataaacaaggcaccacctgtcttgaccatacatctcaaaaggttcagccaagatgctcgaggcagggtaagcaagctaagtggccatgttgatttccaagagttcatcgatcttagcaaatacatggacactaggtatgcccattttctctatacacataatcttttcttttaatgttaccacatttggtcagaaaccatcataaaatccactaatcgttaatttctctcgctctctaggtgctccgaagaagacgagccggtttacaggttggccgggttagtggaacatttaggggcaatgagtcgaggtcattatgtttcttacattagaggaggccacaaggagaggagagactctgatactaaagaaccaaactcatccatatggtatcacgcaagcgattctcaggttcgaccggcttctttggaagaagttctccgttctgaagcctatatcttattttacgaacgaatctgagaacacggaggctggatatcttttttttttttttttttctctttctataatttaggttaatagaacaagataggtttaacgttcttcacacattgtgctggtgaactctcttgacttaagtttagcattttgccttgtttgaaaagttaagtgtttttacgttcagcttatagataatggctacgtgaactgtagaacg

SEQ ID NO: 7876 - DNA, 881 bp, Arabidopsis thaliana landsberg
tatacacaaacatgaacacttttacctcaaactcttcggatctcactaccactgcaaccgaaacatcgtcctttagcaccttgtatctcctctcaacacttcaagcttttgtggctataaccttagtgatgctactcaagaaactgatgacggatcccaacaaaaagaaaccgtctctcccaccgggtcccacaggatggccgatcattggaatgattccgacgatgctaaagagccggcccgttttccggtggctccacagcatcatgaagcagctcaatactgagatagcgtgcgtgaagttaggaaacactcatgtgatcaccgtcacgtgtcctaagatagcacgtgagatactcaagcaacaagacgctctcttcgcctcgaggcctttaacttacgctcagaagatcctctctaacggctacaaaacctgcgtgatcactccctttggtgaccaattcaagaaaatgaggaaagttgtgatgacggaactcgtatgtccagcgagacacaggtggctccaccagaagagatcagaagaaaacgatcatttaaccgcttgggtatacaacatggttaagaactcgggctctgtcgatttccggttcatgaccaggcattactgtggaaatgcaatcaagaagcttatgttcgggacgagaacgttctctaagaacactgcacctgacggtggacccaccgtagaagatgtagagcacatggaagcaatgtttgaagcattagggtttacgttcgctttttgcatctctgattatctgccgatgctcactggacttgatcttaacggtcacgagaagattatgagagaatcaagtgcgattatggacaagtatcatgacccaatcatcgacgagagg

SEQ ID NO: 7877 - DNA, 1789 bp, Arabidopsis thaliana landsberg
cgggatctttctgggttttttcttaacattaaattcgtaaattcccaaagaaaaaaatttaactcgattttttttgttttacaaagtcggcacaattctgaaacccttaattgaatccaagagaatttttgattaaattaagtctctggaccctgaagtccccacacaagcaagcttcgatggatcccaagaacctaaatcgtcaccaagtaccaaatttcttgaacccaccaccaccaccgcgaaatcagggtttggtagatgatgatgctgcttctgctgttgtttccgacgagaatcgcaaaccaacaactgagattaaagatttccagatcgtggtctctgcttccgacaaagaaccaaacaagaagagtcagaatcagaaccagcttggtcctaagagaagctctaacaaagacagacacactaaagtcgaaggtagaggtcgacgaattcggatgcctgctctttgtgctgctaggatttttcaattgactagagaattgggtcataaatctgatggtgaaactatccagtggctgcttcaacaagctgagccatcgattattgcagctactggttcaggaactataccggcctctgctttagcttcttcagctgcaacctctaaccatcatcaaggtgggtctcttactgctggtttaatgatcagtcatgacttagatggtgggtctagtagtagtggtagaccattaaattgggggattggtggcggtgaaggagtttctaggtcaagtttaccaactgggttatggccaaatgtagctgggtttggttctggtgtaccaaccactggtttaatgagtgaaggagctggttatagaattgggtttcctggttttgattttcctggtgttggtcatatgagttttgcatctattttgggtgggaatcataatcagatgcctggacttgagttaggcttgtctcaagaagggaatgttggtgttttgaatcctcagtcttttactcagatttatcaacagatgggtcaggctcaggctcaagctcaaggtagggttcttcaccatatgcatcataaccatgaagaacatcagcaagagagtggtgagaaagatgattctcaaggctcaggtcgttaaaaggattgggtttttttttgtatcttctggatttgaaaaagcttttggcttttgtcttgtgataatattgctgtactttgtaccaccatggagaagaaaaagaaaaggttatattctgagtgcgagtgataatctatacttattgaaacctctgcaaaaacacaaggtgagttcaatttgaggatgatgatacaagagagtggaatcttcaaacctttttttccgagtgtttgtgacaattttttggcagttgttgtttgaacttgcaggtggagtttgttgaatacacacagccagagatttttttgtttggagtctttaagttgcagagaggcttgtttttacttgttctgagttttgttgcttttgaatatcaagaaaccggcttttttcagatagtacaacaatggtaatgtatacttgtcttccatcacatatttgtagaatgaagatttatagctctcttttgctcagtattcttctattgcatctccaaagattgttctctttcgttcgatctctctgaatgagttaaagactttcgtttagagtcgagtgtaaaacacttcgctgcatgttctgattcagtggctttgagctgcaatggatttcacaatgatggtaacgttgtatttcttaactcttacttacattcatgttattgc

SEQ ID NO: 7878 - DNA, 1833 bp, Arabidopsis thaliana landsberg
aatccacataaaaataaacaataatggaccttaaacggtaatgatatatctaatatgtatgctatgtttcttatatcgccactctgtttcagttcccaccagcactacaacatatatttacattctcctatctatgggatgcttctaaaccaacataaacgatcctccatcaatttccgaattcttaatggtaatgtagagaagagacaagcaaatagcgataagtcccgaccaaacatacacaactgtcggtgtttttcctcctctccccatcaaacctttcgcaaacggatacatatgaagcaaaacccaactggcaaagaacgtccctccaagaagattgctccactgtggattcgcactgaaaaccgtcctacaaaccgcgaaaagtatcgctacgatgttcaagattatgattgttaacggtggaatcatcagagcagtccatttaaacagataaagatcagcgaactcgtcgtcttcatcatctcctcctgttgaagattttgaagtcaaggtgaaggagatttcgactccggctatgactttgagtataccttgtagtacagcgactaaatgtgcgctcgtgccaccgattaaccagaactgctcgtttctccaccattcttctaatgagatacctgaccatttgacttcaagaacagctaatccacagagagacaatgtgataatcaaaaggtaaatgaggaatgatccagtgagggtttcaacaacgaagtgaccggagaagagagataacggcgggaggaagcagtaggttaagatgaaaatgctggtgaatgggtagattccaacgttgaggtaagcgattctctggaggagtttgagttttggaccggcgaaaatggcgttgtttcgagagaagaagatctctactgatcccgtagcccatcggagaacctggtggagtcgatcagttaggtttataggtgcgcttccacggaatgcgtctggctctgtcacgcagtagaatgatctccatcctttttcatgcattcgaaaaccagtcactacgtcttcggttacagaaccatatatccatccaacgttgaacccccattcagtcttgtcttcataccagcacgagatcacgttaaccgcctcattcacagtcgcgaaatcaagcggtttgcggcttccagtcaaagagccaggtgggcgtcctagccggcttgagtgaactgtagctagtggtctaccttcaaactctgccacctttaccgaattcactagcatactcgagctaccgaattgcttccgaatcaaaccaatatcaaacctatcctcctcgtcagtgtagtactctggttcagaagctacggttgcaggactgcgtttcttgatcagcgggaaacagtaggaaccagaaggttcttcctcaaccacaaaaacatcaggcgggttgaaaccgtaaagtgcggttcgacggaagagacaccccgtcccaacatacattggaccttggatcccatcgagagctcgcagattaatgtcgaagaaaacagtattcttgttagcatagcgatcagatggatcaattccttcaaacctctgcggaaactgaacataggaaacacggtcgccgtcatggtccatcatgaaacagatcccatctctaaaagctcttgagttatagacatagtggtcacagtccaagttcaagatgaacggtccattagacattatagccgaggctctgaccaaagcgttcatagctcctgccttcttgttatggtcataaccaggccgtttctcgcggctcacgtaaacaagcattggtaaacgaatgtctactccttcaagatccagtgc

SEQ ID NO: 7879 - DNA, 1731 bp, Arabidopsis thaliana landsberg
  unsure (1)..(1731): unsure at all n locations
ttcttagggaacactaccggcgagccttacatagttagaccaatatctacgtgaacggagttggggggcagttttcaaagactcaacctttggttcgaccccaccactgagtttcacacttactcaatcctctggagtaaacgcagtgttgtgtaagctctcttatacaaacaaagtctcttcctttatttgattattgaagacccattttaatgatgtcttcattgcaaatacagattcatggtagacgaaacaccgattcgagttcagaagaatcttgaagagaaaggtatcccatttgctaaagatcaagcaatgggtgtttacagctccatttggaatgcagatgattgggctacacaaggaggtcttgttaaaactgattggagtcacgctcctttcgttgcttcttacaaagaattccaaatcgatgcatgtgagattccaactactactgatctaagcaagtgtaatggagaccagaaattttggtgggatgaaccaactgtctctgagcttagccttcatcagaatcatcagcttatttgggttcgagctaatcatatgatttatgattattgttttgatgctactaggtttcctgttactcctcttgagtgccaacatcatcgtcatttgtagtttagaaattagtcaagaataaaaatggatcaagagaacatgtggtactctttgatgattctgttttaatgtataaataatcaatttctattgattttggtgaagttttcaagttaggattttaactaactatgcgaaatatatggaaacaaactcaacgcacttatcgttaatgacttttaagggtttgttttgattgaatgtttcaaaccctaattacgaaccttaggaaacaaaatagcaaaaaactcgattaagatactattttaacaatggagacaagatctgtgaaacggaagaagaagaagaaagaagaagaagcaaattggtttatcaaagtagatagaatcagcaacctccctgattctctaattcatcagattcttctcttgcttcctcttgaatctgcagcacaagctagcttactttcgaaacgatggagatctctctttctctcattgcctgatcttgatttcacctccatcaacgatctcaagaatccgaaatctttctcttctaactccatttacaaagtgctttctcttcgtagtcatcgtgactccaacaatcttagatcacttcgttttcgcgttcccgtcactttcacaagtctcaattccttgattcgtttagctgttactcatcaggttcaagatcttgacattgaagtcactaccaaagactactttaacttccctcgttggattgtgacctctcaaaatttaagagctctgacgcttaaatcnnnnnnnnnnnnnnnnnnnnnnnnnccttcatcatcagcacgaggaggtttccaaaagcttacttcactctctttatctcgtgtgatactacacaatcaaccttgtctgtcagatttcttcactgatccgagcttccctcttctggagaaactaaccctagaatgttgctttggactcaaggaacttaaggttagttgccgtcttctccaagagttttctctaaagaactctntacagcttgagggcttagaggtttctggtaataagcttcagaaacttaaggttgagagttgcttctattcatactcagaaaaagagcttgtgaagataacacacncgatct

SEQ ID NO: 7880 - DNA, 1673 bp, Arabidopsis thaliana landsberg
gggaaacacactagattaccatttgattcagttatttcttctatttctgcaccttttgaaattattcattccgatgtatggacctcaccggttcctagcatcagtggaataaaatattacgttatatatcttgatcatttcactcactttctctgggtttttcctcttcgtaaaatatctgaagtgttttccactttcttaaagtttatggcttacgtgtctaaccaatttggctgcagcattaagtcattacaatgtgataatggtggtgaataccaaaacagacaattccttaatcacttagccactcatggaattatccctcgcttctcttgcccatacacctcgcagcaaaacggcaaagccgaacgcactctccggacacttaataattctgtctgttccttactcatccaagcaaacatgcccaccacctattgggttgaggcacttatgatggcaactcatctcttcaacattctcccctcatctaccattcaaaacgaggtacctttcaccaaaattttccacaaaccggccatatacaatcatcttcgagtatttggatgtctttgttaccccaatcttctttcggtttcgtctcataaactcgatcctcgctccactgcgtgcgtttttcttggatacccatctaaccataaaggatatcggtgtatagaactcacaacccgtaaggtaatcatttcacgtcatgttaccttcgatgaatctaaattcctttctctaaatctatctcagaatctccttcaatcatagatgaaccacaacttccgatgtctatttctcctctccttcgccaaattgatccacctcaaacaattcccaatgaaccaactccacaagtagctcctccgcagcctccaaccgtcgtcgcgcactctatgagaacgcgaagtaaaaacggtattaccaaacccaaacaaccattatctcttcacactgacattatttctcctcttcctacctctcacctaaaagccttagaagatcctaactggaacgcagccatgaatgaggaatatgcagctcaaattaaaaagggaacgtgggacttagtaccaccgccccgagatactaacattgtgcgttccatgtggttatttaggcataagtttggtcccgatggcaaactatctaggtacaaggctcgacttgttgcaaatgggaaatcacaagaaataggcattgattgcgatgagactttcagccctgtagtcaagccggccacgatccgcctcgtattggaactatccctctctcgcaaatggccaattcaccaactcaacgtcaaaaatgccttcctcaatggcacactcgaagaacccgtgtatatgcatcaaccttcgggattccgtgatcccaccaaacccgaccacgcatgcttactcaaacggtcactttacggtcttaagtagtcaccacgagcctggaatcaacgatttacccaatacgcgtgtcgaatcggttttgtgcaaagcaaggctgacccattgctttttgtctaccatcgcgccaatggaacagcctatcttctcctatatgtggacaacattggcctcaccgcatccccaactaagcttctccaagatatcatttcataaataagacaagaatttggaatgacagattcaggagaacttcactaggtcctg

SEQ ID NO: 7881 - DNA, 1331 bp, Arabidopsis thaliana landsberg
atgatccaatgcagaaaacatatgtttcagaatttcgtcactatagttgcagtgtcaacgagcaactatagcttttcaacaatgcccaagaaatagacgaaacatgtctctgtagacactccccttgtatttcaaatttaataaagttgaatagtaactcataaacaaaatgtcaagtataacttttattatcgggattgtgttacctgaaatttttttaactatatctagtatttaccaatctaatttgtagccttttcaagggaagaaaattaatcatagtagaagcccaggccatagttatatatacaacagagatttttctatgcctacttttggatgaaaatggtgttttgtgcattggctcatgcgagcagatgcagaaggaatggtgttacctttagatcaggagttccacctttgtgtctagtataccgaaaatacatgtcacaaggcatgaaaactctttcaagtagagccccagtacgcttcacttttggggagtttctgcgaatttttgggagccactgcaatccagcacctgggtcaacatcagtgggagcaacatgggcttgcacatgctctaacattaccgaaacttccatccgtgtccatgtcatttcaggactacattctggaattttaacacttccagtgccaagagcctgctcaatcacttccacaccaacacgcataatggaatgaaacgatcgtgctaggacacgaccgctaacagcagcaagcagaaagcgaccctggtattgatcaaagagaggtttattaaccagtcagaaaaatcttttctacaccaaagacaataacaaaaataattctgttggttaataatatcatcatgcagctcgaatatatatttttttaatagtaagagattccagtaatatatttttttctgctcgaattcttttctacacctaaatgatatattcttttctgcacactgcttgaatatatgactagtctaaagtttgaatgcaagtaaggtaaacttattcagccaagacttatagtgttacaacgctctaaaataagtaataggtgttaaacgtgcattcttacgcggcaataattacttacattagcttcttctgagtgaagattaaactgtggctcaatgacattcaccatgaagtgacgagtcccttcttcctcagattcaatggtctcaactgtacctggtttatacatccaggtcaaaagttaaagtacatgatgcattgagattatattagcaaggtctctgccactatcgtagttgctatattctttctagatttctattaatagtaagagattccagtaacttaataaag

SEQ ID NO: 7882 - DNA, 1099 bp, Arabidopsis thaliana landsberg
tttgcccctgaattcattaacttcctagatggatctaccgatgatccgttggtaccgctattggtcttcataatgatacattttagcgctatgaaacgagagtggcgaagaagaagatttcgacgcctgagaaaacaaggtggagccaccaccactgcgtaaagaagcgttaagtgttgagaaattcgccgggatcgttccagtaccagtagaagcgatgatagctggctcagcttgttggagaagccactcgatggtttctccatcagatttatgacctaactctcttgttaactgaaaaactctagcggcgcacatcgccggcatacgaattcgccgtccacgaccatcgactttagtgtgccgatctttagttggctttttcacggcggatttaactacggcaagagcactacctgagcttgtgcttgtcgaactcgtcgctgaagtgcttatgtttccgtgttgaccagaggagataaacggaatcgatcccggcgatggtttttcaccggaattaagctgaagcgtcgcctccgcaacagaggaattctgattcatcttcaaatccgtaaaaagatatgatttttatgatttttagacaaaacccatgtgaattctgtgtcttgacatcgaattctatataatctggggaaatctgaagcaaatcgattgaagaaacaaaagcagagaaagaagagaaagtgactgtggaaggaggagatctaagcttgctactaaaatggagtttgagaacagagagggagagagaagagagaatgattgagaaggataaaaacaagtggatatgaatggtgtgattgcaggaagaaactatccatctaaattctctattcaattcaacctttattgacttatttgtttcttacactgttcttctttcttgtcgaaaacccttcatttttttgctttgccatggttaaaattaaaattgacacagtaaaaaaaaaaaaaatcatcattgttacttttggataataatgcaagctaattttcggatttgttttttaaatatataattaattagaatggaacatgaacattcttagagtatctaatcctatagatcagtgatgta

SEQ ID NO: 7883 - DNA, 901 bp, Arabidopsis thaliana landsberg
tcgactcatccctctggttctggtggtgctgacagctgatgatgaaaccctaaaagcggcgacgtatgagcagcaaacacaccgccgcctccttgttcatcatactgatgatgagtcaatccaagagcaccgtaaagcggcaccgatttcgacggcggagcagagagagtcgatccactacttcgtaacgaaacacttaaagtagagaagttcgccggaatagttcctgtacctgtagcagcaacaatagctggctcagcttgttgaagaagccattcaatagtttcaccatcggatttatgacctaactctctcgttaactgaaaaactctagctgcacatagcgccggcatacgaatccgacgtcctcttccgtcgactttcgtgtgacggtctttagtcgaacgcttcgttgtagtcgccgttgccgtggatgaggttgttgcaagtgttgagtcttcgggaggtgtagatctgggaacgattgagagagatgcgtcaactagctgtcttgctcctcctccggtggcgacggcggcggtgtcgttgttgttgtttcggatgtcggagagatccattttccggtgagaaagaagggaaaagaagatgaaattgaaattagggtttggtgaaagaggaagaaacggccatggaagctccgattgtcgccttcaagtttgactcttgtcttcttctttgtctcgagaagagagagagagagatgagagaaaaaaaggtttgatgatgtaaaagcaggtggatgacttttccagcaagaggatattattattaaaataaataatatatatgccgtcattaacattaaataaaacgtttattgatttttgattagttattatataaatcaaaaagtaattaggggagaaaaataacttttcac

SEQ ID NO: 7884 - DNA, 2491 bp, Arabidopsis thaliana landsberg
cggtcatcaatgcatgaaagtgataaatatatatttcacacaaaatatatattcttactgtacctcaaagatcttcttctgttccacaaagacaattgcaacctcggaatgggaaatgatgaattccacagcatcagcacctataaaattgacacgcaacaaaaatgacaaataagctagctaaaagatttgtagaagctcactggaaatctattggcgaatttatccttctagtgtatattgggaaatactaaaaaaggcatacctagtgtatcatataacggtacacaatagagtccatgtgcattacaagcctacatcaaaagtgcactgtcagtcctctaacaaaacacaatcaatgacataatcatgattcagccgcaaaattacctccatgctgataatccactcaggagaatttgcaccatagataccacattttgcttcctaatatcccacatatcaggaaacacaagattaagcaagggaataatcacattgcgacaaaaaaaggaaataatgagactgaatatagatatctgaaaggaaaaagatggatcttacgtccttaactccaacacttctgagagaatttccaagtttcatgacaatgtcgtagacttcttggtatgtttgccagacatacttacccggctaagaacaatcaaaataacaagtgaattttataataacatgaaacgaaaatcacaaaatcaaaatcaataacaaacagtaacaacacctttccatctacaatctcgcggcgtcccagcattggattgtttggatacttctcaacagacatgctgcaataaacaataacagtagaaaaatgtaagtcaacaaccacaaaatatcaccaaaccacacacaaagcaaaacaaaaaatgtcaaccaaatacatgcaactgttaattaatcacatgccactcaaaacgatgttattatagacaaatggcaaaatcattaaccaacaaattatatttctatcgattagagcaacttaggtagatcttgcgatccgaaaaacttaaacaaacatgaatcaaatccagataaacactagacgaaattaaactatacgattcttactacttgagaatccataaagagcaaaaaacgcaagtcagaacaaattccatgatcagtcaacagatcaaggatcaaaatctcagcacgaatcggaaacgaggctcatgcaacacaaactccgatcggttaaacgagaaatctcaccggaaaacatcccagcaactatccattccttcgatcgggtcggaaaatccgtccttggcaaagatactccggtacactggaccacctgatggtcttccatcgctaccttctttgccttcttcaacttggaagatgtatttcttctgctgcgacatgatcgatctctctctctctctacttcgttctcgttctcttctctctctatctgtagaacgagaaacttctgacgcgttttctcagatcggagaagaagttaatagagactttcaactacgactgcgattggttgctactcactgaccataaacctgaaaaagtcaaagtcatattcaacctcttattgggccgtatacgtatcatcatattaggcccaataaagtcatattatccaaatttaaatttatattagccaatatttagattttataattaagatgtcaagaaacaaaacaaaaagtgtgtgattttgatttaaataactttagattttatcaatattttatcccccaatttaattttttttttagaggttatcaattaatctacgataattaaaaatatgcttattactctattagtatgtgtgtttgtggatagatttgactagttgcacacagatatgatatttgttaaacattagttatcaaaacaaaaaaataaatataaattttcaattcataaaaaaccatataagcaagaatttgagattttgatatccgtttaatctcgatacaaattaatattaacatgtacattatcaagtaacaatacttatcttgtgcttatgcttagttgctgatagtggagggaaaagggtaatagaattggagggttaatggcgggaaaatgtcgataaagtcccttcctttatataacatacataaattttctcgcatttaagaattttaacatccgctagatccttctttcttccaaacccgtaagctccaccttcgttttccccaatttctctctctctctgccttcttttatctatgtcttgaaaagtgaaaagctttagggcttttacaagtctgagaactccatcaataacctggtaatggtccgattgacatgtttgatgttttgcgaataatctagggtttcattttttttaaggaatttagggaatatctcgtttgagtctttcaaatagcttttattttacccaatttcatgtttttagtagtgaattcaggtgggaatttgtgaagataattgcgacaatggcatctggtgtcttcgaggatgaagc

SEQ ID NO: 7885 - DNA, 1868 bp, Arabidopsis thaliana landsberg
  unsure (1)..(1868): unsure at all n locations
atattttaaccatcatttaaaaggttaattccaaaataattattcaatgtacaatacactcttaagtagaagatgtgtgatgtattaatgtatatatggtgaatagtgtatataacaattggacggtaaaaacgttgttccgagttccgacaataaacggtgaatagtaatactgtaatagtgtataacaatttttcataaggaaccacaagaaacacttatttgagattttggtacgaggtttatttttctatgaagcaatagtaatactgtaatagtgtaacgcatgtaggagtagcaaggccttctcacttgtccaactaatttatgttgggcggcaaataaagaaccagcatgaatttttatatatactttgaacccaataccaaaaagcccagcgatgtgttcattctaatagttgtctacaaccaattttgacacactattttggtgtatttataattattattagtttatgatatttgcatattattgatgtaaaaaaatttctgtaagaaaaaagtgctttgttttcacctccatgtactggaagaacatgaaacctaatatattgatatactatattagagtacatagaactctttgaccaaaaaaaaaagagtacatagaactcaaatattgttgactactttggctataaaactgttttgtattagtattactatgaccgcaacatgcatatctaaaagctagtttgactactttggctaaaaaaggactatatctataatacatgtattactaaagaattctgtaggtacattttctaccggtcaattcaacatcctattgtaatttccttttaagtaaaagttgtataagactctttcacaattatttattcactataaataccacgaactgtaccattcttaccaaaaaaatatatatttctcccacacacacaaataaacacaaatcatgagcaatatgaaaataacaaataggtttatgctagtggcaacattcatagcatgtgtgttcataagcagcatgaacatgacggttggaaaagtaattgggtatccagggttgaagcctgatcttccttgtgatcatcatcggtatccttctgcatgtgcaccctccgaacaaccagtgaatccttacagacggggatgtagtaaaatacatagatgtagacgcgattcaccccctgcaccaatttctagaaaaatgttaatacgaggtcaattaatttataataatgcatataatgcatatatccaatatccatgaataataaatttatgggtttggttgtgtttaagccatgttgttctctacatctacacatttaccttaatatttttcagcatgtattattgtattacgatatatacaactggtgaaatcttgttttatcattcagttttgttcgatttaagctccttcttattaatggtaaaataaaacaaatcagatcacatatattcatagcatttaaggacctagtgtgtcacacgtgtgaacctgtaatgtttgttatacacaacaagacaatgatttttgactgggcccagcccacacgagggtcctaacatctctcaacagggttggtgtttttgggcccaggtggacccttttatctcattctcctcctcctcctcacgtttatatgaaaattttcacctatataaatttaatcaattttatttatataaaattcttgacatgtagattataagattaagatgaagtcgttgtcaatttggaccttcaattttttatgtcagattcttccatcgtaatcatgcatgggggcatgaacatgatgatgtttagcaataaatgatgttgatgatcattatgctgttataattntattatatataatttgcatggag

SEQ ID NO: 7886 - DNA, 1196 bp, Arabidopsis thaliana landsberg
atccctctccttaaacagatctattttctgtgatctaatgaccatctgcaaatgcgacgcatagaaacaatccccgagtggaggctccgctttcaactctttctcaaccataaaccacatcagtccagcccagtccagcttatccaattgctttttctttatacctttcatccattccaccacttcatctggcatcatccacgcatcatcacaatgcagtagcatccaattagagataacatctacaacaacactgattgattcatctgattccagaaattccttatcctcatcaagaatgacaacacgttctttcttattaggcaacttcaaagatcgagccaaatccgcacgactaagtttaatcctagacccgtttatatagctgcacttacctccagcactataggaagctataagttgagccacaagatcataatccatatcctgatcaaattccaaatgcacaaaatcccacaatccgagagtctttaagagactctcataacaagcaaaatctagggtttttaatggcttgaaaggtacaagctttaatgtttcaacaagtaccttgagcttcttcttagacttctcttcttgctgcttacgtttcttatcgttacatttcttccgctttggcccaccaccgtgacaactaaaagaaaagctcatggcttttgaatccagagtatcaatctcgtcttcctcactcaactgtttctgatcactaccgtcctcctgcgatttcctcatttcgtccgacactgactctaaaattctgattttgttcggaacagaatgtgtctctgaagcttcagagacttcttcctccaaagtagcttgcttaatcaggtttcttaaaatagttactgtaccttgctctcgagatgcaaaaggattcgccggaggatccatgactgggttttgttttccgatctcctcctctttcagaaattgaaaaggttaaggagctaaagagtctttttgtttactaattaaccataattaatatgctccatcatcaaaaacagagcagctaaaaacacttcattagaggcccatatgtatatgggccggagtttaatacggcccaaattcagtataaccgagttcaatacccggtaagaattaaaatattttacatcatgcaccccaatctttacattaatcacaacaagactcaacatctattcgac

SEQ ID NO: 7887 - DNA, 1726 bp, Arabidopsis thaliana landsberg
ggatccagacattttcactagtagcggcctcatgatgagaaacaacaaaaacacaaattgttattctctacaaccagattataaattcattgacattaggagtagttgctgagttgtgtaccagtgatatgattaggtccaccaatgcatccattacactaggtctgtgactatgataccacaagctcatcttaaaaatctaatcacaataaatgggatgaaattcagagaaaggatagaagggcatgtctttaacaagtatatatggattcaactgtgagctcatgcaataaaaacttacagcttcaagaagatctttatgatgaactaaatctatccaagcaacggaaactgatagacttttcaagactgtctgcaaaacgaatgaaaatggagatattttagtaacaacaaattcaaaacaagaattgattgtcatatgagggaggaaaaggaaacacctcaagctgtgccactgcatcgaaatcagcgtcttctgtaaggcacatcactgttttaagctgactataatcgtcggtatctccctggatttgattaaagaaaacacttttaacgaacacgaccattacaacacacacacactgacacacacatatatatacatagtgtacttggaagaagtaacatctgtagcaacactcacattttggacagatgcaagggcctttctaacggcaaacaccaaatctgtgtcggtatattcagcgttgtccattgcatttgagttgaacggaacactcggaaattcttctgctcccattctctatgaacacaaaacacagctactgctgctacttcagaattttgccaagaatctccttaatttaacctactaaagaacaaaacaaaccatcaaaatgcaaggagcacgaaagtaaacagtagattatgtataaagccccctttaagaaaccaccctaacaatttgcttctaaaccaagtaacgacgcctactattgaaatcaaaaccagaaaccatcataaacaaaggttaaataactcacaaaacataaacaattgtactctctctgcttcacttagctaagcagctcaagcaccagaagatagcgaatttcgtcggaatttgaaaaattaatccgaacccgggaaaaaggagaataaatcacgaaaggtttaagctttgatgtgactctccaacgtcttcgtcttcttcttctctgtgtcgtcggctaaggagtcagaagaagaagagagaagaagttcgatggatccgcgaaaccctcaaaattaacaatttaacccttctttatatctatgaagctaatgacgaaaatacccctattctttgttttttggaccttattttttgtttcgttgtgtttgggtatttaactattgtttgtcactctcagcaccccacattggcaaacaaagctcaagattcaagaaaaagaccactttaaaatactcaaacatccaaaagattggattagattaatattcaatcaacttcatcattccaaaagcatttacaaactacaaatctctctaaagctttttaagcaatgcacaaaaacatataactaaccccaaaaaaagaaaaagaatttgatcaactcccttaagtttgtttcatcatcacacaaaaacctctgcatgtaacaaacctattttttcagacagcaatcttgtagatgactgccactggaatgttaacaacgtgacctctatctccaaacagtcc

SEQ ID NO: 7888 - DNA, 1189 bp, Arabidopsis thaliana landsberg
tttgaaaatctgtaatcaatggagattttacttggttacatcgattcttatagctctcctttccctattttcgcagctgatagtctatatagcttcaatacttaacatttagtctaaattcagagacttttccagatattgtttctagtgagtttaaattgagtgtttatggtgtcttgagtataagttaatgttgaaagttttgagatttcttaatacttctcttgtccatcaggaaagttccacactttcggcaacttgaagtagcagcacgatttacattaagtccagagaggatgggagcagtagagcttatgagtgatccatcgagcttatgcacagtcgagaactatgtggacaacgttgatttatctgatacgcaattggtgcagaccgtgagaaaggctcttacatctgtcaaaactgtgagtgttgtgcaagttttgcttcttcctctgcttatgtgtttacagttatatatatttgatgctatattatctgttatgcttcttgatactagttttattaattctttgctaatgacagggggactcagacctttatagtgagatggttggagttatggcacgggacatcacagaatttaaggatcctgatgtagtggcgcagcttgaggtgtgctctattctttgtatggcaatcaattctttcttatttgttctttttctgtttgctaaagtgttttcatttttcaattgaactggcagacagtcttgaaagctctatcaggcgctgtggcttgcatagatgtccttcaccatcaaaagcttctttctgcggtaagtttctattgcacgagcttacaattgcttccaatttaaatagttttaagatggatcctcccaaatcttaccctggatttcatcccaattgttatgtctagctttttcgaatgaaattgtgggaccacagacctgatgtcatggatgcattggtgaaccttgtcatatcactggtacacaactcaacatttacccgcctattgttattagtctagatgaagagctagaccatttaacttttgccttttttccatcgcaggctgtcactagtggaaagtatttagactcttgtctgaatatgctcgtaagcaacttcgttccacctccttgggtagtgaataacctttcgcactcccgtatactaaacaagaagagagacgttcttt

SEQ ID NO: 7889 - DNA, 1016 bp, Arabidopsis thaliana landsberg
tcttaagttgctgacttgtttttatcactgttctctttcgtctgggactggaaattagactagcagctgttcgagaagatggaattcgctggctgatgcagaggctggagttcgcaccaggtcatctaatatgaagttgtttgtattcgacttagtcgtactaaatcacttctattgtgttgtgccaatatttatgttttaggtacttatctctatgttagctaaataactggtctaagagacttcaaattaaatgtttgtgttttataactttggaagcatggcatgtgtctcctttgatgcagtatcctcgcttttgggatttctttcttttattatgttttcatattatgtatgacacatgagtaaaaatcaaacatatccatccatatactaatatcaattacaaggatctaacaaaatgtaaaatcatggtagatagaaaacaataactttaacatattcaagtgatcaatgtagcaacctttctttcttcgatcacgctctgtacgaagtcaagggcgaatggaacaatttaattggccactctggcaatgatgtagcaatttcactgcgtggtgtttgaacacttgcaacattgtgtttactctcactttcattttgctaatacatttgctcagctaaaaataaataatttttgaatttttcttgcgttatatatattgttatttttatgttaaattaagatcaaaataaataaatttagagatgatattggtttaaatcgataagaaccgtttttgttaatcaaaaccgggccaaccctaaaaagctaaacgccggttagactaaaagagccaaccgccggataaaccaaaaaaacaacggcgtttgttttttcttctccttcttcttcaccctgcgtcgtgctctctcgaattcccaggtcagctacttggattcgtactctcaaaaaaatattgctttcgcattccttttgtggtttcgtttctaaacgcgagtttcttccttttctaaagtctggtgtgatccca

SEQ ID NO: 7890 - DNA, 2492 bp, Arabidopsis thaliana landsberg
agcctccacaccggtgatcataacctttttccagcatgagagaaaacaaggccaggggccgggggcaatggttgagaagccaagcggtggtaaaaccgatcagctgaaacatgatgcacagcagctaaaacatgatgcacagcagctgaaacatgatgcacagcaaaaagcaagggaggtagtacagagtggaaagaataaattaactggtgagcctaaaggacctttgagttccaatgatgacgagaaagacaaagttggagcgaaatggtttgagaagtacaaagaggcaactggaaatgtggtaaaggaagcaaagaacaaaagacagttactttgcaatttggctgcttcggtttcattggttctgctaatcttactatatgctagaaatgcagtacgttcatcccttgtgtggaaatccgaggaatgagtgacacttgcatttgtatttcacaacgtataagcttgtttatgcagaaaataaataacatttgctatattactctacatttctgtaaaaatgtgtgacgagaaatgacaaaagcttcattttacagatttctaattagccctagtataattaattccggtgccagaaattttaactagaattgaggaaaacaatcagaagtataacataacttccaacccaagaagaactgttaaatgaataaaaaacaaaaaaaaaaggggaggaattctataaaagaagatgaaaatcgatgagacttgttgcatgcgtcaatatgaaattcattccaggcactcatagagaaattctacctacccaagcaacgattttgaggaaacttacttgaggaaaggttcatgacttatttagctgagagcggattagcttggcagctgcaaccatgttgctaagtgcagatttaacttcagagtaattccgcgtctttaggccacagtcagggttcacccaaaggactttgctgtccagaacagcaagcatcttgttgatacgttcagctatttcttcagtagatgggatacgaggagagtgaatgtcataaacccctggaccaattccagcaccgtatttcactccttcatggaagactgataagagcttctcatctgaccgtgagttctcaatagtgatcacatcagcatccatatcaataattgagtggatgatgtttttgaaatttgagtagcacatgtgggtgtggatctgcatgaagtacaagaagaacattaaggtgtcatttgaataaattagatctcttcctttatttagtaattgtttcacgtccttcatcttgatatcacattctattgtccacgaaaatggcagaaaccacattatggtcaacatactcgtaaaaaacattctttaagtgggaaggagcaataaagtgaaatacaaatacctgagtactgtcttgcacaccgctgtttgtaattctgaatgcgtggacggcccagtcaaggtaaaacttttgctcggattttctgagaggcaatccctctcttaatgcagcttcatcaatctggataacagtgacaccagccttttcaaggtcctcaacctcatctttgatggcaagtgcaatttggaaacatgtctcatgcctacaaacaacaagaatggtgaaatggaataccatacagcgaaaggaagcttgagaggcttagatgtcacacctgggttggtcatttctaacaaaggaccaattgagaattgtaacagggcctgtgagcatccccttcataggacgttgggtcattttctgtgccattgacgaccagaaaaccgtcattgcctttggccgggtgatatcaccatagatgataggtggcttgacacagcgggacccatatgactggacccacccattcgaagtgaaagcaaagccagacagctgctcaccgaaaaactccaccatatcgtttctctgcaggactatgtcatatcaggggggtaaaaatgaaatagtttgaataataaacctaggttaaggtatattcccacctctgcctccccatgcaccaatacatcaatcccaagttcttcctgaagcttgattaccttttcatattcctctttgatagtctggacatagtcaacttctgatatcctgcaaatgcagcgtatacatcagtatttatataatgatatgttagaatatttcagatacatcactggattagataggcctactttttggccttgaattccctgcgtatccgtctgagatctgtggtctgaggaaaagatccaattgtagttgttggaagagcaggaaggttaagcttcttctgctgggcttgtagcctaacacttacttctgttgaacggtggtgatcagatttctttactgcatcaacctgagtaagaaagtaattaaagatacaagtccaggatacaaagagcaatttgttagaaaaccccttaaaacctgctgtacagctgcatttgtcacccttggcgatgatcttctagaagcttgacgcatggaattagaaga

SEQ ID NO: 7891 - DNA, 1944 bp, Arabidopsis thaliana landsberg
agagccctgcaatgaccgaatgcagaagttttcacttaatatacgtgaatgcaccactcttgatggaaaagttaaagattagtgaagaacttgccctgcaattccaatgagccagaaaattcatttccacttagatctagagctttcagcttccttaggctagataactctaccacaaagacaaaaccacatatagggttaaagaactttgaatacgaatatgatgaactcaaggatgacataaaccgttccaaaaaacttaccttgtattggtatggagccgttaaatctgtttctactcaggtctagtaattccaagtttgtcaaatctctaagttctgaaagggagtccaaaaaatataagaatgatcaatagaaaggtcatgctggatatcgacttagttaagaatgaagaggtacctttagcaggaaaagggccatccatgaagttggacctcagaaacagagttgtgagtgatgtagcggcaccaagaaaatgaaatatactgttgttgaatttatttgaagccaaatccagaatctccaactttcttaattttcggaggcttttataacctgcaaacaagaatcttgttaacaaagtatatgaaaataacatagttcacttacatgctgagcaatgttgcatgcaaatggagatagtgagagaggaactctatgcaaatgggactagaatgtaagtgaacgtttgatgtcattgcaaaatgcaacatttctcagcaagtaaatgcagagacagagaaaagctaagcactgtattatcagaagatatggactttcttgtattaaaacaatgaaataagaattagtccacacatggaaaatatcaaagtgagcatgcaacagaaaaatgttttaaagtaatcagtatggtataccttccacatcatcaaacaagccactgcatctggagcttgataagttcaaacttcgaacatcttcaaagggatgcaacaaagaaatatttaggagagaattatcttttaggctcagtccaccaaaggaaatatcggtcacccgtccgcttacacgattgcacgcaacgcccttccatcggcagcaatcgctcgttgtattattgggcccagcagggagaacagagtcggattggccttcttcagttcttgagatcatgtagttcctgagctcgaacaaagcgttcttttcttcatcaatacaacttttgtatccatgtaactgccccatcagtagcatcacccatatcaggttgtgacccaagaacaccttcccttccattgcgaatgtgatagaaaaaaagaagagaagaaaatgtatgaaactcaaactcaaagattaatgaaaacacttcaaggcaatgtagttaaatatatacaagtgtctccacgtttataagaatttctacatccggtgaaaacagaataacgtcaaggtcaacgacgaataatattggttatatttacaatgttgaagtctctattacctaaacacttaagattcaagtgatcacattcgtttattttgactggtttagccttataagttatagtacctttgaatcattcaatgatatttgttatatgtcaatgatatttgttgaaatgcctctctttgatgtcatggcctttgaattctgttgaacaaccactagacttgaggaagcccaacgctgacggagttgatgaggaggctctcttggatcagttactcctgaaagtctgaaacagaggttgatctgtaacggcgtcgtttgttggcgtcattttgtcttcgaagaaaatctctatagtcaactgtgactaactctcgcagcttcgaagaaaacaaatttatttttttacaaataattttcaactagtcatccaaatagatgaaataaattagttgtataaaataaaattatttcggtaaaacataagataaaatggaaattaaatgtattta

SEQ ID NO: 7892 - DNA, 535 bp, Arabidopsis thaliana landsberg
ctgtctctttggggaaacaacatgggtggcccttttcctgctaaaggtgtgtgtcttctagaatgatctatttattgatttttcttagacttagtttgcgtcatccttatatttgttggactcccatttcagaacttagagatttgacaaacttggaactgctggacctgagtagaaacagatttaacggctccataccagtacgaggtcaatttgtgtccaaatatgcttgtcttcctttttaatctatctataaaaaaattcatttgattcgtgtcatccttgagatcctatctattctatattgttaggtaatggtgctaagctttatttgccctgaggaagctgaaagccctggatctaagcgataatgaattttcaagctcagtggaattgcaaggcaagtttgctaaaacaaaacccctttctggtaaagaattgtgtttaaattcagatttatgtgaaaaagttttaggatctgattaacgtagggacttgcccatggaaaaataggaagagctcaaactcagtaacc

SEQ ID NO: 7893 - DNA, 995 bp, Arabidopsis thaliana landsberg
tttcgatattcaatgcacatccggtgtcatgtgacagttctagttggaattagttcgttcttttcatttttaatcacaatgacaccaccttttttaggcacaacatggaccggactcaccaaatactatcagagatagggtagatgatacccgcatctagaagtttcattatctctttcttaacaacatctctaagattcgggtttaaccgtctttgatacagaattgattgattcatcttctaaatgtatcatgtgcatacacaatgtgggagagatgcctgtgatatcatcaaggaaataccctaaggctttcctgtactttctcaactcacataacaacagggcactctccaaattgtttagttcgggattaataatcacgggtatgtagagttgggaccaagaaacgcgacccttagcccggaggaaagtggtttgagttctacttttggagcgttcagctcgctccaatcatcgcagtctttaggtgaagatacaaccaaagctttctctacctcattgtctccaagctcagcaaatgccaccactttagtcattggtgaattaaaatccagcattctagcaaatccagtagttgcttctccaaggtacccaaactcactctcttctttagtcaagacagtttgaagaggatcctccatgttcaactcagcaagaagctcatcagctagctcatccatgatatctatccagaatgtctgacactcaatggtgggcatggacattattctttccatgttaaatttctgaacaatgtcatctgcagattgatcttgctctttctcgcatctatcaatgcactgacagtattcaggaatggtctaccaaggatgagtggatgtctaggctcttcatcaagctcaatgatgacaaaatcggttgggatatagaaattcccaacccggacttgtacatcctcagccactccaacagggaatcgaatagaacgatcaccgagtaccacacactctt

SEQ ID NO: 7894 - DNA, 1945 bp, Arabidopsis thaliana landsberg
tctgccattctctaatactattcgtaaaaaaaggaagaatctaaaccatcttaagttgagtataaaatcatgttcccatgacagaaactttaaatgaattgtttttatgtatctatctgtaacgaaaagacctgcgagtgagttggttcgttccttcctgacttgatctttgggtcttgttcgttcttcaggtggtatggttcaatgtagttttaaactgagaaaaagggttatataaactaactgacctgttccccgatcaaatctagaccgacaataacgaacgtgattccttgaaacaagaggaaatagaaatggatcccttgcgcagacaacaagcttctcaccgaggctgccaagaggataaacgcgagtgcgatttccgttctgtacagacggtttcttttggttttgccagctttctttgctgctcctagtttgctaagctcggtcagacctgaatcagaggatgatcgttggatggttgtggactcaaccaaagagccggactctgcgtatgcaaccagatccgcctcagaggatctccctagctttttggtgactacccactcgtaagaactatcaaacttgaacaaaccagagatcatggctccaaatttggtaactgacatggtgttttcgaaaaggagatacggaactatgaagggaaggatcttggggctgggatgatgtttaagatggacatgatcccagggtatagcaaacaacccaagatggtaagttagcttctgggagaacatcgttaatggaagaatgacgcagaagagcgtgaatgagtagaatggcaagataagcttccgtagcaagaagaagagaaatatcatatttgctttcttggcagcactcacctgtagtagagaaaaaaatgcaagattaagattagaccgagctatcaatatgaaaacttcataaacataaaatattctcaaggaagagcaagaggaaaacaatctcaatataattctcaatttcacctttgaccgaagaatgtcaaagaagcacaaacggaacaattgcattggacccgaatgccagcggtattgctgttttttgtatgcctcataggactccggaagttcacagagacactgaggaaggaaaatacatatggatgagatcaaaaagttctgttttctaacatctggtaaataacaggaaacttctgagcaatttagttaacataagtaccttaacatcattcagataaatgaacttccatccacaaagatgcgcacgaacggcaatatccatgtcctcaacagttgttcgctccaaccatcccccgcaatcctcgagggctttgattctccaaacaccagcagttccattaaagccaaagaagttaataaaaacaccattgacctgctgttcaacttcaaagtggaaagacaaatttatgttctggagtcttgtaagcaagttttcgtctttgttcacaaaagcccaccgtgtttggaccaaggctaattcttcattaccctgaaaaaaacacagaaactgtcgggtgagataggctagtgtggcaagcatattgtatcactgttctcagtatagaccttcgactaaaaaagcaagaaatctaagcacagtagattacacaggttcatacttcataccatgtgaaaggtcaatacaacgaaatcatgatgtgagcaaaacttatacgtgcaaccaaagatgaaatatttgactggtgtcaatggttgtcccaaggctgtgacaatttgataacatgggttttggggaaggttctaccaagctggtgttgactaaaatatataatttttacagaagtaaattctctccattgccgtgccagattttcatcatagaacattagaaccactgcaaaaaaaacacacatatgtagtggaagacacgctatgccatatatgtcatttttcccactgccaacttctaaccg

SEQ ID NO: 7895 - DNA, 1494 bp, Arabidopsis thaliana landsberg
aaaaacggttccaatttcgaataaactataaatggaaagtaaaaattccataaattccatatagataccatcgtctccaacctttttcttcttctccgtaacctaaaactctgtctaattataaatccaaccaaaacaaaaaaaaagtccatcatcttcttcttatgtcttcaatgcataagaaaggtacaagcagagacgtaaatagccaagcatttacaaaactaacgaaagtagaaactattccagatccagacatttacgacataacctacgtagatatctctccctccgaaggctcctcttcaccattatccaaatcaccatggtccgttcaagtcgatccatccgctgtagattctccttatcattcggtgaaagctatgacggatacaaccaaagaaaaatcaaccaaccactctcctaatattctcttggggtctcttgttcgcgaagaaggtcatatctattcattagctacatcaggagatttactctacacaggatctgattccaagaacattagggtttggaaaaaccatgttgagttctcgagttttaaatcgaatagtggattggttaaagccattgttcttgctggagataaaatctttaccggtcatcaagatggtaagatccgtgtgtggaaagctgcatctaaagaatcaaacgttcatcgtcgtgtaggtacaatgccaaaccttctcgattatataagaaactccattgttccttcttcttatttcaacttcacgcgacgtaatcgtagcagtgctgcgttagggtttcgtcatttagacgcgatttcttgtcttgcgttaagcgaagataaacggttgttgtactctggttcttgggataaaacgtttaaggtttggagagtttcggatttgcggtgtgtggaatctgtgaacgctcatgaagatgcggtaaacgctgtcgtttccggttttgacggtttggtttttaccggttcagctgatggaacggttaaggtttggagaagagaagatcaagcgaaggacacgaaacatttcttctctgagacgttattgaaacaagactgtgccgttacggcgatcgctgtagatcaaagcgcgacgttagtttattgtggttcgtctgacggaaccgttaatttttgggaacgtgagaataatatgaaaaacggcggcgttttgaaaggtcataaactcgccgtgctttgtcttgtcgcggcggggaatttgatgtttagtggttctgctgatttagggatacgtgtgtggaggagaccagaaggtgaaggtaagcatgtttgtctttcggttttgaccggacatgctggtccggtgaagtgtttggcggtggagagagatcaagaatcggtttccggtgcgagacggtggattgcgtatggtggcagtttttatccatcgctgaagatgttgcttgttttgcagagttcaccgacgattgtgaattaagagtttaaggtgccggatcagactggtg

SEQ ID NO: 7896 - DNA, 1413 bp, Arabidopsis thaliana landsberg
tcgattgatggatcagcaatttctggtgcagaagcaacgacgacggaatccacggcaatcacctccggggaagccttcgttgtggcacacgttttcgcagtttgtatcgctcacgcatttacccttgaatctttggctctgcgacgcacacgtgcgagcctcgaccgtgactggacccatccctagagtacaaaagaaacttggtttaagactatatatagctttgtttcatgttctcatgcatgatacatattaactaatcttgaaagttaatgttagaatttgatattattgctacttaataaaggcatccatttatggctaactatataactaaaatcgtataaatggaaaggccagtcgataagaaccacttaaatatgtgcatatatatatatatgaccaaatgatgaaaatagaagaagacatgggtggtgtgcaaagttagatatatggtaacgagtaaacgaacctgtggcgacgaatatcatcaccaagaaaagaacggctgagatcaaacgcatagagaacttcatgtttggagaaagagaaagaaaattgagagagacagagttggaaataagtgttatgtgtgtgtacattactaaggatgaagatggcactatataaagaggtatcgggatatttgatagtgtattagagaattgcatttttaagtatttgtttagatattttgggggtaaatatcatctttctcggataattcacttttgatttaaaccaaattcgtaacatttgtcaacatttttcttcttttgactgctttttccacattttctttgttttctaattttgtcgatttatttgctttaccgaccctagtcataaccgttaatctgtccttaaaatgcaagtgacacgacatgcagagaaatcctactggtttgacaactcattctggaattaattaaccaacagataagaaaaacgtatgaagaaaggtaaaatttgagttagtcagatattggggagtccacaataatagtgaccacgtcaaaagtaagaaaagtgtagtcaaggacactagagttttgttaactttttttatcgtatctaaatgaaaacattacgtgtttaaatggtaactactataatagcgatacaggtttgtacagttgtaacagttatcaatcataaaaattttatcaaaaatattataaaatattttattttaatttttttataacttttttgtacagcttcttttaacagttttacactatttcaataaagctaacaactctaactaacaattaaaaaatttatacagcttttagttaccaatcagaccctattttttaaagtttcaataatttttaaagattctctttttctggacataggaccctttctttcatctagtgtctttcattaaagttgagaggagagctt

SEQ ID NO: 7897 - DNA, 959 bp, Arabidopsis thaliana landsberg
aaaactcaattaatttaccatttcgaaaaggtttactttgttttttttctgaaacaaaattttggtgcatgaatgacttctcgaaacggtagatggactccacaacatctgcgtgtcttgtcaccttacgttacggaccacaatttacacctatgaaagtgtcggtaaagcaaataaaatcgagaaactcacaccactcttattcaaatccaaagtgaatactccaaaaataaagtaaatgatatttatccaaaaatatctaacaaacgcgtaaaatgtgaattatcttgaacgttttaatacctctttactctctttatatagtgccattttcctcactagcagcaacacacttgaacactactttcgaactctctctttatctctcttgcaatgaagctctctatgcgtttgatctcagctgttctcatcatgttcatgatattcgtcgccactggtttgtttctcataacctaatatctaattttcacacataacccatgttttatgataacatattttaacatatatagatagtttcatttttttataacattctgtatttatggtttctatcgattattcttgtgaatgctcatttaattatagttaagttcacttcgaaagttaagtaatatgcatcaagcatgagacacatgaaactaagctatggtctaaacgaagcgttcgttttgggttttgattttgtctagggatgggaccagtcactgtggaggcacgcacttgtgagtcgcagagccataggttcaagggtacatgcgtgagtgcattaaactgcgccaacgtgtgccacaacgaaggctttgtcggaggtaactgccgtggattccgtcgtcgttgcttctgcaccagacattgctgatctacccattctcatgcataattcaagctttgatccatcgtcgcgcgtcacttccttcttatctaatcttccgaca

SEQ ID NO: 7898 - DNA, 1199 bp, Arabidopsis thaliana landsberg
ttcacgtaaagagcctcgcgatcagacttcttggcgtcattggcaacttcagccaacatggcgtgagaggcaccaagcaagtctggctccatctgtgatgtcacaatgtactgatgaaacagaacccaagtgaaacacaagttatgtatagctcgtgtgatccccaacattatccatgtcttcttcatcagttctaaaagctcatcgatttcatcaagaaccaaggtctcatcacgtatgtcaaatatcgactgcaaaagcgccacatagagatggatgttaagtgggtatccatcagcccaatggcatatatcggttgttggagtagcgttgcgccatgacaaggaggcgacaaggttacataatgtcggcattatgtctgagtttttgctagtgtcgatggcttttgtctcactctggcggatgatttctcggagacgcattgcaaagttgttggtcttctctagagggattgatgggtgaatgagaagaccagcttcaaggactttgagttgccgtctttgccaaatttgatactcatgtacatcaccaaactccgatggtttcacgtgacggagaagctctaacggaaggattattgtctctgctcgcctaccggtctaaaaaataacagttataaacattttattaattaatcaagaaacagagtttcattcacaatttaaaaacagagcaacttacttggccaacaagcgtcctcattagggttttccgtagccgagtgtcactctgttctgtcaccttcatttgctgcctcatgatttctgcagaggttaacggtcgtcgaggccgagcaggcgggaccgtaaaaaacccagccccagggctaaagtgtcctgaaccacttcctatgcttccattattacctggggatgaaggagctgagacggcccctacaactgtccctactgtcgacattcgcctagaaggagatcgtttaagcatctttaaccctagcgcccgttttactcggcttgttggtgttgtcaacacttcttttcttcctaaagacccgaatccagagccgttagatgatccagatcctcctcctcctcctattccatccccttgatggtcaccagcattgtgcttggagtagaatgtgagagcatttctacctccaaatccaggtgatgatcgacatgcggcgaaaaagatctcatacgcggtttctcgga

SEQ ID NO: 7899 - DNA, 2470 bp, Arabidopsis thaliana landsberg
ccattcttttattttaatttagcaataaagaaattttcatgtgatctatacaaacttgaaggttgacaacgggattggaggaacttacagcacactgtcatcttcacggaccccttgacattgattttattttatctatatttatatgaattagtttaaattactaaactgcataatttagatatatgttattaagttattttggttgccggttcttgatttctatctcatatactatgtacatgtatattatatatggatattgttgactcactggtctgtatttatgcagagcatggtccatacacaattaattatcaagttggtgattgaatttatatacatagatatattttgttctttcaatagtatggaaatcattgacttgcttgggatatttcagatgggatatcaaattactcagagttccataatttcttcctttggtggtggtttgagttgtcaatattaattaataagattgataagtctagaccttagccaagggacatatgctttaatagtattcaattatatatgtaaagtaaaactcttttaagactataaaatatatactgataaatttaaaacattgataaaataggctcacccactccataaaatggacgaaaccaagtgattcataatcatttgctatctttttatataaataataattatttaaaaaacacataattttattcgatagatagataatatataaggaaaaggaaagatagttgcgtcacttagtgaagaacactaaccacaaatttgaatccccacaacacgaatggaaagcacttagagggataatggagcaaatatataggatgatatattgcgtgcccattggccatttcccatttcacattagttactctccttattcttccttaaaactgtacgtatgtgtatatgcattgttttctacaatgtaacgtgttgaacattgtagaaaaacattttcgtggttcgagaagccttatcaaaacaagaggcatacaattcttttgtccctctctctcatgcaggcacaagacgaatccccatattattcgtgtttctctctcactttcacaaattactgacataattcatcgaaaccaaaaattaaaaaaaaactactactaaaatcgaaaatatttgttgagatataaatagttttaaagttggtatctcaaagaggggtatatatgtaaatatagacgaagagtgcaagatccggctgtcagcatgacataagctgacttcagcaacaccgtttaagccgcgagcccgcgaccgtccggaatggacccaacttctcacttatacttctccggctccctcaaacctgaatcaatataaatgaccatattgcccttggatctataaaataccaaaaagaaaatgatcttaaatctaaacaatacatgaaagcaagcaaattgaagaatggacgacttagctaggttggctaatgtttgtagtgaaaagaaatattattttaacctccacgttatttttgtttgagtgtatgattaagctataatttatttcattaaaacgaattaaaataacggagttgtttaataaagtagtccttttcatttgtacatacaattatttatggtaaacaaaaaaattgttcgaagagtttacactttacatatcaaaaaagaacaaaagaagaggaggtagataccgactaaaaataataattgagagacataaaaaaattacaagcaatgaatgaatattaaaagaaagaaaagaaaagatagatttgtgaaaatggcgtcaaaagaagagaggaaggagattgagtatggtttacgccaaacgaaatactaataaataataataaagaaaaggagttgttcgtatcgtcttctaccttataaaaccccacaccttccttgtttccctcttcctacaccgcactctcttcttcttcttcttcctctctgttttttctctctctttgtttggaaccaccatggataatgtcaaacttgttaagaatggtgttttgagattgccacctggattcagattccatcctactgatgaagaacttgtggttcaataccttaagaggaaagtttgttcttctcctttgccagcttcaatcatccctgagtttgatgtttgcagagctgatccttgggatttacctggtaaagctttctgattcttgctatatttagtaagttttcaatttagagtctctgtgacctttaaggctcataagattctcttatgtttttttaggcaatttggagaaagagaggtacttctttagcacaagggaagctaaatacccaaatgggaaccggtctaaccgggcaactgggtctggttattggaaagctaccggtattgataaacgggttgtgacctctagaggaaatcaaatcgttggtttgaagaaaactcttgtcttctacaaaggcaaaccacctcatggctcaagaaccgattggat

SEQ ID NO: 7900 - DNA, 2079 bp, Arabidopsis thaliana landsberg
ctgagatcttctcattcaatctacgttagccttccttcagatcaagactacgacgttttaagcaacaagatgcagttggggcagggatctacgttgatcggcttgatccagggacacctgttccgatcatcaaaggtgctagaccgattcccggacgacatcctttacttggaactcctgagccattgatgagtacaagaggaaagattgagagttcgagacctagaagaggttcttggggtcaaaacggtgacgtttcgtctccgtttgtgttaaagcctgcacctttggattttgatcagtgtacgccggcgaaacataggcttggtacggggagatttatggcggcgtctccgaatgttatgactagagggaggtcacctggtggtgttagatgttcttatggtggagggcttttgtcgaaaatggcggagagtcctgctgcaatgatgaggaagagctgtgttgttccgccgagttcgaagtttccgagaagtaaaagtgtttgcgatagagagacaatggcaaagaactctgttctttttagtccttttaaatcctctgtaggtactttttcctctctgtttttctatattggcttaggcatcaaggtttatgagttaacaagggttttgcaggcaaagaaaaacgattcaccgcctccgagtgtacgtactagaagagcaacagcagcttccttgttggaagatgaaagagaggctccaaagtctacttcaaagtatagtaagctggaaaaacctgagaagagtttgagtctaccaggaagacttagcacactgagcaaggtttgcgtaaatgtgaatgttagattgaatggttagtcttttaagaatgtgtttggtgatgatactgagagatgtctttgtatctgaacaggaagctatgcaacagcgagagacggctcaaaagatagctcttcaggcattgagagaagctacaacaacagaaacagtagttcgtcatctcaagtacacataacaatctcttcttgattggtttcattgtatgatttatggatgtttgtgtttgaaatgttcttatggatgttatttgggacaacgcaggacatttgcaaatctgagcaaatcagcaaaagctgattgtccagctgcttgcttcgacaagttcttggagtttcacagccagatatctgaaaccatgaacgaaattgcttctatcgaagcagctgcttcacctgctactactgagaaaaaatctgaggatggatcattaatactacacgaaatccagcataactctattgatcaggagaaaacaacatcaaagagaagaattctcctgaagcagcagcaaaagagatcaaacgatgagaacaagaaccccgcagtttctctttccggattaggaaacacggcgaggttggttaaagagatagagaaagaagctgcaaattggttcatggagtttatagaaaaggctctggagaaagggatgaagaaatgtaaaggcacaagtgatgcagatgttaagaaggttccacagtctctgattctcaaagttgtaaactgggtggaagaagaacattctgctgataacacgaaacgaccagttcatccaaaagcatcacatatcactagaaagctcagaatcaagttgaagaatccttagaccataagcgcgattttgagatgttaagttgttccttctacgtctactgtgaaaaggctttcagtttccactgcttatagagagatttattcatggattctattgttattagtcaagttcatgtacacatcaatgaaactaataagagtttgtgtttattaatcacacattgtcatgtagctttatttgcaaaatgtattgaagataaattactctcaaaatctagaaatcctagagacacagtacaactccaggttttcaaagcaaaagtgcaaatcataaaccaaactcgagaaataagtgtaaccacctggtatggtttagagccaggcagggttcttgaggggaagtaacaacagccttgacttgcaagtaattgttgagactgtagatacctttctctctacccatgccactcatcttataccc

SEQ ID NO: 7901 - DNA, 1150 bp, Arabidopsis thaliana landsberg
cagtgctttacaactatcaaatactagtgtcgccaaaccatcataatagagatacaactcaacaaatgttctcttgattataatcagaattatatattattatatggtacaatacctatcaagttttgtttttggttgtaatcaaattatttctaggacgaaatgattgtccctacaaagcaattggtaaggatatggtaagaggcacaatctctctttatacacaaaggaaggactcatgggattggataagctctttctgggtccctaattcctcatttcattttcagagaaagaagtttccaaaaccaacatttagtgatctctatatattatattcctattccccactaagtatcatcaaagctatatataaacaccactttgaatcacccaaggcaataaaccaaaccaaaacttcctaagaaaaaaaaacagagagattttttttatctttctaaagcttttttatagagtaaagatgttttcagagcacttaccttcttcttcatctcaagttttccaagaacacttcatcgacagtttcgtctccagaaaattgcttcagcagatcccatttgcccacaacgctcaacaagctcatgtacctgataagaacaacttgagcggcaatgttctcatgctgctctctatccttttgtgcggtattatctgctccctcgggttgcattacataatacgttgtgcatttatacgttctcgaagtttcatgatctctgatcccatctctatcccatccacaccaagagattcatcagtaaacaaagggatcaagaagaaagctctcaagatgttaccagttgtgaattactcacctgaaattaacctgccaggggtcggtaaagagtgtgtcatctgcttgtctgattttgttgctggagaacagctaagtgttcttcccaagtgcaaccatggattccaccttcgctgcatcgacaaatggcttacgcaacatatgacttgtccgaaatgcagacactgtctggttgatacatgccaaaaagtcttaagtgactgcaatgcagctgatcgagtggcagcgacagcaacggagagcataaatatcagaatttctcctctagaacctgaagcaagagtagccactttagagaaagcagctagagtatgc

SEQ ID NO: 7902 - DNA, 817 bp, Arabidopsis thaliana landsberg
tatctactgctttccactaatgctactccctcaaaatcttttgttttacacgagctacggactatatattggaatggtgtagccttcgtttagacattaaacaaaaaagatattacataattcaggcttatatatcagctatctacaggtggataaacgtgaccacattgttcataggagaaagaacaaatcaaactactatattaataatagaaataaataaaatttagtacttttctcggtttacacattcctctatttaaaggaggcaaacgagctcagaaggaaacccatttactctcaaacacttagagacattacaaatcatcggtaaaaagaatggcggaagaggcatctagtttgttcgggatcgttgagacaactgtggagctaaaatcttcggtggagaagttccatgacctgcttgtcgggagaccacatcatatgtctaatgcaactccatccaacattcagagcgctgagcttcaagaaggcgagatgggccaagttggcgccgtcatcctctggaattacgttcatggcaagtcaacttttatatctctttgtttatttatataaatatctatcaagattcatcggcttccaatgcatataatgttttaatatcgattaccttagatcctctcttattttggaaacctataaaatatatgtgaaatgataattttggtgcagatggggaggcaaagtcggcgaaacaaaggatcgagtcattggatccggagaaaaatcggatcacgtacagggtggtagagggtgatttattgaaagagtacacgagtttcgtgacgacctt

SEQ ID NO: 7903 - DNA, 1160 bp, Arabidopsis thaliana landsberg
ctaaggggcatagaacgagccaaaaaactcaatcaaaaggtttcataatagataactattaatttagatatgaaatgttaaataacaaataatcataaaaccttacacttaatatataagaaaatcatatttacataatgttcttgtttttattaacaattcagaacatatatacatacataaaattaattttaaaaataaaaatttctattgtcccttttgtaccgtcccaattcttatccggaattgcacaaagaaacagaccatttttgcaagagacacggccagataaaacgatctttttcaaattgtggtgtggcaagtcctcaacgggagaaaacaaaaacagataaacatatgtttattatatcatttaaaattatgaaataacgtgtattccatttacaaaagatatgatctcatagagttgacaaaaaagctatacgatctttttggatgatttagaaatataaaatactgaatagtacatgaatcagttggcttatgaaatactgatactccttcaaaatcttttgtatgacacgagctacggactataatttatatggctatatatagccttagttttgacatttctttaaaaaatatcaaacaattaattctgctttatcatcagttagcggcagatggttaatgtgatcacataggagaatgacttgatcaaaatattattatcaattagccataaaataaaattcagtcttgttctcgctctattcattcctctcttaaaaggagctaaagaaatcagaaggaaccaatttactatttactctcagaacgcaaaaccctacgagacacagaacttagtgggagatcaagaatggcggaggaagtatctactttggttgggatccttgagacaaccgtagacctaaaatcttcgacagaaaagtttcatgacatgtttgttgggaggccacacaatatctccgatgtatctccatccaactttcaaggctgtgagctgcatgaaggcgaaatgggacaagttggtgctatcctcttttggaattacgttcatggcaagtcaaattcatttttctctatttatataaatttttataagattcatcgattttcaaatcaaaataaataggaaacgggtggattgactcatatgttttatatattacttt

SEQ ID NO: 7904 - DNA, 913 bp, Arabidopsis thaliana landsberg
actataaatttaaagtattagacgagctaattatatttagcacaaacaatttcttctgtaacagtgtcacgcttatcactaccaaagaataaacactgatctgttttaatctcttattttctcacccatattcaaagtcaactattgcaagacttcgagataattaatttgatggctatactatttacttgacatttgggaaaatatattttcgctgataaatttggtttttacttctctctccgacggatatagaaacaattcaattacatgcgaaaatgataattcaaccctataaaccaaaacaaataacagaatgcacatttttttcaacgcgttaggtcacctatctttcactttagaacatcccttcacgtctctatataaacctcgactctgttatcctttgttcttcaagtacaacaatcaactctaagtctattatattcaagtctttgttttaacctaacaatggcttcaaataaacttatttcgattctagttctcgtagttacacttttactccaaggtgataacaattacgtcgtcgaagcacaactcacgactaacttctactcaacctcttgccccaacctcctctccaccgtccaaaccgccgttaaatctgccgttaacagcgaggctcgaatgggtgcatctatcctccgtctcttcttccacgattgctttgtcaacgtaagtttttttttcttttaccttttttgttttccttgcatctcaagaaacttggcataattgttatttggttatttccttctaatcatagtcataacttgcatatgtagggatgcgacggttcgattctactagacgatacgtcaagcttcacagaaaacaaaacgcggctccaaaccgcaattcagctcgtgggtttaatgtgatcgacaacatc

SEQ ID NO: 7905 - DNA, 599 bp, Arabidopsis thaliana landsberg
  unsure (1)..(599): unsure at all n locations
ctgattgaggaaactcaacaacagtaaaaagttcaatatcatttatgagaggaggaagagttgactttgttgtcttcactagctgcaagaggcaacttcctcctttacatgtcaatgtcgaatcgggttgggggctcatagtatctatacttaacattttaggactataaggtccataataaacttttccattcagcaaaacattgaattctctagtctcgttggctaacaaagtttgaagctctgcgaagtgaaggtaaatgtgaaaccgtgtggtagaatcctctaagctccatggaaattcccatgtcccattatcattaacacgggttgcagccgatgccattgcaccttgtggtagatcaaaaccatttgaagtgtttacattgagagttgtggttacaattttccactccttatatgagaatgggaaccatctacggtcgttgacatcatcggggtacctatacgtatcttgtattagacatagctagacaaaacctcaaagatgtttggcatcaaagaaagattaaaaatatttttatatttactcattatctntatgaaactataccaagatccaagaaaaagatcatttc

SEQ ID NO: 7906 - DNA, 2439 bp, Arabidopsis thaliana landsberg
gagtccagcaagatttggtcttagggtcccaaatagttggattcaagaatttcaagtggttgattccgggtgaattaaaggctccaccagtaatcgggtcaacccgaattctaccagtgaaacctggaaaagctccggatccaaaaacccgagtgcacttggttgcagggtccacaatatacattgacgaagattcatggtttttctttacgtcatcgttgtacggtgtcgtctcagatttgaataaggacttggttagatctggattggtggccaaatcggctaaaccggtggctagctgaataaccagtgcgtcagctgcgacttctccacttgccggttgataggtcatgccacgtggacccttatcggccgtgtggaaaggccaagcgcactctccgggacattccaccttcgggttgcttaccattatgtaccgtcgtggttctttttgacctgcgtgggatttacgtaatgacgtcaaatttttcttttgtttgttgtctaatactacaatcttttagaacaaactaaaaaagctacaaaattatgtagaaccaataatctttttctcaagggtaaaatagattaatgttatgcaatttaacgaggagaaaatcaagacatacttaaaatatatttattgtactagtgtcgatctctcacggtgccatattaatccaggtttaaatctgagagatgtagacggaaaaaaaaaacgaagagaaagtcaaacctttaattttggctagggcgttatgttggcaagttccgtcacaaaaccctacgccatgagccctaacttgcgccgaaagtaataccacgggaaccactttcgacatatttccgatagccgtctcaacaagtttctcaccgttccccattgtcaattcctttccatacttcatcttctcatccacataactccggacaaccttcaccttaatcctcggagctacggttctgttactcttcttctgtcggtaaatatccttcacctcaaacctctcttggtaactctccaccactttccaccacgccgataccttcgggtcaagaccttccttggcgtcgaagttaagcgattctatgaaatcgtgaaccctctccttttgagtaggcgtgaattggccgtaccatagtaaagagagatctagggttccgtttgggatttgcgaaggtgactcacgtgaaaggcagagaggcgccaagaggaggaaaatgatgacggatatggaggaggaggaggaagaagcagacgccattgccattgccaccgcgtgaaaaaaacttttttctgttcttttggcctttgatggggattttctcaggcttttttgagggaagtaaataaaattatcgtttaacctattttttgacatcctaagctggtgattttgtttttggataattgccaatgaagcaaaagagctattttcaaccaagctaactattttaagaagggtggtgaaaaactcataagaacttccttacaccttataaacacgtaatgatcagcgtataaaacccaaaaaacagtacattaacggtgactatttaccttttcattacagagttcacaatgagaaatcaaatgaatgggaaatatagttttaagttaaatgaattcgtacgctgatgatgaccctagcttcggtttggtttgcgagggtaagacacaatccgtgtctttgcaaaacagccatttcaaacctttctcatccttgttagccagcttagatgccactgacttgataccactcttcatataattcacaacaaacatcgccacctctctgcaaattacagtaaattgttgtaaaccattatagagtacaagagaatcaaagacttgttttgtctgtgagtaaatctccttacaagggtgagcaaggagttcgagaaccgttaatgaagtagacaaacaagaacgcatcaaaatgatgtcgattgattagataaaatccatgtaatctccgcacgcatctgaacatcaatcttttgtacaaacagatcgcagcattgttgtgtgcaatcacatgaaggtaaactccgcgacacacagataaaccggaagcatatttaattacctcactaataagtgacattgctgagagttaaaaaagttgcagaaacatcagaaattataaaaccaagcaatatatagaacatgtttcagatacttattagtattataagagtcatgtaccgattccacggtttctgtatgtttctacaactccgagtgtcaagatgtatatcaaagtctcctctcctttcgaggaatcgtaatgtataagatcatctatctgtgcaagacacagaaaccatctgccagctgatgaagatagataataagaagataaaaacaacactagactcaattgcattaccagagctcccaaacagattattcaatcataattcagacattattac

SEQ ID NO: 7907 - DNA, 568 bp, Arabidopsis thaliana landsberg
ttcttctttttacaattcttgttagaaaaaatatttacaaaattttcttatttgcttatatatataaaaaatcagtaagatattaatatcgattggtaatttggaagataacttttttcaaacgataaatttgctaaaaacaataaaatattcggaaataaacaaaaaccctgattgaagaaaagtctttttgtttatcagttcaccggaggcaaaaatcgtctctcgcttgagctgcgaagatgcaagcagtaaaaagatccaggagacatgttgaagaagagccaacaatggtagaacctaaaaccaagtacgatcgtcagctcaggtatacatactctttttccttaaactctacttcgaactactcttgtcgggaggaaaattgatgaagtagtaatcgttgggttgactgattaggatttggggggaggtaggtcaagcggccttggaagaagcgagtatctgtttactcaattgtggccctactgagataagaggctttgaagaatctcgtacttggtggtgttggtagcatcaccgttgttatggatataaggttcaatgg

SEQ ID NO: 7908 - DNA, 1499 bp, Arabidopsis thaliana landsberg
agtattcatagtattgaaaactttaggggtgaagatgatgatcttatggagcttttatggcagaacggtcaagttgttgttcaaaaccagagacttcacaccaagaaaccttcttcttctccaccgaagcttcttccttctatggatcctcagcagcaaccttcttcagatcagaatctttttattcaagaagatgaaatgacttcttggcttcattatcctctccgtgacgatgatttctgctcagatcttctcttctccgccgcacctactgcgacggctaccgcgacggtgagtcaagtcaccgccgcgagaccgccagtaccttcgacgaatgagtcgaggccgccggtgaggaacttcatgaatttctcgaggctgagaggggattttaataacggtagaggtggtgaatctggaccgttgctttcgaaggcggttgtgagagaatctacgcaggtaagtcctagcgcaacaccgtcggcggcggcgagtgaatccggtttaacacggcggacggatggtactgacagttccgccgtagctggaggcgacgcgtataatcggaagggaaaagcagtggctatgacggcgccggcgatcgagataaccggtacatcgtcatctgtagtgtcaaagagcgaaatcgaaccggagaagacgaacgtcgatgataggaaacgaaaagagagagaagccaccactactgatgaaactgaatcccgtagcgaggtgagtcaaaaaaaaacagaacagagtcgttgttagctatcgtgcgcaagtcaaatacggcgcattttagtctgactttgtagttttcagcgcatttttaattaacttttttggtgttttcttgtggtgcaggaaacaaaacaagcacgtgtatcaacaacatctaccaagagatctcgtgctgctgaagttcataatctctctgaaagagtacgtttgtgttttttcttatgtttttgtaatctttttcgataaagatttcgcaatgaatctgaagaatgtcgcggatttggtaacagaaacggagagataggatcaatgagagaatgaaagctttgcaagaacttatacctcgctgcaacaaggtcttcgacgatcttttttctttctcttcaagttattgtatacgttaaccttgttactgattgttgtttctttgatcctcagtcagataaagcttcgatgttagatgaagctattgagtacatgaaatctcttcagcttcaaatacaggttcattttctttaaaggattctaagtcttgaaagccctttttaagttcttgaaaatgtatactttaccatgaaaactccagtttatatgactgagattaatgcagatgatgtcaatgggatgtggaatgatgccaatgatgtatccgggcatgcaacagtacatgcctcatatggcgatgggtatgggtatgaaccagcctattcctcctccttccttcatgccattccccaacatgttagccgcaacaaaga

SEQ ID NO: 7909 - DNA, 969 bp, Arabidopsis thaliana landsberg
cattcttcttcttacatcagctagaggcactctcagcccatcaatactcccgcgcaggagattgatcttgtcctcaagatcgaaatgaggaaattgctttaccaaggacactaaccgctcccaagtggcatcgattgctgacagtccactccattgaactaacacttcggcaccctcagttgtctcactctttctgatatccaataacttctccggttcagctgcccactctaatgatggtgttagaatccttggcagctcttgtggagtaaacgaaggaggaacagcttgcttcagttgagatacatggaacaccggatgaatggtgctatgctcgggcaacttgagtttgtaaggaacactaccaatccggcggatgatctgatatggtccgtaatatcgttgtgagagtttttcattactccggtgtgcaaaggagctttgtctgtagggtcaaagcttcagatataccagtcatcaaccttaaactcaacatctctttggtgtttgtccgcagacttcttcatttggttctgagcaatctccagattctccctgagttccattaagagtccatctctatccttaagtagctcttctactaaccaattagctgaaggcgtgtctccatacctcagcaatgtaggtggatctctcccatacactgccttgaaatgtgtcattttggaggctgtgtggtaagatgtattataccagtatttagcccagggtagccattgcatccaagaggtaggtcttctacctgcaaaacacctcagaaatgattcaaggcatcggtttacaacttccgtctgcccgtctgtatgcggatgataggcggagctcttcttcaagatagtgccttggatcttgaacattcagaccagaagttactgagaaacaccttatccctatccgagaccaattaacttagaaaaccatgtagtcgcacaacttcccttatgaatg

SEQ ID NO: 7910 - DNA, 2262 bp, Arabidopsis thaliana landsberg
ttgttgagtatgctgatcaattatcttttcatgtttggtgtccaaaggtaaaagggttgcctttcaacaagttctcatggttaacgacccactattcatttgctcgaatgggtgcaaaggtcaggctctggctctatgtttcttgcgccttccagccgccaaagattctatcgctagcctactccttgtaaatattcttcttcatcataataaacccatttcaaaagttttattcttttgataaacccattccaaatgttccattctttgatttgattcttatgtttacattttttgggttattacagaatggtgttagagggtttatgcttgacttgtacgacttccaaaacgatatatggctttgccattcttacggtggaaattgtttcaattacaccgcattcgtaagttctatatagattcttataacttgatcggtccagtgtcgaaaatagttctaattaatttgttttttggtttgtatgtagcaacccgcggttaacattttaaaggagtttcaagtgtttctagacaagaacaaggatgttgttgtaacgcttatcctcgaggactatgtgaaatctcctaatggtttaaccagagtgtttgatgcatccggattacgaaacttcatgtttccggtatcaagaatgcctaaaaacggagaagattggcctactcttgatgatatgatatgtcagaaccaacgattgcttgttttcacgtctaatcctcaaaaagaagcgtcggagggaattgcgtttatgtggagatacatgatagagaatcaatgtgagttcgtctccaaatatactaatacatcatattatgataagttattataaatatgaaatattgatataatgttatgattttgtagatggagatggagggatgaaggctggagtgtgtaccaatagaccggaatcagttgcaatgggagatagatcaagatcacttattctagtcaattattttccggatactgcagatgtgatcggatcttgtaagcagaactctgctcctcttcttgacaccgtcaaaaactgtcaagaagcctcgggaaaacgttggcctaacttcattgcagtcgatttctacaaggtacgttttggtgagatttggatccggttaatgttaacatttgtgtaatgttcatgtatgtgtgtggtggtttagagaagcaatggtggaggagctccaaaagcagtggatgttgcaaacggtcatgcagtttgcggctgagaagatatagccgcttgtaaagttagtattatatgattatgtagtactcactatgtgagttatgctattatatgtaatgaaaaattgttatttaacgtttttgactttgtgcaggagaacatgccatatgggacgtgtgagaagcaagaagagaagaaaccggaatcaaacctaatgatgatagcaaaacttaccgcggaagcgactaaaggctatggccacccatctaccaaaccgaccctacttgggctttctgtgtttgttgtaacctttgtctcacttctctcaactttttgactcaaatgatttactttatacaaatgacaaaactctaatctaaccatgttccggttcgcaaagaaccaacgaaaacaaaatctattttacttgtatagtagtcacctaaaatacacatacaaaaagaaaatgcatttattcaataaggggtacttacaaatatcaaccatgtatatcattttaaaaacaactttgttttagctagagattccgaatccggtctgggttaagagcattgtaagataccggtggcgaagcctgaccgtctgatccttcttgatccggtttaatccggtggggatctttgccacaagggagataaaagaaagacttaaagttaggacaactctgtttccgcaagaaaaacttggcgcattcccatggtgttctttgattcgtaagatctagaatacaattcatacccacatcaagaatcttcctcttgatgagtgttcgacattttggaccgacctgtgtgaagtaattgtacgagagagaaaggttcttgagggctgagagctcgcagacaatctccggtatagtaccgtagaaattgtttctagccaaattcagctgctccatcttctttaggcatccgaaagagtacggaatcggaccggttaactggtttaactcaacatcgaaaaccgtagctcgggtaaggttcccaatttggtacggtaagcaaccagttaacttgttattcaagaaaaggac

SEQ ID NO: 7911 - DNA, 821 bp, Arabidopsis thaliana landsberg
tgttcttgatgacctatcggtgatatgttctgtgcatcaagatgttaaagagttcacttatatcgttttcatctctgcagagtttaactgtctttatagaaaattgtgaggtttttgatgggtatgtgatagatactccttctttaaagtatttgaaacttgaagacgtgcatgaagaggaacactactgtttacttaagaaaatgcctaagctgagggaagcgtatgttgatgttcaattagatgatctcaagagtcttattggatcaatcacatctgtcaagcgtcttaaccatatgttcagagggaactagtttccatttatcaactgaaacttgtcaatctcaattatggaatcctttgttattgattttaatattttgtggacaggattcgtatgatgatggctttgttttcaaccagctcgaacatctgaacctatgtgtttgcatgccagaaaagtcgaaaatccttggccagttgctcaaggattctcctaacttgcgagtattgaatatctttaaagtgcaagtatgtttcattcataaactatttcttgttactctgtttggttttaatcttattcttctgcttggtcttagggtcatgtgactctttctactggtgtggattgttggaatcaaccgatttctgtacccgaatgcttgctggagagtctacaaatattcaacttgtcacattactttggaaatcaacaagatcgagattttgctgtttacatcttgaagaacgcttgtcaaataaaaacggcaacaatcctggctgatgaacccgaacatcttgttccgaaactgtaagga

SEQ ID NO: 7912 - DNA, 937 bp, Arabidopsis thaliana landsberg
tgttcatatgatctctatctacttacatgaccgagagtctgtttcctcactatttgtgtctcatatatggtaaagtaagatacggtggattggtttctaggttctgctagtccaattccatcctgaaaaacaccatttagctctctaaattgtttgtatacacatctctgtttgcttgaaagtttactagtcatatgtgtagaggctttataagtattcccttgtcgattatcttacgaaatccgaactatgcttctctggaattcttattaggttcaatgactttggaactgacggtggtccagcagctaaagagttagctccaaagcttgatctgaccaaagcacatctctcttccatattgggagtatcattgcccaacttagaggtatgcccattgcgttgattccttgtcttcatgtctcttatgctgtctatatatatatatgttgcgtctgacttggaaaactaattttgaaaggtgaaacaagtcgtgtgggctattgttgctctgaaaggactaggaggcttactctttgttatcggcaacatctttggtgcctatcttctggttaggatttcttcacttttgttttaagtattcaaaaagttaagttgttgtattgactttggatttcaattctttgtttcttattaggctgtctacttggtggttgtcagtcccattttatatgatttctacaactatggacccgaggaccgccaattctctcttctattgactgaattcttgcaggtttgtctatacacctttcttcatttattcgttttggcttgctcttgccatgttcttcgagctgaacctagtctgaataaagaatattcctttatggctcttctaaaccttcttaaatgattctcattcttttgaatcaatgttttatcacagagtgttgcgcttatcggggcattgttt

SEQ ID NO: 7913 - DNA, 1595 bp, Arabidopsis thaliana landsberg
aaatattgttctgtctctggcatgggtccagtttcaacaaaccaaaacttcaagttccccattttcaaaccacagtataagatcatgagctaatctaagaatcctaaaacagaaagaaaacaaaagttctaaggaaagattttgtcgggaaaaaaggaaaaggcaaaggtattgcttgctcatggcaaaaccagaagaaaactaatattgatactaggcagctttcggcttacgtgtcctcttcttcaaattcttcttggcgggtgtcgagttcttcattccgataaagaagagtaacgctccaaagagtgcaacgctctgcaataacaaaaggcatgagatttttatcgagatattgtccattgtgataaacagtatgatctcttggctttacaaggctgaaactttaaaggtgcaaagctgcgtttcttgagattacgataattgataataagtttctggacaaacctgcaagaactctgtcaacagaagagagaaatgacgttcctgaggtccgtagttgtagaaatcatagagaataggaccgaaaaccaccaagtaggaagcctgaaacaaaaaagattaagattgtaagagatcatacaaatagcaagctttttgaatcccttatttgtaagatgaacaagaagaagcctaaccagaagataagcaccgaagatgtttccgataacaaagagtaagcctccgactcctttcagggcaataatagtagcaacgaattgtctcacctataaaaattcattctccaagtcacaaaacgacacttttaaagagtgcgaacaagagacaagaacatcataaccaggtcattacctctattttgggcaatgttactcctaatctagaagataaatgtgccttaaccaaatcaagctttggagccaattctttagctgcaggaccaccatcattgaacctattcaaattcccccaaataagcgttgttaaaatatagtaatatggtcaaaagaggaagataatattttgagctatcaagtaaacaaactaaaaccatagtaacgactaacgaatagtacgagaacaatcttattttacatttatcgatcatcttccatttagagtaaatgatgctttctctttagaccactaaacattggaataaccaaaccaattcaacgtctaaccatatgaacaacagagctaaagacatctataaacgaatttaagagtgaatatatgtgccctaaatgcggtaataagccaaagacagattcaaccatgactaaatgacatcatacattgattgataaaacaagatacataaatattcaaactttgataaatttgaagtatccagagatcacaaaaacctaaaatccaaaaattctgctgcgttgattatatgtatttaagctcaaaatacaaatcaataacagtaagagatctagatcgaaacataacaagtacagaaaatcaaatcgtgatagattcagataaatatccaaatttcacgaaaccctagatatcaaaaagaacctataaagcttttcaattcccagattagatctagcacgaagcaattcacaattaagcatcggaaaacaatccgaaat

SEQ ID NO: 7914 - DNA, 2590 bp, Arabidopsis thaliana landsberg
agacctatgagtcaaagttcaaacaattcaatatgtcaaaaattctcgggaagttcgatattggggtatagtggaatacaaagttgtcactttatggctacggttggcaaagcgttacagtgacacaatatcgacaacaatttggaaacacacaatgatagaataatagagagaagcaaaaaagttatgttagctataaatctacgaaccaagtatattctgagtataaagttttgttttgttataaatgggattggttaataatttgccaatcaagtagtgattttactacaaaatacataatgctggatatatagccaagaatatggatatagatggtccatgtctacgacaaaactagcaatgaaattgtggcggataaaaagacttgatcatttgtcgctattatgttgctatttgttaatccatagatttattcaaaacaaatgactccgatttggcaacagaaacaattgacagaatttatttatctggtgatatgatgatattgacattttcaatatcgaattcgtagttggattcggattaatcgtgaccaaatatttataattccatatattagcattaatctttcttattcgagattaagaaaaaattcgagtaattaaaaaaaaaaattgtttgaaaaaccattaaaatcaataatattgtattatatacagttatatactgaaattcaaatacaagaccacgacaaaatgtttactctaatgtttcaatttaatgaatcattcggtattttgaagcatgttagagcctggtagtactgtgcatgttatacagccaatatcaacctttttcgctagttttatgtaaggctatatcgtttatttatgtagcaaccatttaaattgttagtcctttttaaaattattgcaagatgtgagtgtgtacattcatacattgatgacggactggtttctagttagttggtattaagccgaccaacattaattgttggtttatgtctacacatgggtactagtctaccatttattatcatcattatttcatttatcttgcaaattaatactttgatctgtttattgattaattctctctattgttcattatgctgtacataaacctaaatatatgaattattagcatctgatgaactggatctttccaatattgaagtttgagagttggtatgcgtactgttgaaacatgtgtttcatgcagtaatcacgatattatggaaacgacgtcgctgccttttgtctttgttttctttttctctattatttcccagtaatcacgatattagaaatgatttaactattaaaagcattacattttaccaacaactttatcccaatgaaaacaaaacagggacaataagtccactttgggacctcaaatccgaacattttatttacctacaaagctacaagctacaactacccgtccgaggtctattttggacaccttggcacaatcaatatgaaataactagaaaaatactcgaaaactaactagatatgcaactccaaaactaattacttctttatcagatttataatatgaaataaattcattatgtaaagggtcccttatataacaaacgtcttaacgaagacagcaaatttataaatgacaatgactacaatactggaacagctaatagggatggtatataatggagaaacaaatcgaaatgtgctgctattaagaagtcatagtaattcattatcatcaatttaccatggcccatattaaggagtttgtatgcatgtgggatacacatttatacaaagaaataacaaatttgaatatttgggacacgctttcgtctacccttgttcttgcaatttggacagtgaacgcttctcatgaatgagaggtacgtttctcgaacacgttctccctttaaatttactatttacaacatattatatcaacttacccgtcgctgacccagtgcatttgcactacgtgcagccaacctgcttataatattcaattgatatataattttataacttgccctcactcaattttgctgataacctacatacacttgctaataaaaacatcatggatgtctaaaacgtttaagtttaattataaggaaatatataacaaacatgtcatattttgttgtgttgtagtggtataattaacaagttatgttgtttatcaaaaacttcaaaaaaaaaaaaaattaggttacaccaaaatagaatgttatgatgcccaaatatatgtgtgaaaaaaaagataaaccaaatttatgatctaccatatgacttatgagattcagctaggttttgttagacttttgtaacttgcatttcgtgtgaacaaaacatgaaaaataatctgactacttaatttaatatcaaggtcccatataagtagttgagctaatagtattatctcggaaccacccatcattaaattcgaatattattccatcttttttttttttttgttaagtcattactattattaatctttaaaatatttttatctttcttgcactctatatgtcactccatcgctacttgcccgcatttcacgaaaatccgcctaattcgccaattttagaattcccattctcatt

SEQ ID NO: 7915 - DNA, 569 bp, Arabidopsis thaliana landsberg
  unsure (1)..(569): unsure at all n locations
gaaacacgtaaaaattaaaaaacctacttgaactattgatatagtgctttgttataaatttacgttaacaaatgttagtcaacactaatgattgctgactcagctgacacatatgtattgacgtagcttattcttcaactacaatgatgtgtttttgctattttgaaatcaatttaaaaaaaaaaacccgtaaaaatagtgattcgaaccggaaaccgtttgcccaactcggatctcccatcacaggatcgtatcctatcatatacacatgcgtttggccatccataaacgtcttaagtggcatgaagatctcgatttctaatgaccttggaaattactttgggtttcagctttgagattactggttttagcaaatagcatatttctatggagactctaaaatacgaaacttgggagaagtaataacaataatgaccgcagatttttgggatctattgttcattataattnttgagttagacatctcacacaactagtcacgaagctttgtttttgtgtgatttggacctgaccaactacaacttatgtaactatcaaaacataaaaat

SEQ ID NO: 7916 - DNA, 2339 bp, Arabidopsis thaliana landsberg
ttacatcaccacaaaacaaaacacacacagcagaaaatgactcataacagtgtgtgtgacaagagttttacaaacaaacaaagatgatgaagcaccctagacacagtttgtccatctatctctatagccttcctctgtttttgttctgttttttttttcccctgattatagtttcagacaaaatacataaaagtttgacaaagtaaggcctaaagaaagatcaaaaacaggactgagacttaatagggttcttttttcttatctgtttatacctaatatgtactactagtactacaacaacagagaaacaaagatagaaacaaggtcttgtagattcaccttgggtttaagctctaagcaactctgatgatgctgctattgctatctccatcgctgaagcttggcatcatcgtgaaagccgagtgtcttgagttgggttgctcgttaagattaaatgaggatgccagacaaaggttgagagaaagtggagcagcatctgtgtttagattgaatgttggctttgcttggaaggttactggaaccagatatggatcgttgagatgaaatgtctctggtgcattctcagtttttgtcggcacgtcagtaaaaacttgcatcgcttgctgtccagagctgatgttggtttcaggtagtggtgagttctcctgagtaggatcttgctccatggccatttctgtaacctgatcaaaccaatcacacctaactgtcacacacttaccattattgtttataaactacaacttaaaagatatatacccaattagaccaaaaatcattatgatacttctccatattactttgtctttaagttctaaagaagaaatactaaaaacctaagaaaggaaagagctttgagaaagcagagaacaccaaagaaagtaagaaagttaagttctatcaactaagctaaagtctagaccttttcattcacatatgatttagctaacataaaatgatttaggataagagtagagatttaccgtctcagtagtgatatcaaaaaggctagatcttcttcggcgacggttgaggttggttcgtcggaggaagtatttctgagcatgactagctacttgagtaggagtcctactcttcacaaagtttcttgatattcctttccaatctccttttcctactttctgcaacccaatcaagaacctcttatgctcgttctctgtccatggaacccctgttttgttcaacacaaacaaacaataatcaacgacaacgaatccatagctcaaaaccaatcaatcaccgacataaattccaacatgcatagattcaatcacgaattggataagattcaaattagagacattctaataatacaatcaatcagaatcctaagctcttatcagaatcagaaaaagagtagtacctcgtttcctcccgccggaagaagacgaaatctggacagcgtcattggcggaggcgtaaccgtcagcgacaatcaccgtggcatccgtttcgttcttatcttcaccatctccagctccggcggtgactatcttagggatctcatcctccggagaagacttttcataatcagagagattgttcaaactcacacactttctcatcggatcaaccacgactctaactccgaacaacatgatctcatctctctttcccgtaacgccgcagtctccggtctccgacgaactactaacggcggccataaataaaacactttttcctattttgccctttgcgtcgcttttggtttttaccctttcgaaataagaaccgtacagattaggagacgaggtgtgagtggatctgagctacttcttctgtcttgtctttataaaaactcgataagccacgtggcattacttactctgttgtgtgttattacgataacatgacacgtgtttatttatgatttgttcgtcactcgtttcctctgtgacctgcttgtctctctatatttatcatttcttccatttggatttattaattaatgagttattttctttggatatattctgataatgtctctctctctattcattatttttgtcattttaattaaatgtgttttttttttgttcaagcaaagtgaatgtgtctcgacgtccttctctcacgtaaaaaaaatgttttctagtgtgattttcttattgatgatttgaatatagaaatgagaaaaaaaaagttggtaaaggaagtatggtgtgtcatgcgcatgaagatgaaatgtgatttttgaatggtagttcataattaaactgtataagatggtattataagtgtgttctataatggaatggtagtgttaaacgaatctggtcaacttacttagtgcgatttcc

SEQ ID NO: 7917 - DNA, 803 bp, Arabidopsis thaliana landsberg
tcttaggagttccatggactgaagaagaacacaagctgttcttgcttgggctgcagagagtcggtaaaggagattggaaaggaatatcaagaaactttgtcaagaccagaacctctacacaagttgctagtcatgctcagaaatacttcctcaggcgaagtaatcttaaccgtcgccgccgaagatctagcctttttgacatgactactgatacggtaaatctctaatcctttgtgactctagtaagttaagtggttaggtttagtttttagcttagttgtttaaaagaaactaatagagagcctttgtgaattgttggttagtgaaaacttaagtataacaaaactgattttgcttggttttgttatcaggtcatacccatggaagaagatcatcaagtgcttatacaggagaacacatctcaatcatcttctcctgtaccggaaatcaacaacttctctatacatccggttatgcaagtctttcccgagttcccggtaccaacagggaatcaatcatacggacagcttacttcatcgaatctcatcaatttggttccattaacttttcagtcaagtccagcaccgctttctctcaacctctcactagcttcatctaatcttaatgaaccatctccttcaatgcatccagcattcaacacgattggagtcgcttagagcttatcctaaaggtgaaaatctgcaacacaccctgtttgtttctttgctgtacagataggtcttgactttgttataaaaaaattcgtcaatttatgtatttggctaaaaaaaatctgttgaaaa

SEQ ID NO: 7918 - DNA, 2734 bp, Arabidopsis thaliana landsberg
  unsure (1)..(2734): unsure at all n locations
ataggtgagcaaatagcattgtggcaccagatataaattaacggggcaaatggaatcttacattgatcatattcccatagtcttccaaaagggctgtgacaatggcttgagcattattggcagcattggcggcagcaagaagctgggcagagttatctcctagagtgtcaaaaccttctagatcacattctccagccaatagaggacgtaagagcaatggggacatgcatgcagcaacagcagatgaagtcatgcgattctcactggaatgagaggtgatagtatgcatcatctttagcatcctgcagaatacaacccacgctaagaataaagctgttttaagtaacctaaataatagacttccaagcagctttctgtgaaagcaccacatatttcccacatcatatgcaactgagtattaagttttcctcttatgttcaatgcttaaatagaatgcctaagcagttttatgatcatttcaaatactacaactgagagcataccgcagtagtagtcgcctgtttggttctggaaatgtttcaattatagcagagcgcagtgagttaacccgagcttcgttctgatcaatttctacagaaaaggtaaaacgcaagttatatacacacatacaccaaagtacaaacatagattccatacatataaagacttactataagcttcaagcaaagcagtgcagcacgacgctgggactggagaagaaggcaattgccgcagaacatgctacagaaaaaatagcatgacacaaatatgtcaacacaacaattaaaactggaaatcatagtttatacacaatgtaccttaacacagtctccaacaacatgcggatcctcttcaggactgaattctgtcttgcctagataagtacatttggaaattttcatttaaaaagaacctttcagaggaagacatcggataagtaatacaaaaaatgagcttctatcctaagcccccagatatatataacatttcaaagtttctacccaatataaagggtccacatgtggaagatcaataccttgttcgtattcttgaactctgcgttctacctcctcaacatctgcagactgtattaaaattccttctactttggttcctgtgccaacaaagaggtgcacaatcaaaacgaaaacatttctatgggaaattagaaacaatcaccacttctataatagcctatatgatgagttataaaaggaattaaaaagtatatacggcactgaagataatataaaaaaattatttttctagaggacaaacaacagacaataatgatatcagatggtgaacatataatgggaggaacgtaattaaactatgaggccaatactcaccatatgtcttaagaaattgaagtgctttctcaagaaaagatggacttccatcgatttcttctaagctagcaaaattggtcttccaacaaccgaagacttctacgggcgctgatccctccttgcatgtcagggtgttattgatatacatcagcaatatgaaagcagccatagcagaggagctgataataataaaataagtgagagctaacatgcattgaaagatgcttcaatagtatcgtttgctgctgttcggaatattccattgtgaccagtcacaagtgctgcattgggagcttgtgcaagggcttgctcaagggcagccttccattcagacaagtcgtccaatgtctcagcctatgagagccaaataattagcattcgatagaagcataacatagcacatatcgaaaaagggggattaaaaattaagttagccaagcaaatatataaatcaccttaagggtgaaggctcgtccatcacgcccatctgggaatagtacagtcagcaacttcttatcttctctcaccacgacactgcaaacaaggatgttaacgcaggctagaaagttggagctattcttataaacaaaaaccacatgaaatttctacctccccgaactgttcaagtcaatgcctccaagggtcaaatttacttcacctcccttttgtggtaatgcactctgtcaaacagttgaaacaatgagtttaagttataaaatagttctagaaagtttggagttgataatgtaaatcaacatcctcctaaagcttttagcaaattaatacaaccatctaagatttctattgatcaactatcctaagttccaaaagctcaacagtaaaagtattatatgaattggagaaaaaatcacatcaaaggatcacaaacacttactggatcatttttgaaaaagaccaaagaagttcgggtaaggataaaccaacgcttcttccaggatgtccaacctagtcctgccaatcagaatgccataaagaatttagtaaacaacaagatgcttgtaaccaaaaaaaagataattttgaaagaaggggaaaataaaagagttcaccttttgatgatatgaagagagggccactcttataaacctgtcaaaattattatggagtacaatgaagattagcatcagtttgctttaactgtggaattttcatacatagcaaaacactcagagctacatatataagaacgaacatattttagaacccagaaaacccccaaaagatgcatatattcactggcactaactcngtcntatacaaaaatcgtactacacagtgtcacatatgctttgaatcaatacaacacactattctatttatctcancagtattcactttcctacaagcatgcatgaaccaac

SEQ ID NO: 7919 - DNA, 1396 bp, Arabidopsis thaliana landsberg
  unsure (1)..(1396): unsure at all n locations
tctgcggctgtatgagaatcttccggtaatgaagaagtttggtggatttctaacgtaacagcatcaagctgactattgatttttcactatataatcatggtcctgactctagaattattttgttgcatggtttctgaaatattagagcaaatgaaatgagtaatctttgtagtttctgctaaactgtatgtatctggtttgactctatgtttcgaacttagcttttctcaaagtccagtttaggacgttctttctggaagattatgaactagaatgtactattacattacctactactactagaataaagtatcttacaataacgttgcttatgccttatgttatggaaacaatgataggctaataggatctggaacattacaaagatacaaagaatttttccatagcttaaccaaattgtttttgattcactgatttgggttgagagaaggaaatgctggaatagaccgtagtatcagcttccggccattacctcttctccttaggattgagcctgactccgaggagccgggttgagggggagagactctcttgctgttgggagagatggccttgatgttagctataggggaattgaggagaatctcaggcataatctctgttttgtcctcagtcacagtttcaagaggcttcttctcattctgtgattgcgccaaatcactgtttggttttctgaaagaggaagaacctgtgccaagaaaaaactgtgtcggaggcagtctgttcttagacaagaatggctgatgaaccaccaaatgtctgcagaacaaaggtaaacagcaaatcagtagctgccttgtttgtatattgtttgaannnnnnnnnnnnnnnnnnnnnnnnnnncagtggtgtcgaaggttgatcagaacttgggttctgctccacttctttcgacacctcgacgttgtgttggatttttgctattcttttctcatatgtctcctgattctcctctagtttgctttccatgataacaagtaaagaccctgagattaaagtaacgttaaatcaaaagactttgggtctggggttataaacagtaatggaaaatggagctacgaatactaaccatcttttctgccgaatacatttgtgcatccttcgcatctacagttcatggaacagccgactccaccctacaagatcattaggaacaaagtatctaaatcagaccattgaatataacttacacagaaaaatattgaatacaatatgaatagacgatgaaaggaaaacctgatagcattcacagtatttcttcatacagtttgatttcttgcagttgcagccacgtttgtgtcgtgcagaagccggggttttactggcatcatcctgtgcaagataacgatgtcatcccttagattaatggaggaca

SEQ ID NO: 7920 - DNA, 957 bp, Arabidopsis thaliana landsberg
aaatcaaaggtacgctaatttttcttatttttaaaattgaagaattggtccaaataccaaagttacttgaaccaatgaagacattaataagcagaattcacgtaccaaagaccaaagtgaatctcgttgatcatataatgaattatgatatatttagtagtagttagaaacatgcaaatagatataggttgatatgaaaattggcataaaatgtatgaaccggaatactattagtagcattaactttcctattattaacaaaactagcgtgtatgcacgttacagagaaagatttattctttattagagatgaaatttctttagttatacatacactttggttttgtaagttaaaaaaatataactccctcctacgttaccaagaagtccaccaacgtggtggattttaaaataactaaccaaaaacacaaatcagggaaaagtcgtaaattaaaactgataatttggaggaaaatatagaaaaagaaaaaggtaacgacattaaagaaggtgcacttaatgcgcagtatgtcctcttgtgccagcttgttgcaccgtcttccgtctcctcctctttccctctctctctctctccaaaccagtcctacttctctctctagaaacctagggaagaagaagaagacggtgaagcgagcgatgtcttcggacgacgaaggaagagaggagtatctcttcaagattgttgttatcggcgactctgccgtcggtaaatctaatcttctatctcgttacgcacgtaacgagttcagcgctaactccaaggcgacgatcggagtcgagtttcagacgcagagcatggagattgaaggtaaagaggtcaaggctcagatttgggacactgctggtcaggagcggtttcgtgccgccacttccgcttattaccgaggcgctgtccgggcccctgttcgttaccacattaccccgccgccccacttt

SEQ ID NO: 7921 - DNA, 620 bp, Arabidopsis thaliana landsberg
  unsure (1)..(620): unsure at all n locations
attaccgtggcgctgtcggtgccctcgtcgtttacgacattacccgccgcaccactttcgaatgcgttggacgttggctcgatgagcttaagagtaagtctcgatgtgaattatgcgattgactatcgatttaggggatcctcatgatctaattaggtcgtacggattgacttagaattgggaaattttgaatctagttttggtagattatagaatttgtgacctagctagaacaaaacagaggattattcaagaaccgcttaggaaagtatctcataatgaacatctttagattggtctgagatctaaaattgattcatttgctcttttcttggttgtttcagtccattcggatacgacggtggcgagaatgctggtggggaacaagtgtgatctagaaaacataagagcagtgagcgtggaggaaggaaaggctctagccgaagaggaaggactcttctttgtgnnnnnnnnnnnnnnnnnnnnnnntaatgttaaaacagctatcgagatggtgatacttgatatctacaataacgtgagccgtaagcaactcaactcagatacttataaagacgaactcaccgtgaatcgggtaagtcttgttaaggatgataact

SEQ ID NO: 7922 - DNA, 540 bp, Arabidopsis thaliana landsberg
  unsure (1)..(540): unsure at all n locations
tctggacatgtatgataaaagctgcaaaatactttgaaaccttacttttatttcttaacatgtaaatccaggttagcacgagtgcagtcatcgacaatagtaaggaagtatttaaaaccttctacagactcaatagcaannnnnnnnnnnnnnnnnnnnnnnnnnnnnnnnnntggagatgaagacatatgattatgagactcaaaagacaaacgtttctgtttagcaatcggacagactggacaatgatcaacttgactaggtaaagtagtaataggtaaagtaccagaaagcagttttaacttgtcagaagatgggtgtcctaggcgttgatgccaaagatttccatcaaccttcaaggatccagagaaatgtgatgatggagtagccacagatggtaatgaagacgatggagatgatgtatgcggttgtaaaatgtatagattgtgcagtaagagacctctaccaatcatcattccctgaatagactcctgaattaacaaaaatcaggaaagaaatgagctgggccctgattatgtt

SEQ ID NO: 7923 - DNA, 554 bp, Arabidopsis thaliana landsberg
gtttctccgtttcagtatcattaccagaatctttcgaaccaattgagttgcaataatcttaatccttctactatgtctgatgagaatgggaagagcttgagtgttcatcagcatcactctgatcaaattttaccttcctctgtttacaacaacaatggtaataatggtgttggattctacaacaattaccgttacgagacatcagggtttgtgagtagtgtactgagatctcgttaccttaaaccaacacaacaattgcttgatgaagttgttagtgtaaggaaagatttgaaattggggaataagaagatgaagaatgataaaggtcaagactttcacaatgggtctagtgataacattacagaagatgataaatctcaatcgcaggagttgtctccttcagaacgtcaggagctacagagcaagaagagcaagcttttaacaatggtggatgaggtaagactaaatcaaattttaatactttaaagtgagagagagactttggagttttgagttttgaaaacatttttgcaggtagataaaaggtataacca

SEQ ID NO: 7924 - DNA, 1077 bp, Arabidopsis thaliana landsberg
gataaaaggtataaccaataccatcatcaaatggaattctttttctatcgtctttcgagatggtaacaggtctgggggcagctaagccttacacatccgtagctctgaatagaatctctcgccattttcgctgtttacgcgacgcgataaaagaacagattcaggtgatcagagggaagcttggggagagagagacttctgatgaacaaggagagaggataccgcgtcttaggtacttagatcaacggttgagacaacagagagctttgcatcaacaacttggaatggttagaccagcttggagaccacaaagaggcttacctgaaaactctgtctctatacttcgagcttggctctttgagcatttccttcatacgtaagtttgttgtttgtaagacactatctttctgctcctcattgcttcattgataaccattcaatcgtttttgtagatatcctaaagaatcagagaaaatcatgctttcaaagcagacaggactatcgaaaaaccaggttcttattggctcaatctttggtcttgcttttatatgagtggtattctgattcttggcaatttaggttgcaaattggtttattaacgcgagagttcgactatggaaaccaatgattgaagagatgtataaagaagagtttggagaatcagcagagttactctctaactctaatcaagacaccaaaaaaatgcaggaaacatctcagctcaaacacgaagactcttcgtcttcgcaacaacagaatcagggaaacaacaacaacaacatcccatatacatctgatgcagaacaaaacctagtctttgcagatcctaaaccagaccgtgctactactggagattacgacagcttgatgaactatcatgggtttggtattgatgattacaatcgttacgttggccttggaaaccaacaagatggcagatattctaatccccatcaattacacgactttgttgtctaaaagattcctgagcttttcacaactttaggaactggcaatgccagttgattgggggagtatgattcttgaagcgcaagaaaatgcgctcttggcattttt

SEQ ID NO: 7925 - DNA, 857 bp, Arabidopsis thaliana landsberg
gagcacctcgggtcaagtaggcaatgcaccctgccaggttgccgttgacggtgccacaactcataagcgcgttcgctgtgattggaccggccacaatcatgcaagccaagaccatgcatgccaacttcatcactccagccatattgatctcttagttagtgttttacgttggtttgcaagaggagatgtgatggatgatgaagagtgttaggggagtgagagtttatatagagtaggaaagtacatcttatgtaatgtgaatgcaatacctaaatactactatgagggaaggagtagttggtcgctgtactcatttaatgtagacccatacgaattttaaaattggaatgtcactaaaatatcgtcaatttaactaaaaaaggctgttttagataataacgagtgtgcagacaataatctttggattctaaatttaacgaagaagataagtctatctgtgacgtctggaaatcccaatccgacggtgtgaatctttaacaaaagcctgaaaccccaacgtgactttatgtggactactactagcttgaacaaacatttggagatgttaaaaattttcgatgtagagatttatcgtttatgaatatctttaattgtaagatgaaaacaacgttgtataagttttttttatcactaatactagtacttatcattgtattagtttttttttaaaataaatttcagtggatatacacaatattatgtcggtttgtcctgccctccacaggccacgccatagattgtatccagacccttcgtcattatgtgaaaatttgaaagataaacataataaatactgaatgcatgacacatgggtaggatgggtgattgtggtttta

SEQ ID NO: 7926 - DNA, 1703 bp, Arabidopsis thaliana landsberg
agctaaagaactaaacataaagtagttccatacatatcactaagagagcttcatatagaaacacagtagacacaagagtccctcgaagctgcttacccttccagaagcatctgattgaaatgccatgttcctgaaattacccacaagcattcaaagacatatattaaaaccaagtttgaggcacgacgtaggatgaataagtggattttcttgttcttttataaatttatagattagaacaaaatgtgagagattatttatgtaccgtgtcctttgccaactcgtcgcagttgagccacatattctgagatcaacttgattgcttccacctgagaaatgttttattttatcaaaaattcctattagattctctttgatagcttatatacaacagtagctctttgccactaacatagaacaccaaataaattacctgctctgtcagaaactcgctctcaataaaatctgccaagtggacatcattgttcctcgaagcaacctgttgaagcaaagcattaccaaactgagaacagttcttgccgagtgaagattagatttacttctcaaatacggatttgacatatatagtatgaactcaagaagagatggtctttacactgtgaaggtttaagagcttctcattaactagtttctccagtgacagagcaagctccatgcctgcaacaacaaatcacagaattgtatgttaaaattcctatatccattgagacttgaatctccatatgagagatacattttcataatacttaagaactcagataaaattcagtctttgctagtgaaaatatgcaatctcttcaaaagcttaacaaaatcattggtgtcaatatctaatttcttagaatgtggcagacatatgaaactaaagaagttttttcacttgggattattagtgttagcatttttgagcttaccataaagagcatctcctttgtcaacatgttcaaactctgaaagaggcattacaatggactgtaacttaaccctcccaccacgtttgttctgcaattcatggaaaaaaactaaaacatgttagaaccaaattagctccaataaggtaaacaaatggaaataactttcataagacctgatactccattaacttctcagcatgctctctttcttccagacttgattccttaaagaacctgattccatgaaaccaacaattaactatggataaacaaaaaaatccgaaaatatcaacactcttgaataaccggagactcacttggcaagacctttgagcgcgatgttatcccgatcaaagtaagcatacatagcgtgatacacatacgagacattgtattccacactgcaaccaaaatccattgaagaatttcaaattcacaggttcataaacaataagcagaatcaacatgaggttccaagttaccaaatcttatagccaatcaaccagattataataccgaatctaagagactggggtgagaaagaataacctacttgatctgctcgttaatggcggcttcgcactcgtctgagtacttttgtcgagcgagtgagagatgagagctggtagggacgagatcgagctccttttttacttccttaaacggctcgaagacaacgccgcttagcgcgtcggtggttgagcttttagatgcgcgaacagagaaagttaagtttccagattttccagaagaaactcgaagatgcga

SEQ ID NO: 7927 - DNA, 2672 bp, Arabidopsis thaliana landsberg
aaaaaagtattaacgttttcttagaatgtaaggcaatcgtgagatcctatcatttttattcaaagctctaatcttgaagcttaatcaagtggcaaaacgttaaaaaggtatgggtggcttaagtttaagtccacaagtttcaatttttatccggacacttcatatgtaaatacttttgaatttataatgataacaaagatcaagactaatgcttacttcattgactttttaaaatgcaaagtctattgaagtagaatttgggtttagttagaaattagaatcatccaaacgacgatgtgacaattactaggagacatgaatagttgcttaatcaatattgattagtttaatgagatatccaacctaattgttaactttaccactatttataaccaatgtatttaaggcagaccaagaatatgatgtgtttttactttttttaatagatcatgatgtgtttattttaatataagttcagggaaatggttacaaacatgcaatttttatttagctgagagactatgtctctcattataaaatgattagaatgtattatagttagtactaaatatttatatcttctacttgtgggatgagagaaaattattatattaagtgaacaatgattaaatgtcaatccatgatataaattgtctcattggttggagactcatgccagctttttttcatatacaacaggaagatagaaatgtgtatattttattttatcgaattggagtttctactttctacaaatggagataaaatggtaacaaaaagtagcaagagactaatacaatgatgttcaaaataactttttcttcacgtcatgcaaatgaatagaatagacaacaaacatacattgccaaatgccaagaacgttcaaattacgctacaaataccaataagaattcacaaaaacgtcttttttcatttcaaagaagccaattaacactaatgttaccaagccatatcaaaagagggaactggaccaaggctaaaaacagcagaaggtagtgatgtttgctcgaatcgtaacttcttacttcggcaaacagaacacgtttcatcgtcttcaccaagaaaatcccagtgcatagacaagtccacggcatcaacgcgtagtacgagtatccccacattatcttggcaaaacccgcaagacatagaccagcaaaagcataccctccgtatgccacaatgtctagtaatggtgcctctccactaccaagtgatagaagtgttactttcagtagcattacttgcaaaaaccaaccaaccaatcctttcacaaacagccaattcaaagcttctggtgtaaacctagagaccaatcaggtttgaaatggattaataatcactatgtccacattaatctcattcaagcactaagacaggaaactatttagagggaaccataaggagagagagactaaacataaaacttactttccattaagtcccaatgaaaggccagcaagaacaacgtaggtaccaaatgccataaagggaatgtacaagtctggagcattgatatcatagattggaggcttgtatgagagcctaccaccaactggttcagatattctggtccagtgtccctgagggtttgaagcagaaaccacaatagttcaattaaatggctgataagagaaagtcccaaacagaagaaaagagaagactagcttacccggtgaaggaaaggaaacagaacaaccttcaatttgttccttacatattgatcattcacttggaaatagtattgcggatcagagaagtaccggcttatctataccattgcgataaaaacaagttcaaaaccatgaaaaccagatattacgtgtgatatggactcataaagagttcacttacattgctctgcacatactcagagctcgaccctaaaattctctccccgtacgcacccaaaccaccacggataaaacccgagccagctccagtgaaaggattaccaaacggaccaggctcagggtttcctggaggtcttggcatcccaggttgaggtcccatgttattatacatctctgcaaatcaaaccaaaaccatcacacatttatctcacaccaaccacaaaaccaccacaatcaatacacatctccaacttctaaactctaactcttgaaatcaaacagtaatatcaacatttacttgttagattccacagaatcttcttcaaaatttcaatttccacagaatcttcttagatccaaatatagatgctcttaagtcatattctcaattcgtaatcacttccattcctttttgcaatttcaatcacgacaatgcataacaaagcaaagccaactctagatctatgattcaaccagaagctttcaagttcaataacacagtcaatccaaacctaaaatctatcgaaatttatcaaatctaaacaaaagaacaaagatctgattcgctaatcgagaaacaacaacgcatacgaaatagcaagacgaagagcaaaattccactaccgatccacacaaaatgaaaactaacccggagataaagaggtagagagctcaaagcttcaacgagaaagttagagttttcttcaaatggaaacaatggattctcctcagaaatcaacagtgtgatctgcacgcagacgaagaaaggtattctcgggttttcaattagaagcgttattc

SEQ ID NO: 7928 - DNA, 1650 bp, Arabidopsis thaliana landsberg
atattatttgatatcctcaagcagcgaaacagtgattgaccaagaaaacaatcaggctgacgattttttttattatacacgcagaaaatgagagagaaaatgccgttgttttgaaattagaaacgaaagggtgcgagggaatgaatcaggtgcggtgcaggtcttcccgatcactgttttctgttaatttccttctggcccaaaaggcccaaaaagcccaaaagactccaagttattcaataaggagttttttttttcttttcttaaaaaaatgtttgtggaaaaaagggaaagtagggcaaggagggaggcggagagcaaaaccggaacactctcatcaacgagcgtctctctggaagctcacattaccgccacatagtctctgctcacaagtattgagagaaaagaaacctttgaaagcgatggcgaagaagaagaaggatacgaagcatactcgtctctgcgaagccactggggcttgggccaccaaggtccttgaggattttcgcgcctccgggaacgattgtgagtttacctcttcgacccaaggaatttaaaaagtttcttcctttgttcttaattgtgtttcttctgctaatcttcagatgagctccgatactctctacttgcaatggttttaaagttatagttagctttggtgatttctatctatcggaatgttctgtctttttctgtttggttgaattggaaagtgtgttggctttctattgtgtagcttacgtctttgagcagcaacttacaaatagcgaacgtggcattattcatcagatgtgccgaactatgggtctccgatcaaaaagtaacgggtcagttacagcttaatccaattttgtctgacgtttggggtattatgcaagttttgggtttcatctactacttgagtttctaatcttcttggattttctgtaagagtggggaagaaaggcgtctttctcttttcaaaggagatggcatttcaaagtcagacaagaggcgtatgtatgaagccagaaatcagaaagaaaaagaaggagatgggatttcaaagtcatacagcaagcatcgctatgaaaccagatttcagaaagcaggcggtataagaaagacgagaatatctccaaagaagctcaaatgtgtgtcatttccaccagaggctaaagctgttctgcacgacttatttactcgctatccaccttgtgacggcgatactacagggacatcactgggtatatatactacgggaaacgtcaacagtaattggaaagatgatttcttcaagaaacctcatatgacaaaacacgatattgaaaataacgtggtatctctgagttctagactgaaaaaagaaagacattttcgagaggttagcagttatatgtattttcaaaagattgtaatattttctttacagaaccctgtttcagaaagttggaatcatgcactgttgagtaaaagaaatatccttttatttgaatgatgttacagatctttgaagcacgatcaaagcttcccatcgcatcttttcgcgatgccattatatctgcagtggaatccaatcaggttatatgggtctttaaaaatttaatttgttcctctatattaggattcaggatgtgaatttcgtcagtgtgctttagtgagaatttccat

SEQ ID NO: 7929 - DNA, 1617 bp, Arabidopsis thaliana landsberg
aattttcttttttggctttttttattcacaaatgttttggacattttttattcatagacgatcacacggcggcagtgtcggcggacggcggctagtgagtgagtaatgagttcgtcgtgcatagactctatggaaaaacgtgggctagctcgtacaaggacattatcgtcatttcaataatctttccaacaaatttccgtttttaccctttgcgtttttttaaccgaaactctttctataaactggaacattcttctccttcttcttcttcttcctcgtcgtttctcctccttcctcaagagaacaacttcttcaccacgaatcttcagaggtaaatctcgatttctcttcaccattcttgagctgcattggttatttctctcaagaatctgtagctgaatctaatctgatctctctctgaatcgttcttagagatccgttctctgtttttgaaatatagatatgagaattctcgaaatgtatatagatcctatgttaatcttagtttctgcgtatcgatttattcgaaatcaagctagatttttgtttagatccgtgtgatttgactggtttttgtgttttatttgagatcagatcgaatcatgagtagtctcttccttgcacaccaagtgttcgacgtttttctactatatatagtccagatctgagctcttaatgtagatctgtattgatctttatttgaattttgcagagagatttcaggaaacaaaatggtgaagatctgttgtattggagctggatatgtaggaggaccaacaatggcagtgattgcattgaaatgtccagatattgaagtggcagttgttgatatctctgttcctagaatcaacgcttggaacagtgatcagcttccgatttacgagccaggtcttgacgatatcgttaagcaatgcagaggaaagaatcttttcttcagtactgatgtggagaaacatgttagagaagctgatattgtctttgtctctgttaacacaccgactaaaacgactggtcttggagctgggaaagctgctgatctcacttattgggagagtgctgctcgtatgatcgcggatgtatcggtttctgacaagattgttgttgagaaatcgactgttccggtgaagacagctgaagctattgagaagattttgatgcataacagtaaaggaatcaagtttcagattctttcgaatccgcagtttcttgctgaaggaactgctatcgctgatctttttaaccctgaccgtgttttgatcggagggcgagaaacacctgaaggattcaaagctgttcagacacttaaagaggtttatgctaattgggttcctgaaggtcagatcatcacaactaatctctggtctgctgagctttctaagctagctgcaaaagctttattggctcagaggatttcatcagtcaatgccatgtctgctctttgtgaatcccctggtgctgatgttactcaagtgtcttacgctgttggtactgattcaagaatcggttccaaattcttgaacgctagtgttggatttggcggttctagtttccagaaggacattctgaatcttgtctacatctgtcaatgcaacggacgctccagaagtggcggaatac

SEQ ID NO: 7930 - DNA, 962 bp, Arabidopsis thaliana landsberg
tgtttgatacagagttgaacatggaggaaacaacacggttcacgaaccggctcttctggtagtcattgatcttgatgacttgcttccagtactctgccacttccgggagtccgttgcactcacagatgtagacaagattcagaatgtccttctggaaacacgaaccaccgaatccaacactcgagttcaagaacttgggaccaatccttgagtctgtaccaaccgcgtaagacacttgcgtgacatctgcgcctgtggcttcacacagagccgacatagcattcactgatgaaatcctttgagccaagaaagcgtttgccgcaagcttggacagctcagcagaccagagattggttgttatgatttggccttcaggaacccagtgtgcatacacatccttgagagtctgcaccgctttaaacccttctggggtttcccgccctccgataagaacacggtccggattaaataggtccttaatcgcgggtccttccgccaaaaactcgggattcgaaagaatctgaaacttaatccctttactgttatgtgtcaaaatcttctcaatagcttcagctgttttaaccggaacagtcgatttctcaacgacaatcttatccgataccgaaacatcagcgatcatacgcgcagcgctctcccagtacgtaagatccgcagctttaccagcaccaagacctctagtcttagtcggtgtgttgacagaaacaaacacaatatcagcttccctaacatgtttctcaacatcagtactaaagaaaaggttcgtgccacggcaatgcttcccaacatcatcaagaccaggctcgtaaatcggaagcgtgtcactgttccaagcgttgatacgtggtacagagatatcaacaaccgctacttcaacgtctgcgcattaccaatgcataaactcgccattgatagtccagctagccgctcacttacatagttat

SEQ ID NO: 7931 - DNA, 1508 bp, Arabidopsis thaliana landsberg
tcctttcttccccaaccattttcttcatcttctctacatactcttcgaataacttcagttgctgcgataaagttattcctccctttaagaacaacaatggtttatatataaaaaggtacgtctaattacagcttagaagtaatcatattttgttttatagatagtgtaagatttagaagtttgattaccgataattgggttgtgaagggaacgtaaccagcaccaccagacgcaaatgttacaccggttaagagatcttctggtttcaaatttggatttcgatatgccggtatacttggtttaattccgaattttcccgctatgatttgcaagagaaaataactattaccagttatataaatttatatcatttgtccttaatttctttgatgtttcgcttttgagtttttatatctcaagaaaatgacacatattgaaaacttggaaaaaaaagaaagatcatttgtgtaaaatataataatttttttttgtgatggtaccattttctggagtttttttgtgtaccatacgtatatctttagtcaataatgtaaattacatacatattaacagttttaacactagtcagtcacttagatattattcagcactacgtacgatacaataaatgacttttatataagttttttgttttgtttttttattgataaaaggctttctatagattttttgtctcttttcagtttacaggcttgagaagttttcagagtgttcacaaaacacaaatgcaactaaaagtgtgtgtttagttgttatctattggggaaattctcgaaatataatcaaaattacatctgagaaagcaacgtgaaatttacctataaaatcagtcgcaactttgccgttgcaaaatcttccggtaggaattccaccgtcaaaatcgatgccgtaaggaggataattgcatctagccaacgttgtcataatgtcgtcattatttccggcatcaacgattgaatctccgaacacaattatcgccggagtcgtttcgtttggcggctgcttcaccaaagcgttggtggacgtcttacataacaacacgagaaagaaaacacaccaaaacggactcgaagaaaaagaagtaacgtgatgaatatttatactgtttcgtttcattgttactctttgtttctttggaagcttttggaatgatgagtaaatatatatatgtagagcttggatcgacatgtgaaaatttaacatatgaggactttttattcaaaatggccaatagtcaagtctagaacatttaataacgaactagctaggttagcatcgtaaaccctttttcttcaactaaaataaattttgggcatagtgaaattactatatttgtcaaaaaaaaaaacaaaaaaaaaagaaattactatatttgtcaataagttgtcgaagaaaaacattaattggctaattgctttcggacctgcgtcatcagatttaactgggccttatacataatttgtttttgtcaaccttgggccttatgc

SEQ ID NO: 7932 - DNA, 2242 bp, Arabidopsis thaliana landsberg
  unsure (1)..(2242): unsure at all n locations
aatagaacctgggaaaaactagtgggagaaaggatctggttttagactttaactagcggctactttctcttattatataacaagactcatcagagtctcatcttcttcatcaacatttttcacaaacacaaattcataatctatacaaagcaaagcaaaaagcaaatagtttctctgcttttgtttctaataaaaaagatgagttcaactgttcaacgagcaaagcatagttagtagctgcaagcatcggagccgtggaagcttccaaggaccaattaggaatgtgtcggtggaactacttgatccgatcagtgaataacgtatccgtaacaacatgagatccgcttctgaggctatcagattcttttcatccatcgccgtcgcttctagtaaggatgatgacaagtcaaagcaatctgaagagtcacttagaacggttatgttcttgagctgttggggtcctaactaacggatacattatcgagattaactaaaaaatgttgtaataacatgaactgacaaactaataacacttttgttattttgaaacagagagagttacaaaaatgttgtttttacaccgatcctattcttttctttctatgtaacaacaattcagctttcgaatctgtaagctaacattttattgtacagagtggataaattcctcttgcacttttatgaatgctatcgttctttacaaaaaaaaaaaaaaaaaactcttcatgttaaaacccttcttctctcattctctttacaatctcattgctttcgccgagcctactctttcgtcaacctgcaaattacacccatcaggtttcaccgtttcagtgatcaatatagccaaatgcagaatgagactagtgatgtttacatacacacaaccggagtttatattgactacaatagatgatgtttgcagtcataccattggttctgtagcatctttcgacttgttctcgctgaggtaacgctcaaaagccccgtctcctctaagtatttttgctgtgcatccacgagaagcttctgagcttgttgattcctcatctactataaccgcatcgattctttcatctccctttttatcatctggaatctgaaaagagaaatcaaacagaagtgtgaaagcaagatttatattagtaccttaccaatatttgtggtagctgaagttacctcaaacatggcttcggtaagaatgctttcaagtaaggctcttagtcccctcgcacctgtattcttcaccattgcttgcttggatattatctccagcgctttctcagtaaaatgcagctttacctgaaattttgtaacagatcatgcagtcagggaccaaaaggtcaagtttgaacttaaaacactgaatattttataacatgcaagtcttggcaagtgtatattttgagggagcttacgttgttcatgctaaatagtttcttgtactgtttcccaagagcatttttgggttctacaagcacctacagggcaaaaagcaaaggtgatattagctacccttaaatatgagaagagcaataagatcaagccctcgatgatagcaaccactatctcactttgattttactagctgcacatgagcaatcaaagaaacacaccatccactacaagataaaataaaagctatgaagaatgttaaagtacccgaatgagctggtcctctgtcagagctgacaaactaactaatatgggaaagcgtcctacaaactccggtataaggccatatgctgtcagatcggcactctcaacctgaaatgtagccgtcattccaaaactaagatctctttccaggaatgagaagtgtttacactgggaaacagagacttaacaaaaattgtgcagtgtttaccgattctagcaaagatgaagttattgcaccactggtcactccactggtagccaggttggcacgaacaggagctccaaaaccaattgatgagtcttgtcgtctggcagagcattagagatgctgatcaatgtcaaaacagaacccctaatctattgccaaaaaaaaaaaaaggacgaataatgaattacctatccacaatggtcttctcaaggtcaacaaatgctcctccacagataaataggatatcttttgtgtctatctgtacatcatagggacatccagcaatggattaatatgagaaaacaacacctttagatgcaatataggtcaatgatcaaatttctagctctaaacctgtatatggtcnatcgcggatgc

SEQ ID NO: 7933 - DNA, 842 bp, Arabidopsis thaliana landsberg
taatgtggacaaagatccattagaggtattactttataagaagcgtcaaatgattcctccaccacataacaacattccgccaatacattgtcatcgagtttagtttgtccattctttttggttttgagttcctgataaagaacgtagtgaccttgaatactggagatataagcatagcttgtgaagtccattaacatgtcacgattttagaatgagcttcacatgagtactcaccgcttttaaaagatctacttccattgtggcttctgtttggattcttgaaaccacatttttcctacatgtgaatctaaattgaggtgccttgtttgagaaatctggccatttccaaaaatggcatccactttatatatttgtcgaaacctagaacattaggtccaaaatatatttaacaactttgtcatagagtatgtatatttaacttaccagaataagttgtaacctatggtgaagggaaaaaacgtacaaatgaaaaaaacgtttaagtctatttttcttaatgctatgtaattttaagaagatgctctgtgtcttttagaagatgattaatgctatgtaatttttcatatcaacttgaaacaatatttttaaatctttccgtttacaaaatatagatcgactgtgttttctatattaacagcttttcctatgtatcagaccaacacaggaaaaaatgaaagtctctagtttatcaacgtgattattatattggcagctaagatttatattcagtaaaaattgattagtctttacaaaatattgaaaactaattgaacatattgatattgcttttttgttattgaaacatcaacacggtagcagta

SEQ ID NO: 7934 - DNA, 709 bp, Arabidopsis thaliana landsberg
attctacctgttctactgagcttggatcccctaagctttctcaaaggagtgtatgctgcagcaacaaatcttgccttgaagactgtatttctctcctgcttgaaatgtacacatcccgctgctgcaccggtattattttgttttagttacctacaatgattaggttcactgttattttatattatagattttttttcattatgctgagctggtaattaactaatagtggtataactaattcttataaattttctgatggtgtattctccatggagttgattttcgtagttaacttgcaattttctgtatgctgtcaattttctccagtggaaggaccggttgaccagtgctcttaaagagatagaaggtggaggtcaggcagccaaagcgaaagatctcttttacaagactaacggaagcattcaggacaaagacagtgtagaagataccaaggtaatttgttcctcgtttgtttatcgatgtgtgtgcatgtgtctctccggttttcttggtttatgtatattgaatacagatttaaaagccaactattaattacaggtatcagtggaagagaatcctctctgtgcaagttctgatgttgcagaaagtaacttaagtaggaaaagatctggatcagaatacaatattgatctaaatggagatgcttccgatggaaaacgtgcaagaataacaccttttgtgtcagaag

SEQ ID NO: 7935 - DNA, 1445 bp, Arabidopsis thaliana landsberg
agtgaagtgtcaaatgcggatatcatttgctcgcttgtcacctctttcccttccacactctcagttcctataaaaataaagaagcaaaggctgataagatccatacacgactgtttgctctggactacatgaatattaggattcagagattttccaaagagaaaacataactcaggtctggatctaatagtacaaaacttgtaactatgcttaacgaggtcttggtagataacaaaactagtaactgtttttagcattcagccactagacacagccatcaatggagaaaacctgcttccctagttgccagcccaattgatgcaaattaatggtaatatgccacaacgaaacaagagatattcgattcaaccagttattgcaaggtggcaaatcttgtaactattttactcattccataacttcgcattggattcccctagttgacaaatacatcatgaggtaagataacagaggctagttctgtataacaacatctacacattctcccaactagattttactatatatcacacatcgttttaacttcatgaaaggaaacccagtaagacatgatgcgagaccaagaaacaagcatatagcgtttgtttagtagattgaacaaatatgtatgaggcaaaacagaaagttacaaagtcacacctggaatggagcggaagcaacaaaaatcattattttgtgtacaggaagatgtggtagagtgtaagcaacagcttgtagatttttgcctctcagatgttccattagctgcacaagaggctttcatttagtgatagaaaaaaactagaaccaaattataaaacatgttaagcaacacagcgataaagtaagtacgttttaatccagcagagccatttgattgaggtttcgaatcaagcgactgctttagcttgtatccaaagcgaatggacaatgtgctcaacaatgcaccccctgcaattagtatccagtttggcccttcaccacaaaatttatcacctcgctgatgcttggaaatgccatttcttcgtgtactcattgtatgagaaagtcaaaatgtatctatcatccaaacataacctacattgaacggatacaagaatcaatcatcatcaacgatcagaatgaattgggcatatgtcaacaagaaacctggtgtcaactcaataaaatcaacaaatatacaattttaaaatcatcaaatgcttaatacccagaaagattccagaaactagaatatgaaaagataatgagcacaaagaatcacgttttgagcattacctcaaacacagtcaaccagagaaggaaaaacaaaaaaaagatctaaaatgatagtaacactgaaaagagaaagacaaaaaaaaaaatggaagattctctaagtcaaacattctcagttgagaaagtatacgacgaatccatggaatcatataggagcacagactcta

SEQ ID NO: 7936 - DNA, 1377 bp, Arabidopsis thaliana landsberg
aggcttttgagaagataagacgaaaaaagcgaaaacttcccaattaaagaatacacgaggatctttaattagttcctaatagaagaaaaatttatcaatgtttttgggtgaaacaaaaaagaagggaatgtttcttttttggggatggtggagatccaccttctcatattttgtcttcttatcactacttttgtaacctttcttatcataggatattcccacgcgtattaaaatcagttcaactaaacattatttcattcaagaatatacccatattaacaaaaccacgataagtttagagtcttacatgaacgcgaacagacacattgaagtttcgacaaaatcaatagaaaaagtcacttatcgttcaacctttctaagagaaatggttaataatctcgtagttaggagttttcttatatttatactctgttttacattacattgttaaccaacttattgtagattatataagagtttaactaatagtcgttgttttctggctgtgcgcggttgtggagatttttaatatgctattgtcagtttttttcatatttctttacgttggttgacaaacatttcctagtcgtcaattctaatgttacttgcattgcatggcttcgcaaaaatactcaaaaaacacatcattgttaagtaacggtcataaaatcatgaaagcatcacgtactatctgtggctttactaagacgtcgttaacaaacgtaatgataacattcttttttctggtgattgattcatgattttatgccttttttttgggtgatcaaacaacgttgtaactatgaccgggcctaatagacatctatgggactctaatttcattgacccgttttgtaacatatatactagagtgagtagtgataatttatagaaatttgatatgtatatgtctctgagtagttagtgaaattgtaacataagaaattgggcctgactttattaagttaggcccattaatgtctatcactaacacgaaaaccagcatctgcttcagctcgtcgtcttctctacctgaatcagtgcgtctggctcaggtgacaatgcaaggaggatcatcgggtattggatacggtttgaagtatcaggtgattcatcatcttcatatcttccttaattttccttaggaagattctttaaagacggaattcattttgtttcagtctagatgtatatcggatgtgaaagccgatacggattacacaagctttctcactggaactcttagtttaaaagaagaaaatgaggtgaacccatgtcttgattttgatttcgtcttctattttagtcgggaagatactgaaagttttcgttttttgttctccaccatttgagatgcttttaaggttcatcttcttc

SEQ ID NO: 7937 - DNA, 928 bp, Arabidopsis thaliana landsberg
ataatactttccctagtatataagattttaaaagcttttttgttgttgttcccaattagtttttctctagtttctagtcataatttatattaattccatagtttatgattatttaaattatgcagtattttttattggttaaatttttattaatgataaaacatgtgattttagccaaaacatctaataaaatgggacatatggagtactacaatagtgatagatcttttatttacctgtttattatatatgaatctattcaattttcatttatttacatgtttatttaaattatttatttaatttgcatctaaaatttgcaaaactattgttgggccatgagtgtcaactgtcaaatgtcaaccatagaagcaaaaataaaacagtttatgattcagtttgtaaaagtgggcttatttaaatgaatattggcccattagtatcatcttcacgaaacccagcaaaatcagagagcggcaaatcgttgaagagagatcttcttcttcctgaatccgtaacgttagctcaggcgtaagagcataatgcaaggaggatcatcgggtattggttatggtttgaagtatcaggtagttcacgatcttcttcatgcccgatcctttgtcaatttacgagctttcttaatggtggaaaatttgctgttttcaggccagatgtatatcggatgttaaagcagatagagatcacactagcttcctcactggaaccctaagcttgaaagaagaaaatgaggtgattgattcttaagatctgtttcgttctatttctggatcggaagattctgactttgttaaattttaaggttcatttgcttcgtttgtcttctggtggatctgagctgttatgtgagggattgttctcgcatcctaatgaaatttgggaccttgcttcttccccttttgatcaacgc

SEQ ID NO: 7938 - DNA, 1113 bp, Arabidopsis thaliana landsberg
attgcaaacataaccttgacaaatgaaacaaaacaagataaaaacgtttcagattatagaaacattttcagaatttatctagaaatgatattttttcatctataagtttacctgagcgagtttgctgctagaatatgcgctcaagcttgaaaactttcgtttaccagaaacaaaattcatatcatttggatcaacaaaaccaacataatgcatctacataaacgaaaacccaaacaaggcataatttcatagagataatcattgaacttttttgatttgatgatattgatgaaacttacaacagaattaacattaatgattcgactccgggaagctcggataagcgaaggcaaaaggagtagtgaaagcagagctggagctaaatggttcacttgcatgtgctgttcatatccatcttctgagaatttttgtgcccctgcatatgatgaaattgaaatatgaatggtgcaaaagcatatgactttaggacctcatcaatagcaatatgacaacaggaagaagattaaaaatgcatgtaaataaattagaaactactaacctcccatagcaaacatgccggcattatttatcagaacatgcaaaggggctagccgtgcattccacgcattgctaaatctgacgacggaatctaaagagagaaggtcaagttccattgccttgaggaaacaaaaaacatagtatcaatgttaacaattcggatgttgtgtaagatatcgtaaaacttattgtcttttatccaatcagttagagagggattactaatagcttatagttcttataagttataacatgcattttctctacaacgtgaatgcacatgaatcttaacgaaatgaaatcttttagttcttaactaagctattaattagttatcataatttcatgacctatacaactttatccatccgttcacaaatagtttcgttttgacactttccagaaaatttaacaagaggttgaaaatattttcttatagattcacgaaacaaaaccaaaagttctctttcatataaatttttttattttaattactttttgataaaattttgatgggatttattttcaaatatttttttttaattcaaaaaaaaa

SEQ ID NO: 7939 - DNA, 1365 bp, Arabidopsis thaliana landsberg
agagtaaaagaaaaaaccctaattccatcattgtttatacatacctggcgcaaggagataattaaagcatgaatgtatcttggtgcagtacaattgattccaatggccaccacgttcttgcatgaatctgccactttcgcacattctacaactgaatctcctcgtggcacactgactccgtccttggaagtgaacgagaaccatgccggaatatcgatatcttcctcctcaagaagatccgcataagcctatgattcgtgaaaaacgatatatttatacagtaacatcatgtaatattatcacaactaccaaaatgcaaccactactagactaacagtacttaatagttagttaagaactttatttggttagactgtttttttgtcaaccacgtcaatgcttgaactagggatataatacaacgatggactaacgaaagctactagaatagaatacatgttcagttaaaaagaaaattttagatacctctgcttcgagcttatttggaatagtctcgaatgcgattaggtcggctccagattttgctaagatttgaactcttcttctatggaaatcctttaatgtctccttactcacagaatctccatatatcccactgcagaacaattatgaggaattaaattaaatttctttaactgaccaaaacttttgttatgactatgatttttccaattttatacacaaatgtaacagacaaaaatgactaggatcgatcaaagaacctgtattcggagccgtcagcgagataagctccatagctaccaacggaagctgcgacaagaatcggtctccgggaagcttttccagcataggcgaaatcccatgaacccttggtccatctgttgtagaaaatctcacgtgcctcgtacgtgatttcaacgctccttctaagtaaattttctgcttctcccaccgatagaccttttgccacgaatccttgtattgtcgcctgtgtaataaattaatttgtttaagtaccttgatgcattttgaaactaatttcctttttttttaccacatttacttcaggcaaacaaaccaaatcaaactctttagttaatataggccaaagtacctggtaagatgctgttatgatgatatttgctccagattcaaggtaatccaagtgcacctattagaagaaaataatataataacctgttacaaacatatttctgatatgttattatatatttctgattgtagtagttacttattagcagcaaaaggttaaaatctctgggaacaatggaaagaaaagtggaaaaaattactttgatatcaatagaaattaacgagtcaaactacatataaagaaaaagaaaattaatctcgaataaattt

SEQ ID NO: 7940 - DNA, 228 bp, Arabidopsis thaliana landsberg
ccgaatttgggtcttgatgctgcagaaggttcgtcggagagaactttagcaatggctctgatggtgtttggagtagtccgacaacatcctccaaacagagaagctcctgcatctctccatttactcacgtacgacacaaaatcctcctctgactctccctctgacttctgcattaacacattaaaaaatctccaaaaatcagaattgtaatttgtgttttactagaat

SEQ ID NO: 7941 - DNA, 628 bp, Arabidopsis thaliana landsberg
  unsure (1)..(628): unsure at all n locations
gatatctcctagcatcataagtgatttcctttatctcgtccaggcagtttctcgcaagtgcacgtgtttgtttttttgcatccgcatcagatagaaaggccattaacatgtttagatcaccttttagctcagtaacttgctcttcaactccctggaatcgctcatattcttggctcacgagttcccaaagcttttcaacacccaacgatacaagtgaatcagccataagtcctgcataaatagtacgaaagtagagatgaaaactaaaaacctttttttaatgaagaggaaacattaattagcaagcaacctgcatcacacatataagttcaaactgctaaagacaaaaatgatacaatgtatacttgcatttttcattattagcagacatgtcacatgatttattaagaatagggttgacttagctaaattaccccaacaattattacccaaacttttgccctcatcatcacacagcacaaactaattgtattgattgataaacaacacagacttccaaaatcttcaaccctctgaatgaaaaaaatagagggtttattccttttacttctatctctgtaggtttgagatnttttacatcatacaccatttctacagactagagcta

SEQ ID NO: 7942 - DNA, 2541 bp, Arabidopsis thaliana landsberg
gactgctgtttttcgatctgtgtaatctggtgtcttattattttcaactcttctgcattactctttgcctgagaggaactgctactaccactgtcagttttaggactctcctcatcactactctgaacaacttgtgacttgttcgacccattctctttgaccttatgcatctttgccgggaacagaacccgtttagctcccaatgtcgaagggttccgcttctctttcggcacaacagcttcctgctcaagatccttaggagtgtcaccacgatctaaaggctcaacatcattcgactttgagcttagtggtgcgtttaaattcctatctttgcctttcaatgtgttgcttctctttcctgaagtcgcagacaaaccagaagaagctgatttggaggaggaagaagactctgagacctctgttgaatcagcttcaagttgcttccataaacccaatgtacgattcattgtctctctaacaagtttgacctgcacaagtaatatatgaagttattaaccaagaacactaaagtcaaaagtgattgcacttcttataaattctaccataaattgttttgaaattttaccttatcgaatcgtctgctctcaagaatacctagacatgtcttcttatacaaaggagctaattcttcttcaaccatagccactctagccattgcctccgcagcagctttcctcgcacgccaatcgtcgctgcttagaaactccgagacgtttggtaaaagccaatctagaaccgccttttcgctgtttcggcccccaacagcgcctattacgctccctatggctccaagaagttctgctttcgccttgaaaccctctgatttaagcaacttcccaatcttcggcagcgccttctgcagttgctcaacatccggctcatccactgcgtctaccgccgcagcaaggcacacggctgcgctgatctgcgcattgggatcacaatcgtggataactgtttcgatcattggcccgaacaggatggagaaaggctgtccggtgatgttggtagtcatatcaacggaagccgcaacacaagcagcacgcacggaggaatcaggatcacggaggcggcgaatgacagtggagaccattttagagaggtgaggagcgagagaatcaccatgagaacgagaaagaacagagagaagcgaaacgcaatgtttcctcaccggagattttgcggaagagtctgtactctgaagacagtttataaataaagagaaagtctccggtgagagattaagagcgattgaatcaagctctgcagcggcgagagcaagagtatcgcgatcagagagacgattgagacaagcgatgactcgttgcttgagatcagtaaccgtcatagccggctgtgaatgagacggagaagaacggatttgaacggaaggcattgtgaaaatctccggagactttttcagagatccgccatggaaggagagaagaaagagctttgtggagaaactaagatttgacggcagaaaaaaggcaatgaagatgactctactacggttggtactaggcctttttaaacaagactcgtctttggcttgccttttaaacttgtcatatttcactacctgccacaaaatttacatttactattagtttatatccaaaatttctagttttcgtaagactatgtcctttttttgtttctaaacatcgaatatgtcaaatttagtattatcttacaatttttttttgttggtcaaaatattatcttacttgtttctcgttttatgaacgtctttgtacatcaaaacagattcaatataccaacaaggattctaacgtacgcaaggaatagttaagtaaatcctctatgtagtaatgggaaattgttaggactttgaagtaagtatcagagactcgtgtataataaggtattcaatgtcaggaagataataaaatatttgtgtaacttggtggccacttagaagaagaaccaagaatatacaagcaaaaaggaaaaaaaactagattccgtaagattttcttttatttcaatcctgattataattaaaagaaggaaactatatccacaaccacaatgttacacatgagctaatgagcaagtcaagcaaacacggtttcttaacacgtaaccaaacgtgaaatgaactattctttctatttttctcaatattaggatgacatatatactgttatttaacatctatatatctaataacaaactaaatcttcgaatcatacttttctcaacaaaagattgcattgataagttcttaatttaaaatatttatgagtacatccaagacaaagaatagttctctattttcagagaggactgcatgtaatggtagtaatcatgttttctcttaggaaaaaacccgcacaacgtttatgggaaacatgtttgtgtttgaataacctttatggaaaaacaaaaatatttagcaactgattaaaactctttacacggctcaaatttaaatattgggcctttagagcccattatggcccataaacatacaactggaacgcttctaggctt

SEQ ID NO: 7943 - DNA, 2250 bp, Arabidopsis thaliana landsberg
ttacgcctcttcaacggttacaaggatggcccgctgttgaactcgataatatgcgattagtatttaagctaaacaagaaaaaatttcattacatggcgatttcagatgacaggcaaaggtccatgcctgtgccagatgatcgggttccgcctcgtggtcagcctcttgcttatcccgaggcggttcaacttctcgaccctatcgagcctgagtttaaaggagaggtaaatttgaattctttatcgaaaacatctacaccatccatttcaatttgaaaaaacagaggaaacagagtattaaagttgattcatcttataggtggatgataagtatgagtactcaatggagagtaaagacataaaagttcatggatggataagcacaaatgattcagttgggttctggcaaatcactccaagcaatgagttccgttctgctgggcctctcaaacaattcctaggctcccatgtcggtccaactaaccttgcggtaagaaataataggtttcgtcatatatcgattcataatttggatagaagatgaatgatagttgatgtgtgtgaaatggaaacaggtatttcacagcactcactatgttggagcagacctaatcatgagttttaaaaacggtgaagcatggaagaaagtatttggacctgtctttatttatctcaactcttttcctaaaggagttgatcctctcttgctctggcatgaagccaagaaccaggttagtcatacatctacacacatgttcatgttcatatgtaagaacaaaagagctgagcaatagatttggttgttgtttcagacaaagattgaagaagataagtggccttataacttcaccgcttcagatgattttcctgcatctgaccaaagaggatctattagcggtagattactcgtaagagacaggtacactacttgcttcattatctcttgaatctacgtcgttttttgtttacataacagattcctaagtggatagtttggttttgtaacagattcataagtagtgaggatatacctgcaaatggttcctatgtgggcttggctgcaccaggagatgttggctcatggcaaagagaatgcaaagtaacttccttaatctatcatatattcattctccctcttgttaattaacaattagattagttataagttttggtcttaattacgttgacagggttatcaattctggtctaaagcagacgaaaatggatctttttctatcaataatgtgagaagtggtcgttataatctctatgcatttgctccgggattcatcggtgattaccacaacgacaccatttttgacatttctccaggttcgaacacttctaataccacaacgattctaattcatatatagatacaagactaagaaaaagtgaaatattggaaacaggctcaaagattagcctaggagacttggtgtatgagcctccaagagacggttcaactctatgggaaatcggtgtaccagaccgaagcgctgcagagttccacattcctgacccgaatccaagctttgtaaacaaactatacttaaaccattctgataaattccgacagtacggattgtgggaacggtattcagaactgtaccccgatgaagatatggtctacaatgttgatgttgatgactactccaaaaactggttcttcatgcaagttacaaggttagtttgtgaccaacttaaattcaaaacactaccattatgaaactttgttaaagtataaacattggatttgtaggaaggaagcaaatggaggatataaaggtacaacatggcagatcagatttcagttcgacgataaaatgaaaaacgtaaccggaaacttcaaactgcgaatcgctttagccacatcaaacgtagcagaattgcaggtgcgaatctcaagttgcatggacgcttttttctctatgaaagtgaaaacattcatttgtttatttggtaatctttttgcaggttcgggtgaacgatctttctgcagaccctccattgtttaggacagagcaaataggaagggataatacaatcgcaaggcatggtattcatggactatattggttatatagtgtgaatgttcctgctgcttctcttcacgtgggaaataacaccatatatctaactcaagcgctcgccacaagcccttttcaaggcctcatgtctgattatattcgtcttgaatatcatgattcaatcaattatattactagatcatacagttgtattcagtttt

SEQ ID NO: 7944 - DNA, 402 bp, Arabidopsis thaliana landsberg
  unsure (1)..(402): unsure at all n locations
aaactctttcaagatcatgaatcagttaagtagctagaagattttttagatattgcaaatgaatgaataaacagattcttgtacacttaccttttggaagatattacaagctttccgtttctgtattctggttctttggtgtgtatcaaatgataagtgattgcagaaaccacaatttcctcaatatggttactcaaacacattgtatctgtgtagcatatcgaagacaagtcatcgcattggatatcattagcagcaagaacctttgcactgaggatcttgatgtcatgaaactgagttatctacatgtctgattctcacnnnnnnnnnnnnnnnnnnnngctgagatttatcttatggtggactgatcttgatgttgtaaggaaatccagcggaaatact

SEQ ID NO: 7945 - DNA, 1492 bp, Arabidopsis thaliana landsberg
tcaattaatgtataagtttatcaacttttgaagtacatgtgtgtgtgtgttttcatgctcatggtttggaagtttagatcaacctaatttataaatgaaatttgtgtataatctatttttaataattatgctcttttacgttcagagaaactaaaatgatttttttttcattttatgaatattgtttatatatatatatatatatatatacatatatacatattgtatcgtgattggattatttttaatgcatacgtaggaatataatcttgtatatagttgtgagtaaaaaaaattagatagcttctttgaatggttcttgtatggatttttcttcgaacgtgtacacaaatgatcacgtaagaattatttttctttatataaattttataaaattagatacagctacttggaaggttatttattcaatctaacagtacagttgacaatttgatatggaacctcacatttcgtataagtattaactaaagttaacttattctaatttaagaacacaattattggataatatatgtccagctaatagctagagcgaagggaggcaaagtagcgagagcaaggaaaggaccagagctttgccttggaaacataaccatcgtgaaagaggcagtgatgccggaaaattacttcggcgaagaagttccagcgaatctgaggatcataaaatgtcatcaggatgaagttttggagcttccggaaaatgcaaaactgttagcatattcaagcatgtacgaggtagagatgtattcaatcaaagataacttcctttgcattcagggacatcctgagtataaccgtgacatcttgttcgatatcattgatcgtgttcttgccggaggccacattaaggtttttttctaactctccctttgtagaatatccatttatttataatttgtatcctaaaacaattgctacttacctaattaacttaatgtgcagcaaaactttgccgaaacgtcaaaggcaacaatggaaaagaatgaagcagacaggaagttttggcagaaaatttgcaaaaacttcctcaaacgtcaaccctccttattagtttgactcacaaatcttcatcacacttgtttaatatatattccaactccatgtatcaacgttacattattatttgtaatgtatgacatattgatgtgttgtatccataatataattaaataaaagctttaccctcactaacccagaagcttctttatgctccaataagttttactaatgccttgatagaaatgagcctcctttgcgccattaattagtgggagtaatcgaccactttctggaccgaactaatgagcatcgtatgttcggattctggtattttgttatgtttcatgggcttttaactcaaaattagtaatttgttccatttccattaattatattcaagtcctttttcataatacacaaaattaattggtcattagtcaaatgctccattcccattatgttcgagtccttt

SEQ ID NO: 7946 - DNA, 2704 bp, Arabidopsis thaliana landsberg
agcccgatgggttttacagtatctcaaagcttctcaagtaagaaactttctacactctctttcccaatggagatggttttaagtcggtcaacaattcacaaaaggtttaagtgacgcaagcaatgacaacatctaagtcgactatccaataatattacgccacgtatatatccagctggctgcggtcagcgtataaaagaaaacggtctgttttgccgcacgtgcttgaaaatcccctcgtgtcatctcttttctgttttttgtgttttttcaatttaaattaattaaaacatttcggcgattttcgtccttataaaaccttcgtcgcctcactcacatatcctcgattacaatcttgagcagacgaagaaaacccaaaaaaaatccagatccagctgaaattgaattttcaaccaacgaagaagagatttttccaagagcaacagacaagaagaagagaatgaagtcggagctaaatttaccagctgggttccgattccatccaacggacgaggagcttgtgaaattctacttgtgccggaaatgtgcttccgagcagatctcggctccggttatcgccgagattgatctctacaagttcaatccttgggagcttccaggtacacctatgggcttcttctaattatttttcgcgaaatcatgtgtcttcgagaatcgttgtttattgagatgtttgttcttctttcagagatgtctctgtacggagagaaagagtggtacttcttctcacctagagatcggaaatacccaaacggttcgcgtcctaaccgggcagcaggaaccggttattggaaagctaccggagcagataaaccgattggtaaaccgaagacgttgggtatcaagaaagcactcgtcttctacgcagggaaagctccaaaagggattaagaccaattggataatgcatgagtatcgtctcgctaatgttgatagatcagcttctgttaacaaaaagaacaacctacgagtaagttctgtctcttattaacttatgtatcatcttttcgtgaatgatgatttacattattaactttgttgtggtgggttttgctgtacagcttgatgattgggttttatgtcgaatatacaacaagaaaggaaccatggagaagtatttccccgcggatgagaagccgaggaccacgacaatggctgaacagtcatcatcaccttttgatacatcagactcgacttacccgacattgcaagaggatgattccagcagctcaggtggtcacggtcacgtggtgtcaccggatgttttggaggttcagagcgagcctaaatggggagagcttgaggatgctttggaagcttttgatacttcaatgtttggtagttccatggagttgttgcagcctgacgcttttgtccctcagttcttgtatcagtctgattatttcacttccttccaggatccgcctgagcagaaaccattcttgaattggagttttgctccacaggggtaaaaacggaagagaccaaaaaaggtgtttgctagtagtactgtgatgtgccagagagaagagtctcatctcaactcatccctggctcttagtagtaaaagaagattgtagaatgttaatagcttttagcatcaatgtctcattagcaggcacattcttgttctttcatgagaagtttatatgaaaactaaaaatttatattcaaattcttcaagatgttgcacttatgtagatactgatattaaataacaacctaacctttatgagatatcatgctctccggaagcattttttgatgagtatcatcagctgaatcgaggcgatttcctcacagctgttattcctatgtttctgagacttttgattctcgttttcttgacctgaggtttctttttggaagacttctctctttccttctgttcaagctgtgtggagggtttttcagatccattattcccacgaggagtcttcattttgggatcctctttgcataatcctttgcttataccttcgagttcacatcctggagatacagaatatggaaccgcggtttcatcacatgaatcgatgatctcagaaagcgggctttgtaacttttgggcagccttccacagttctctgcagctttcctgtggataaagaaaaggagacaacaaaaaaacattcagaacctgtttttcatcagctcaaaaacatatcagtgacatgacgtaacagggatttttgtcctcaccattgataaaggcaaacgagaaacatcatcaatttctgaaacagctttgttctgctggtctttctctttgcactgttttagcattttcctatttttccaaccccaaagagaaacatgaaaatcattaagctaattcaaagatgaatagaaaaacaggcaacaaaagggatcagagcttactctagagcaatgatattgctgcatgcttcggtttggcactcccaaagttttttatatgcttcactcgtgatttccacattttcttcggtgtgtaagatgttttgcgcagttttgcttttctcactattgagcttgtttccattgcttctttacccgactcttccatcaacacatcattctgcttatatagtacagccacttcatataattcacctcctctactgtttgcttcaatcctagcttcatataacattttctacatctactacttcaacaactccctctttcctaggaagttgaac

SEQ ID NO: 7947 - DNA, 1388 bp, Arabidopsis thaliana landsberg
ggcgtgtcgactaagatgaagtcatctattctcaatgacgtatgcaattacatgaacagagaagaaatccgctgcggagaagctgacaggaatactctgaccagtccacttacaagtcacaatataaatatcagccagagaacatcgtgcacaagctgctacaccgtgaagtaccagattacaaccacgaaaaggttcgtgcggctgacggaagcaatgacatcatcacatactctgtatgtcgatcatccaattagtccaagccacgtgtaaacctcagctggctgcgcggtcaacgttgaaaaagaaaaaggttggtttttatcacacgtgtccgaaagaaaactacacacgtgtggttcatgaacctccccttcgtttataaaagctccatggactttgctctcttctcctcgatttcaatctttgagataaaccacaaagatcctccgattcgaaggtttataaaaactcaaaatcgaatcttatccacaagaaaacaacaaggtacttttccaaaaatgaaggcggagttgaatttgccggcgggattccgatttcatccgacggacgaagagcttgtcaagttctatctttgccggagatgtgcgtcagaaccgattaacgttccggttatcgcagagattgacttgtacaaattcaatccatgggagcttccaggtaaaacttcagtccacgacaagattgatatatggttttgtgaattgactttgagattttgaagagaattcgaatttttgtttccagaaatggcgttgtacggtgagaaagaatggtacttcttctcgcatagagaccggaaatacccaaacgggtcgagaccaaaccgggcagctggaaccggttattggaaagcgactggagctgataaaccgatcggaaaaccgaagacgttagggattaagaaagcactcgtcttctacgcaggaaaagctccgaaagggattaaaacgaattggattatgcacgagtatcgtctcgctaatgtcgatcgatctgcttctaccaacaagaagaacaacttaagagtaagcttttctgatttttaatttctggtttttttttcgatttttgtgatgatgatgaattgatgatgattaatgggttttttttggttgaaattttgcagcttgatgattgggttttgtgtcggatatacaataagaaaggaacaatggagaagtatttaccggcggcggctgagaaaccgacggaaaagatgagtacgtcggactcaagatgctcaagtcacgtgatttcaccggacgtcacgtgttctgataactgggaggttgagagtgagcccaaatggattaatctggaagacgcgttagaggcatttaatgatgacacgtccatgtttagtt

SEQ ID NO: 7948 - DNA, 1076 bp, Arabidopsis thaliana landsberg
cacttgtaaaaaggaggctgcagctcttaggtctcgcttctcgagagttcgtcatgtgagttttccatcactgcccatcatattcctttaactactattaccagctcgagtaaggtagttttggtcattaggaggttccaactttactagagacagaacatgaaagtcaaacctttatatgcagaattggctacgtatctagtgtattagaccctctctttgtgctaccagattcaaaatgaccaatatatgagcctatttcaacaagtagatgtactttggttagtccaagaaagtagagtggggattacatgatatctggattctggactgcaaaaaaatctttcggattctctctgctacttgattccaattcattgtctgagttgattacttgatttgctttatggctgcttctatagattcaagttattctaccaagacatagtccataggtaacaagatttgacaaatctctaaacttgctacgttttttgtttatctaagccatggatgtggagagcctatgacccttgcacagagaaatactccggcatgtatttcaattctccggaggttcaaaaggctatgcatgctaatataacaggactagcttatccatggaaagggtgcaggtaaaaaacacattatagtgggtcaacaaatttaagaaaatgttctcttgtggttcattttcagtgacatagttttcttgtttagtgacatcgttggagagaaatgggcagattctcctctgtctatgcttccaatctacaaagaactcatcgccgcaggtctcaggatatgggttttcaggtatatctacttctccttttgatcatcatcttgtacatcccggtttggtatcatgattgatatcttgttctgtaaatttggatgcagcggagacactgattcagtggttcccattactggaacacgatactccattagagccctcaagttacaaccactctccaaatggtacccttggaacgatgatggacaggtagaaaaaaacaactcaatactcagtttcctcagtctcatttctttcttctgtgaaactaatgcat

SEQ ID NO: 7949 - DNA, 645 bp, Arabidopsis thaliana landsberg
gatttttcttggacactgacgcatttcatctatcttggcagagggatttcattataatcattgccaatttttatatttgacccctggaaatttgcaatagaaaataaaaagggcagttcagagagtttagaggcacagatgatagaatatctaagagaacaggtagcatattaaagccaattcgcttgatctacttttcatcaatcaaaagattgtctcctcatttcttttttgttttcttttatgcagattggatcaaccttcataaatatgcttgtcaaaaaggttgatgatatcatgtcacacatgaaggagataaatgtttcagatgcatctcgggtttctggtcaagctcccaaaggagattactcgttggaatttatacaggttatctctgctgttctggctcttgaccaaaacgtccagcaagatgttctggtaattactcccattctttttcattttaacatatggcgtatgcacaagtcttctgaatagattaatcttgaatatgaaaagtccactgaagcgttgtttatctttacagttaaaaaccctcttataactgatttattcacaaatcaatcttatctctgaaatgtggttctgaaacatgttaccatagagctgattttttttgatggg

SEQ ID NO: 7950 - DNA, 2345 bp, Arabidopsis thaliana landsberg
attttgatccacccaagtattagagtgattttgttttgtttcgaggcattaattaaaaaccttaccgaaacttaggttagtctatggtccaaaacgggcacattagcaaatgcgaaaaaaaggaaattctcttaattaaagacccttcataaacactccaaaagcttcattatctacacctattcatattatcgttatagtccatagaaatcttccaaattaaagttttaatagaaaaaaaattacacaaaacgattttttgtttttaatccatgatcaagcttcaaatcctatgtgtttgaagctgtaacagccttgaataagctccctctggtcggcttacgagctcggaatggctgccttgctccacaatccgcccgtcttgaatcacaccaatgcaatcaacacctcttatggtggacaagcggtgagcaactaccacggtggtccgacctctcatgagcctctctaacgcctcttgcagcacgcattctgattctgcatctagtgcgctagttgcttcgtctagaagcaacactgtagggttcttgagcacagctcttgctatcgcgatcctctgtttctgtccacctgataactgcactcctctttcgcccactggagttttgtaaccttcaggtaaaccactgatgaaaccgtgagcatttgcggctcgagctgcatcaattacctcggattcagttgcaccatctttaccataggcgatgttgtcgaagatcgttgctgcgaagagagctggttcatgttgaacaagaccgattttgagccttagagatttcaggtttagccggcggatgtctttgccatcaatcatgacttttccagcaagagggtcgtaaaaccgctcgatcatcgcaattacagaactcttccctgacccactcgcgcccacaagagcttggctatgtccagctcggattctgaggttaaagtccctgaaaaccatgacgtcgggtcttgaagggtaagcgaaatcaacatgcctaaactcaatgtctccacggatcgtctccacgggatcagcatcagcatcatccgggtcaatcctggtctgcctgtccaagaccgagaaaaccgaaccaacagcttcacctccccgaataatttcaggagcaagactgacagtttcagcaacagagtttgcagtaatgaccaaaaccacaaacactttgatcactttggaaaaggttgacacgcctttactcacaaggtgggcaccataccagagaattaaagcctcagaaccatagagagcaagctgcgagaggccaaataggaaacccgaggtttgacttcggtataagcttcttttctgaggtacacgaagctcatgacagaacaaagagagaatcttgctctgtgcattgaaagctgctacggttctaatgttactgactccttcaccagcaatcattgaagtctttgcatgagccttagctgtgtctccagcaaaacccttcagagatagttgctgcaatgtagccacatatattaatacttatgatttagaacaacagatggtaataatagttcacttgtaaaaaataagattgacaatcaaaggtctaagtcgccactaaaacatgacatagaaccatatagttaaatcacatatgcaacactctatcccatcaacatcagtacaagtacaatgcctatctatgttcttctgtgtgaaatctatttgatagatttttcaactaataattagatcacgggtgaaaaaatgttggtgatatatcaaagcagagtcctgaaccttgcagctagttaaaaacaaaaaaaaactcatcacaacctaatctaccaaaacaaagaaacccacaagcacacattgactagtagatggtgtaaaaacactgacacacacactgtgataagtaaataatgcactgagacaacaactttgaccaatgaagaactctaaataaaatattggttctaagaaggaaaaaacaactttggattttataagaactaaatatgaaataactttggatttttgtggtgaggttttatgggcaaaagaattaaataaagagagaagtgggatcacagttcagagttcagagagtgaagtaaatatgaaagcttaaagtaggatagttttagcagaagcaaaagacagaggaatcttagctattttcgtgaacactgttatctatgggtcatagtaccaatagaagctatataataaatattcttcacacatgcccagagagtaaactaaagcctactgttttttaatttttttagcccatttacccatgtgagggctccatgatcttgaaacttacaatatttccaaaaagtaggaaaaaaaa

SEQ ID NO: 7951 - DNA, 585 bp, Arabidopsis thaliana landsberg
  unsure (1)..(585): unsure at all n locations
tttttcctttctttccgtattagatttctttctcgtaattttatctactcgaactgattgtttagctaaaggagctcgggctagaaataatattttctcctatgtaaacataatggttcatgaatggctctctctagcggagaatctcttcccgacgaattaatattaatggtgtttgtggaaaaaaaaatcagtacgagggtgtatatatatagtataggactatttcaatccaactcataagctagtttcagtataaaccacttaactagaaacttcaattaattaaaaaaggtgcatattacatatctgcttagccaaaatctacacataaattaacaaaaacagaaaatgaaaaaataaaggtaaggaagagagattttttcttcttggcgtctaatgaagacaagatccttaatccattcaagtcttgttcactaaatcctaagtacttttgttgtgttccacatatattggaaccaaaaaccaaaggcatatcttcttcttcaccttccactctttcccacgaaanataaaggctttgcttatttcctcgttaccgagaaataaatagcccaatctccg

SEQ ID NO: 7952 - DNA, 2075 bp, Arabidopsis thaliana landsberg
aagtaattgtatctcagttatctacatgtacagtattatctaatctttaatatacccattatatttctgttgtgctccgaacacgcagtaatcatttagagcatagcgtacattgatacataggttatcttctatttgaactctgacttcaaaacccagcttaattaagacatcaaaagatgttaagcatcacactcttagatccggctattaatatacacaatgtacgtttgttgttttaagatttccaaaagtcaaattaataaaatgagcagcttattgcagcaagttgcaatgctcttaatataaggaccgataagtgtggatcacgctcgtgtggacgtaacttataaagactttttctttatttttgaagtttcaagtttttaaagtcatatacatttcaacttaatgcatgtgtgggtgatgcccagataaggcacacaaacccggcaactcccgatctcaacgtgaagtaaaatagtttattttaaataaatttacagagtggcgtctacaaattcacaatcaacacgtttcttttgacaccagtcgacacataataaaacaggaagaataaactagacatgaagatctcaaacacctcttcgttaatgctgttttttcttgcggccatgttatgtttcttgcgagccaagtcacaaggagtttactgcagcaacccttaggaacgatgcttccaaaagtacatactgtgtccgcaagaatgtcccaccaccggtgccgcaaactctatgaacagagtctgttacgtagagtactctgcaactccgagtgtcgcagtaagcgaaaatgcctttgaactttttgtattaagctttttaccaaattttgggtgttaagttattcaattcagaacttaaaccgttttgtgcaaatggtatcaacacataaccggtgtaaaaatattggtaaccatttatttttttctccattgagaaacattatacatttgcgggccgtcaagttggatcaaactagtctccagtcgagcctttttcctttgtggaatcctaagcctcaccgaatcggtaaaagcccatataaatccctattatttacatcaattgccactctactatctccaagttttttttttacttttttcacccatcagtaacttcacatctctctcattgcctaaactcgaatgtttgacccgaaacaccaaacccactcgagctgtacccgaaactctgagtcaacccgctcgagttctgctgccgattcacatgcccactctccgcctcaccttccgccgctcgaaacgcatcgtaaccaccgtaactcggtaatccattggtcggagctagctctggaattggattaagacctgccaagctagcccaatcaaagttcccgttaagaatcgtcctgagcgaattcatccgaggaagattaaaagactggtcttttatctccgggaacgaatcaagaacgtcgtcaagctgtgatgaagaagacgatgacgacccattcgtgctatgctcttcacgacaagcttgaaccggagtaacagcttgtctctgagatccagatgttttcttgtaaattcgacacaacacccaatcatccaactgtaacaaagaagcaaactttatcagattttgatttcaattttaacgaatttggatctgggaaagtttcagtctttatttaccttggagcttccatggctacgagaatgttctattaagcgatactcgtgcataatccagttggttttagtgcctttgggagcttttccggcgtaaaagaccagagcttttttaatcccgacacgacgaccatccgccgtgataattttgtcagtacccgttgctttccaataacccgacccggctactctattgggtcttgacccgttcggatatttccgatctcttgggctaaggaaataccattcctttttttccaacaaagccttacctaaatagccacacttatagtccctttagttttaacattttctcaaattaaaacccaaaaggttgaccattggaaaaataccaccctacaaatggggaaacatgtttgcttaccttggcaaaatt

SEQ ID NO: 7953 - DNA, 2441 bp, Arabidopsis thaliana landsberg
tcccgatttccgaggtacgagatgatgtagtagctgcatatagacaggaaatactgtggcagtctgaagaaatgctttaaccttacacaaaactgttcgtgcggagaaaggtattttctttggtataatgagatatcttacgctcttctttaatgaaaatttcaaggttacatgaactcattgaattaccttaatgaaaggttgcagtagaagttcttgtgatcgaatcagataatgtggcagccgcaatagctgaagaagtgactcgggattcaatagacagaattgtcattggaggctcatcccgtagttttttctcaaggtacactaccaccctgctgctagctttcgacctttgttctttctattccgtgtaccaatgaatctgttttgaaaattccaggaaagctgatatttgctcggtgatatcagctttgatgccaaacttttgtacagtctatgttgtttcaaaaggtaaattgtcatgcgtccgaccatcagactcagacggaaatgctactataagagaagatggtagtgagagaacaaattcttcaagcggttcttctggtcccacctcaggtccatgactcatcaatgtatttgtgtgaatactctactagaaatggtgtgtatatctaattctgttaccccattttctcttctagattcatcagatgtaatgtcaagtgcgcatgactctcaatctcgtcctctatcccttccggtcaggagaatgcaacatttccctgcaattgcaggacaggcatcagttccaatggaaacgagttctgttggctcggatgaaaccaggtgcatgtctttggatgcagaggaagctagagatgtttcaagtatcaatagaagcagcacagatactacatcacgttggactcctcggcgtagagattatgaggagagaaaagaagctatgagttcttcttcgagcaaccgtgaatacgggaattttggtactaggtttagttggagtggcatgggtgtcgatactacacactctcgggcttctcaacaagcttccaacatgtctgatgctctaagtgaacaatcctatacagacaaccaggtataaaatggagttttaatttcgacattgtcttgtgaatcggaataatataagattatttgttcaggtaaacctaaactttgaggttgagaagttgagagctgagcttagacacgttcaagaaatgtatgctgtggctcaaaccgaaacctttgatgcttctcgaaaggtgaaggcctcataatatcatatatctttgcatttgatgaaacttattaaattgagctcaatgcttttctgaaaatgtttcagcttggtgaacttaaccaacgtcggttagaagaagccataaagcttgaagagctaaagctgaaggagtaccaagctcgagagttagcagaaaaggaaaagcaaaattttgagaaggcaacgagagatgcagagagcctgagagaaagagcaaaaagagaaattgcgccgagaaaaaaacccgaaaggaaatgctaacgtgatactaaagagaaggagaagcttgagggcactctcgggtctcctcagctgcaatatcagcactttgcttgggaagaaattatggctgtcacttcatcattctcagaagaactgaagatcggaatgggagcttacggagctgtttacaagtgtaatctgcatcatacaactgcagttgtcaaagttttgcagtcagctgaaaatcaactttccaaacaattccaacaagaggtatggaagtgagctcaaatttggtttaaggaactttgtttgagattttgtgcctttcactatatggaagttttctgattttaatttcaattcttgtggataagagtctacatttatctcactggcctctctaatttgcagctcgaaatcttgagcaagattaggcatccacatttggttctccttctaggagcgtgcccggagcaaggtgctttagtttatgagtacatggaaaacggtagcttggaggacagacttttccaggtcaacaacagtccgccactcccgtggtttgagcggtttaggattgcttgggaagttgcagcggctcttgtcttcctccacaaatcaaagcctaaaccgatcattcaccgtgatcttaaacctgcaaacatcttacttgatcacaactttgtcagcaaagttggagacgtgggactctcaacgatggttcaagtcgatcctctatcaactaaattcactatatacaaacaaacaagccccgtgggaacgttatgctatattgatccggaatatcagcgcactggaaggatatcatcgaaatcagatatctactcctttggaatgattcttaaacagcttctcacagcaaaacctgctattgcattgacacatttcgttgagagcgcaatggatagtaatgatgagttccttg

SEQ ID NO: 7954 - DNA, 837 bp, Arabidopsis thaliana landsberg
cattttagatttatcggcagcgacagcccaatcaagactctaatattgcgtgactgtcattgtctagatagggtaagtataaaacacactaagtttcaattttgcatcttttattcctatgtttctgaaaatgtatgtcgatatccagagagaaatagggtatttttttggattcacttctcgacgaacacttcaaattcattcgacatattgtaagttgatatgttttttcttttcaactatgtgtatgctagtcttttatctatttcactactttttaaaaattgtatgagccaaaagttaccttgctttaaaacttgatttgtttttgcaaatgacttcactcacaagtcataatatcttccttgattttctctaataggacgtaacaagtgaagttgctgatgggggtagggaaattatcataggaaagtaagtagattgttttagtttctgtttttttttttattgtaccatttataataacacaactatatatgcctactaatgacacaattgtttgtgtgtgtatgtgtgtgtttggatgtaggtatattataacgaagctgaaagaacaaagatcagatgtcacaattgtagccaaatctgtttgtttttagctaaatctagaaacataataatttgtatcaaatttagtggttttggttgtaaattcagatcaaaagatttcttgggcagattttaacttgcttttttttaacccatggaatgggattgtcatcaagtgcgcgatactgttcaagaaaaacttataactaccaaacacatttttaccaataaccaagtcactgatctcttcatgacttcagcaacttt

SEQ ID NO: 7955 - DNA, 627 bp, Arabidopsis thaliana landsberg
ctccgcatttccagattattgatcgttatgaaatacaacatgctgatgaacttagttccttagttagtaattagctaagaacgtcattctaatattcttctggatgcggtttttggtgttatgaaggatagaagcgctgttcaagccggagaaacctcaatgttttgaactcgtaacaccgaacttaattctctagagttacagttattgtgtctactggaaaatacaagaacttcacaatctttctgaccattccttttcttcatgtgcaggatcttgaagaaaaaattcagaattatcttccacacaaggagttactagaaacagtccaaaggttagcagtacgacacatttttctcccctcttcttctgataaaaaaaatgttttttttcttttgtctacttgtgaatacagcaagcttgaagaaccaaatgtcgataatgtaagtgtagattctctaatttctctggaggaacaacttgagactgctctgttcgtaagtagagctaggaaggtatatgtgctgctactaagcgattcaaccaattactccacaaaaccttctttttagttagttatcctagaacaatcttttgacataaatcttaatgtcttgttataggcag

SEQ ID NO: 7956 - DNA, 2382 bp, Arabidopsis thaliana landsberg
agcatctcatctgctcgaatcagtttcatataatattatgatgatcactatatgcagctattggtccacctttgattcaaacatgtggagtgctgtgtacatacgcacatatggtaaagactacaaattaaaagctggctatgattctgatgtacgccttggctgggcatctctctgggtaaatcatcaacctttagttttcttttctctattctcttattagcgtaatctttttcactcgcttaagccccaatccgagtcatatagaacattcattcaccacacaattgtacctaatgatgtatctaccatctaataagatctaaaggacacactcttgagcaagcttttgtttattgagttgtgaccatgcatgagtctcttgttataaccgtggcaggttggtgatgaagctggaaaagtgaaaacgacaccaatgaagatgaaagtccagttcatgcttcaagttccacaagatgacatcaaatcatcagtcttgatgttccgagtcaagaaaagatgggacatttgatgaaatctttgaataaatcatctcttagtttcactttcttttatctctctgtaaaacccataaaagttgtttgtttctccttatatatcaaatcttttgcaaagaaaatacaaaagcttagagtgaataattgcaattgtatttctgtagcttttttttaaatgatctttttcacacgtgtgagactagtataaatgttgctaattttcgtttccagtataaaaagttacattgcttttaccttcactttttaacccaaatcaattttaaccactaatattaaaattatgctaaaatggaatattcttctcacaacgaaaaattaataaaaaagtattgttggcttatttcctccgttattgtttttgtatgcatttggtctgtgtgttgtgttgtgttgtgttgtttatcttcttcttcttcaacccgaccaaatacacatccgacgggaaaaaagagttccgacaagaatcgagaactgaaagatttttcatttgtctctcaaatatctgtggagagaagagaaattggaataaagaagacagtgttgtgagagagagagagagagagagatgagttcgtctctacctctgaggctacttcttcctcttacaacttctctgatttctcctcctcctcctcctccagattctttccatgctccttcgtcgttcagatcgaaaaaccctaatttcaaacgccgattgtcttcttcttcctgttgttcttcccagtcgcagcttttctctgggagatgcagatcctattcgcggtgtgttaccatggtatcgtttgattctctctctctcattgtttgataattcccattgagtttttgtgctaaattgcttgatcagcattagtttgatcaatttcggaaagtgattgaattcgtaggactgtgtttagaatgatccatgttttgtttcatcaaagtttgtattttcttcccatttatagatttcgacctgaaattttatcctaggtgttatttactctgtatcgctttcgtcttcaatgtagtagttaggtgggattccagtgttttaatggcctttgctgacttattcaagaatcaagatttcactctatttaaacttcattgtatatcaaagcttttgatggttgtatgtgtgtctttgagtccttagtgtttataagactacattgtatcttatcatgtacgtaatgtctcaaagttgtagattttgttttagggggtggtttctgtctcaaagttggttctctggttcactttaattgggttttcttggtcttaaaagcatgttgctgcactccttgaaacatcagctttgatttgtaaaagtaaaagatatttagtttctcaagtttcatcatgatagtgtaagcttgagagtttgtgtttgtgtctctcttcccaaaagtcttttgcagttgttttttttccggcttttctctgatgatgtacgtttaatggctgtttcttatatgctgtgtatagtgcttaccagaacacatgagaaatcaagagaacacagaaatcttgacagataaagatgaccacattgaatgtgtgcttgaatcggatgaagattctggcctcaggattccgactcaagcacaggctatcgttgaaggatctggttcagttgcagtgtcagagctaaaacccgctgctgatgtagattacatacaagtaagactagtttctctgcaaattcagcacgcagccttacatgaaggacattaaactcttatatcactctttaggctttatgtcgtaaactatacttgatgattggccgatttggaatatcatgagtcttttagcttgttgtaaccgtgtatgtttaaatcgacaggagcta

SEQ ID NO: 7957 - DNA, 1326 bp, Arabidopsis thaliana landsberg
aagctacacctctccgagatttcctttctcgtgttcatgctccacattttttaaccaagtaggtaacttctccgaacactgatcatggatcatcgagcccgacttagcaaaggcggtgacttcttgctcatacttctcgttacaaagatgacaccgaggtaaagtctgattcatcgagctactagacggtattctaaaatccgatgtggatgagaaaaaccctccaaatggaacaaaagatcccatcaaactgtatataaacacataacaccacagtttcaataaaaatattcaaactttggatacaaaacaatcaaacatagagaataaaacaaacctagattttggataaagcccttgacttgaagatgtaataggaagaagatgaagattccaatctttatcaatcgttggaaacctctcaatcagcttcaaatacgtctcattactcgaaacacttccaataaaccaaagtttctcacggtgaagcttcaacaaatcagcgagcttcaacacaaacttctcaatcacatcaacagagaaaacatcactagctaaaacctttaactctccaaggttcaaaaccatccctgacttcaatctccctaaatcatcaaactttatatctattcttgatccatcaactaaaacttcactaatctctatactaactacacttaacccactaatctccaaaggtaaaaaaccaaactttcctctgtttatagaatcagtaaacgttttaagagcttcaacaccacaaacaccaactagtaatggattcttcttatctttcctcgctaaaacttcaccgattcttctacagttctcgtcgagatcaccaaacggaaacccgaatctaacccgacccgagtcagattccggtaagttacataaaaacagaggaggaatacgagatcttgacgtgaaccgtgaagagaattgagacgtcaccggaggatgaagcacgtcgagtttaatgtcggtgcttctaaacccggcttcaccaaagacccgactcacaatcgggtcatctaaaatggatagtataaaatacttcaactcaactttcaaaaccgacgtcgtttccgtgttgttgttccatggatttgatgaagatgctaagtctctggatgacgtcgttgagtcgcttgagatcttttgatcgccgccatgagagagtttgagaccggaggatcttcttccaccgtcgtcgttggtgttgatttcgaagaaaggtaatctgtctagagaacgccgacgcagagctcaagcgcgcgaaactggagacgtgaagagtacggtgtgttgtgggcggccgtgaga

SEQ ID NO: 7958 - DNA, 2087 bp, Arabidopsis thaliana landsberg
acccctattttaagctaaagatcccaaaattctttcagttgagcacccttgctaataaacacttcaggtaaagaaattgctggtaaaagtatgattctaagcaatgaaaagttgttttcagaaggtcgtgaccaccaccaccaatatagcattgaacccttttgttcttggtaaaccctcgacgaaatccacactgttatcagaccaatttctgctgaggaatgggtaatggtgaaagtaaaccagcgggtgagagcgtggaatacttgttttcttggcaaatttggcagtccttgataaacttcactaccttttttctcattcctcgccaataaactttacttgttagtttcttaaaggtcttcagagctccttcgtgcccacccatgggactggtgtggaattcttgtagtagctttggaatgaagggagatcctttaggaatgactaatcgtccttttctgtataacaacccttctcgcacactgtaatccccactcttctacaaattatgttcaatctctgccatgatcttgtttaactctggatctgccttaacttcttctttcaaggcagaaatatccaaagactgtggagccttcagcttgagttgaataaactctttcgtttgagatttcctggatagagcatcagctactttgttgtccacacctggcttctattcaattctgtacttcagtcctaccagtttagaagccaatctctgttgaatcgaagaaactgctttctgatctaattagtgtcttagactcctttggtctgttttaatgacaaactcattacctgttaagtaatgcttccacttggttacagccatcattattgctagtagctctctctcgtagacggatctaatccttggcttgaaaatgcctggctaaggaaagcgatgggtcttttgtcctgaaaaagcacaacccctatctcagtacatgaggcattagtctctactgtaaactccttctggaaatcgggtagtactagcacatgcagctgagtgacgacctctttcagcttgttgaaagcttgagtcgccttttcctcccgtttgaagccatctttcttcaagagatctatgaggggtcttgctatgagcccataactcttgacaaacatcctgtagtagcccgttaaacccaaaaaccctctcagttctgtaacagattttggttgaggctaattaaccataacttctatcttctcgggatccgcctccactccttgtgatgatataatgtgtcccaaatacgctatcttgctactcccaaatacacatttcttagcattcacgaaaaacttgtgtaactgtagtagttgtagaactatctcaagatgcttcatgtgagtctccatgtcctaactgtaaatcaagatgtcatcaaagaacaccagcacgaatttccataaatagggtcgaaacaaatcattcatgacgctctgaaatgttgagggagcattagttagctcgaagggcataaccaaaaatttgtaatggccttggtgggttttaaaggctatcttctcaacgtcacttgctttcatacgtatatggtgatatctcgactttaaatctagattggagaacacatcagcacctttaaattcatcgagaatctcctctataaccggaatagggtacctatctggtatagtgaccttgttaagagccctgtaatccactcaaaagcgccaaccaccatctttcttctttaccagcgacactggacttgaatatggactaatacgcgggcggatgatctgtgaatccagcatctccttgaccaacttctcaatctcatttttctgtctaaatgagtgcctatacggtcggaggttaataggagaagtaccatcttgcacagttatagcgtgttctctgtttctagcgggtggtaattggtttggcatttgaaacacagactcataattgtccatgactgacttaatagcatgcacaacggtcgacaagtcttgtggttcattgtgatcaaacagagcggataattccagaaagtaagccacaccagtgtatcttatgactctctccatgaaccttgatgacactt

SEQ ID NO: 7959 - DNA, 652 bp, Arabidopsis thaliana landsberg
atgttgaaatcggctaacgattatgtagttgaggtttggaatttgaaatagtttgtagttttggtttttatagactagggatctgagttcgggttggaaaaacccgccagcaaatagtttgggttgaaaaaagccgttttcccgtatcagtcaatatactctctacctagagacacttcatgtacaatatcagtaaatcaccatccgtaactgtagtgatttgatgcttcctcttgtgaagctttgacaaattccgttttgatgaagatgttgccggctgcaagacaaatgtaaacgaagactgcatttaaaatgtaatatacaaagaattcaagtcttttctacaatatatttggtaagatatcaagtggctcaatttctacacaaataaataatgcaacaaaactacacagtgaagccccaaacaagagacaatctgcatattctattatattttctccgcgcggcttacctatatgctttctagtagaattcttctacaagcatagaatttaaattcacacatcaaaagtaataagagaccctagcaacaactccaaagaaatttttgcagcaagacaaaacaaagttaacaatgacagagtatagaaagggtaacaaaacttacatctatcttcttctgacccaagag

SEQ ID NO: 7960 - DNA, 1663 bp, Arabidopsis thaliana landsberg
agagcagttaaataaatcaaaagttagtacctgttagccacaaggcggagttgtctaaagggccatatatatacaccttccagatttatttgggcaccacccacattttgttcattgtcaaatacgtcatggaaaacaactacaccctgtttcattaacgttgtataagttcaaaacattgcattctacaacatcaacggtgatcctatgatacagagcttagaagctgaactctttacctgaacataatgcacaccagttatcttcgttggaactgctactaactcaaccacagaattaccattttctttttgaaagtcttgaaacttcgaagagctatttaaggaattcagaaacttccaagttcctgaaaatacccgctttacatttgataagtagtctaaaacattaagctacagacatatacccacaacatcgtagacaatcctgaagtgtaaaagacgtaaaaaaaaatggagaagggcatgcggcaaacctctataagttcctgttatattccaagcataaaagggtccaacttcagcttcttgtttcctaccaaagagccactgcaagatcacaaagacctcacgtattaaaccattacccaaacattgcctggtcaatctaacgtacatgagttccctttgcacagtctacttaaaagtcactagctacaaacccaaactgtaaaatgtcatcgaagattccccactatcacgcgttctacttctgtaacaactaaccggtctctatgtaccatagactccattattgtagtctcatcacaccacactactaacgacagattcattcttattcatctcaaagtattcgccggcagaacaaagcttagataccgatgagctcaatcgagctaatgtaaatagtttatatacattttcagctttgctcaatcaaatcaaaagataaaacttagatcagagctgctctactccgggattttcattcaatatggtccattttcttcgaaactcagaaaatctcagacttagaaaaaaaatcatcaattatgaccagttctcgttcagcaaatcatgagcagaaacaagtcaataaaaaaaacatttgacagcaaactgctcgaattcttagttggaaaggcacatcaaaattacgaacaaaacataaaaatatgtttctgggaaacatcgagatgaagaaactttcgaacaatcatcaataaagtaaaaacacaacacacataccttgtcactccatgatcgaggtttctccctaataggtctcaatcccagcgcttgttgcgaaatcgccaaccaaatcgatgaccataagataatctgccactcgaagaaccctaatcccaaatgttcccgcttcttcatatcactcacaacccccaaaaatcccttctttatgactcaatacaaaatccgactggatcagaactgattcgagtctagctcaaaaacccacataactgaagaaagaaagaggtttgcttcaaatgaagtcaaaacaaaactaggctttggttttggttgtgtaagaaaacccaaaagacagcataagaatcgtagatgtatcacacagcagatagaaagatgattaccgacagattaacgacaacaacaataacaaccttaagatgcaatttgttttataaaaactcccattgatg

SEQ ID NO: 7961 - DNA, 787 bp, Arabidopsis thaliana landsberg
gttctttctgcttcaatatcataaccttgaagctcatttccgtgatgtatttatgttactggcacttggaagtttctagatactgtaaatagctcttcaaagtttccagatttcagaaaagaaagtggtaactctgtcattgagttagtgacaagtccaacaaaaattactggtgtgcattatgttcaggtgaatagtcgctcttcatagtcttttgcatcatggagatcgtgctttttgatcttagtaaaaactttgcaaaatcagaacttgtgttaactttgaatgtgaacagggtgcagttgttttccatgacgtatttgacaatgaacacaatgtgggtggtgcccaaattaaagttgaaggtgtatatatttggccctttagacagctccgtcttgttgctaacaggtataactacatttttttttaaaatctatttaactgctttcaagatccagtattggtagtgttctctaatgtctgtacgtttaatgattaatcagcggaaagaagagtgattcaggactagaagacgattatcttctctccaacccctatcatctggtaatgcctgatatgatccactttgccacaagatgatggatcatatttctgattcttcgttatctttatttgatgcgttaaaatgtttggagagctgataagtgtcaacttttctgctgtcggacagctcggtattttttcctcccaagtatttcaagaatctccaagagacagaatattaaacagaaaacttgtagtaggatcgggtttgtttctaaga

SEQ ID NO: 7962 - DNA, 1797 bp, Arabidopsis thaliana landsberg
cggacactgaagaagcctatctgtttgctcacattggaccataacttgtcacataccaataaaagtttaagtccactaaaagaaatcttgtgtaaataatatttcaaacaaagaaatccatgcaaattacttataaaaatattacaaggatacacaaaacataataagaacccagaacaactttcatgagaaatttattttaatctaatggttaaatgttatttttacagcggttcagtctcattaccatgcgttgtagaatttatcggtatattcgttgagttttgtcgatccaaaaaactacaaataaaaatcaaaaatatttagtggtcaatgtttagattgacttgtacaataagctgcctattttgctggtttccagtcctcagccaataaagaaggaagacatgtacaatggttgctattatggcgtcggatggtgtcagcttgtgtgagacctctttttaagaaaaatattaacaaaaactttgaaaaaaaatcttttttgtctttcataaatttaccattatcagtaagtctattaaaatagcaaaagatataaaatcttcaaataaattttaaataaggatattggtaaaaactctctcaagtattggctggtctattttaaacctcaacagaaaatccctcagataatttcttttcataaaaatacccctcaactaagttattaataaaataatatgtcaagttaattcataaacaaaaaatattcattcattctataataccttcaaaatcccaatactgaaaaaactaagcctggacgtttaatccgaatccgataaaccgaaccgcatccgaactgggaaaatcggattaaaaaccgagccgaatccgctcaattaaccgttcggttattgatttctatatccacggttatcggattttatccgatccgaaccgaaataatatggctatccgaaaccaaccgaagaacttcttctatacactactctttagccttcgaagtctggatccacttcccttatgatgattatcaaacaatatgattcgatccacttccctaatcttcttgattttcctagcaatacgggatccacttcctctagattataaccataaaaccctaagctctttcaatatggaattcttaagctctctttcgtcacaatcgcctccatcagaagcatcaagcaatcgatctcgggtatgtgtttgaacttcaattcttcttcttcattagctatcgtctctgttctttgattcttcttcttcattagaaaaaaatttgaaactcatttaaattgatttagtcatataactaatgataaattctttgtttggattttaaaaatttgtgtatgttggagttaaattcttagtcgattctaatcctcttgttgtgtcaatggatgtttgttgagtagtaagagtatatttttgattgtgagagtatagttttgagtagtgaacgtatatttagatggattctcattattcttatgttaaaacttctcattattcttatgtttagatggattcatcaccatttccaagcaacagtgatgtggggaatgagaaagtgactgaacctgaaagtgatgctgctaacaaaaggaaggatgttcaggaagatggtggagctacttcaaaaccacctaagacaaagaaaccaagtcaaaggtcgtttgtctgggaccattacacgagatttgaagataatcctaagagatgcaagtgaaactattgtcacagaacctacggatgtgattctaaagatgggacttcaagcttaagaatcaacttcgaatc

SEQ ID NO: 7963 - DNA, 790 bp, Arabidopsis thaliana landsberg
gtttgattttgtttctgagtccatgcttgaaaatgcttgcagattcgaagatgattcttcaagtttgaagtcccatctttagaatcacatctgtaggttctgtgacaatagttgcacttgcatttcttagggttatcttcaaatctcgtttaatggtcccagacaaacgaccttgtacttggtttctttgacttaggtggttgtgaagtagctccaccatcttcatgaacatccttctttttgttagtagcattgctttcaggttcagtcactttctcattccccacatcactgttgcttggaaatggtgatgaatccatctaaacataagaacaatgagaagttaagagcatatcaaagtttttgaatgtcaatttggttacaaaatttcagctacaaacaatcaaaaatatacattcactaatcaaaaatttacgctcacaatgaaaacatacgttcactaatcaaaaatatacgctcacaatgaaaacatactttcacttattaaaaatatacgctcacaatgaaagcatacgttcactaatcaaaaatatacgctcacaataaaaaatatacgttcactaatcaaaaatatactatcacaatcaaaaatatactctcactactcaacaaacatccattgacacaacaagaggattagaatcgacaaagaatttaactccaacatacacatatcatttttaaactttcgtcaactgttactaaattaatacacatctccaagaagttgtgttgtgtacgtcgttgtactttgttaaatgttaagaaa

SEQ ID NO: 7964 - DNA, 1091 bp, Arabidopsis thaliana landsberg
aaggaactcgtgatttccctcctgaggatatgcgactccgcaactggctcttcaaccacttcattgaggtcagagtattacatgaactctatgttttgtttctgcgattcttcttttggttcgatgaaattttgaatactgtccgtaaagtttgacacttttatctgtttattttgctttgaaggtctcacggttatttgggtatgaggaagtggattttccagtactggagacggaggcattgttcatcagaaaagctggggaggagattagagaccaagtttgtctttctacgtttcgattcattcgttttacttagcttcattcttaggatctttacttgcagtttaggtagaatttggggaagaatttagttccttagcttaaactcttgcaaccttgttgtgtagctttactgctttgaagataggggtaatcgccgtgtagcattgaggcctgagcttacaccttctttagcgaggcttgtcatacagaaagggtaactaatgcagaattttctctcaagccttgagaattgtccttattcttcaatgagcagtttatttatttttgtttgtaaaaattctgtatcaggtaaggatgtgagaatgttgattcccatattctttttggtacagaaaatctgtttcccttccattgaagtggtttgctgttgggcagtgttggagatatgagagaatgacacgaggaaggcgacgtgagcattaccagtggaatatggatattattggtgtgcctgaagttacagtatgtatctctcatacctttaatcactttaggccttctagtttcttgttatatgaacctgatctgtgtttaaagtctctataagccggctaatttggttcacaaaccttttcttttaggctgaagcagaactaatttcatctatagtgacattcttcaagcgaattggaatcactgcatcagatgtgggttttaaggcttcaagcctcaaggtatttcagcttacgttctctattgatgagatatgatcatttagtctctaggtttacactctagatacagaaccaagtcactcacttgcaatgctaaacatgagtttgaga

SEQ ID NO: 7965 - DNA, 1270 bp, Arabidopsis thaliana landsberg
tagagaaaaggattcatcgggcttctaggtcaactaaccgtcaccggatcagtaacagacgaagaattcgatcggcgattcgaagaaatcagatcgtatggtgacgaccacgtgatctgcgtgatcgaagaagaaacttcggggaaaatcgctgctacgggtagtgtgatgatagagaagaagtttctgaggaattgcggtaaagctgggcacattgaagacgttgttgtggattcaaggtttcgcgggaaacagctggggaagaaagttgttgagtttcttatggatcattgcaaatcaatgggttgctataaggtgattctagattgtagtgtggagaacaaagtgttctatgagaaatgtgggatgagtaataaatcgattcaaatgtctaagtacttcgattaaacgttcatcatgatgatgatgatgatcttttgttttcttgttttgaattcgccattttaatgatagaagttttttcgagtttcgatgattacacagaggactaatgatagactaaacaacacaaaagctttagactttgaaaagttaatgatacctatgataaacagatatatctggtgaatccaaatcaagacaaatctccaccgcttgattgccaaagattgatgatgtctgtagcttggttaaggaggaagacacgatgaagctcagagatccaaggcttgctctctaacaaagttttgagctcttcccaagcatctttcctaggccagaagtagtatggactaagtgggattgttccaaatcctggaatcatatggtctaatgcaactcctatgtccttttgcatccatacaaacttcagtaccacctttggtttctctagcggcttcactaacacacgcatcttcttctgcaatataagatgacgataacaagggaagaatcatacatctctacttcctttcacaaaagttttcacaatgaagcaacataagggaggtttaacactagcacacactgcctcttctaccactattaaatagatggagacaatacatttggtttaccacattttcgttcaaatgacaaaaaaaggctgcaactttgtctaacaagcttataaccccaatttgttccaagagaagttttttgacgatgactgacctttccaagtggcggagattcagattctggtagttcatgagagaaggtaaccttggagccgggatatgcgaatattccgggattaatacaggagtgtctcgccggaatttgaccctgattccaagtagagcacgaa

SEQ ID NO: 7966 - DNA, 1110 bp, Arabidopsis thaliana landsberg
cttccggatgagacacttttttgttctttcctctcacgcttgtttcctctgttttcttggagcagaaacatattcaatattggtgagtgtgttggagaagaaagtgacactaacgtgtacatattccggtgaccggagagtctctaaatcctatggtgaagctcttctctgcaaaatctcaaccatcaagcgtttgatatgtccttcaaggaaacaataactcagagttgcttgatgtttgcttttattatcattttctctttccaataaaatgaatcttttatgtcgaatgtgattggatattgtttagataaacaaaaaactctcaatagcaataataatcatagacaaagtgaattcttgaaatgcagaaatcaaaaaagagattattgagaagttaaattgccgccactttgttgccagagattgatgatatcagtggcttggtttagaagaatgatcatcttcttctgagagatccatggtttagcttcaagagtagacttaagctcttcccaagcatctttcctaggccagaagaagtaaggactaagtgggattgtgccatgtccaggtacatgttggtccaatcctaatcctatgttcttctccatccacacaaacttgagtaccactcttgatttctcatctggcttcaccacctaacacaaacaacaaagatttgtgggttttgtaacacaagagacaagaagatgaagaagaatatgttgtttttacctttattgtttgttgtggagtgttgtcggaagtatcaattccggtgactgtttcagcggtgagtgtctctggagctgctagagttatgattttccgttttacagagatgggtttggttgtttgggtatggaacaatggaggagaagcagtgatggagagttttggatgttgagagatgaaagaagagcagagggaagtagaagagagtgccattgatgacatcatttttgtgttttctcagagaacaatggagattttgtgagaatatggataaggaagatatggtcacatttttgggtggagtttcaaagtagtttgactatcaaatttatgggctttgttgacttggcccatcattataatgggtcaaga

SEQ ID NO: 7967 - DNA, 2187 bp, Arabidopsis thaliana landsberg
  unsure (1)..(2187): unsure at all n locations
aaactttcgaagagaatgcggaagatgatggagcacgaaaaacatttacaggaaaattaatttgttcgagccttctttagggagttctggcccgataatgtataactaggttttattcttttacttcttattgacctgaatgttccaaaagcttctgtatttactgcaaatttagaataactctgttctattgccttatcaatgaagaaaaatagttatagaatcatgcgctcaaccttatacctttagaaaatgggaaaagaaaatgaagttaatgcagacacttcaagtaaaggtttttgttagcaagtttctaaagtgtatgttcatgtgccttgcattggtacccatgcatttagcatgaccaaatcactttatattgtgaactaaatttgggataataatccgatttaacatgggagtaacaaaaaattctagcttgtgtgggtaattaatccatttgttattatgtctgctgtctgctgaattcactttttcttcttgttaaaaaccatttgatgatcgtttatagttaaaataaatgggccgannnnnnnnnnnnnnnnnnnnnncccttcaaataaatagaaattgttatatcttcttccttcaccttccgtcgtagttccccgacaagctaactactgttgagccccgccgcatccgaagccgacttttcaaatcgtcgagcttcaacaatgacgtctcttctccttccttcatctcaatttctccagactcgaacccaaaacaatggccaaccattgcttctccctcgaacaccactgttcgcaccactaccttctctccgtcagttgagaccgaaacacatctctatttccgccgcagcgccgaagaaacaatcggagactgtcacggcgccgacaccggcagcgaagaagaattcgagcgtggaggaggaaacagaagaggaagtagaggaagatatgccgtggattcaagagaaggcgttagacctagtcgagttcactggatcggtgagtcaggcgattcctggtcctcgagttggaagtagcaaattgccgtggatgctcgccgttcctttagcttacgccggcgtcactttcgtcactgctttcgtcaaaaccggtcagaagttctcttcccctaaagctcaacgcaagaaactggtctctgattccactctctcttttgtgatccttactttaaaaaaaaaaaactaattcaatattggtttttcgaatctcttcaggtgaatcagaatgctatgctttgcagatctatagatgagctgttacgaaaagatggaacagtgcatagctctgagcttaaggcacttgaacaaaaggtgagaatatatataacatgtcactaatcttttggtttgatctcttaatcatttccagttcagaatttgacatgagaatgctaaattttgttatctacaatacagacagagtttaacatggaggagatattgcggaaatacattcgttatgcgttgaatgagaaaccgtttaatcccgaccttgttgctgatctcattcatctaagaaaagcttctggtttgaatgattctcagattcctgagattttaaatgagatctctcgtcgtattgtcaaggaaaaaggtaaccgaaactttgttaaaaggttctctattgtggcagtctcttctttattgcccttgacatatttggttttggcaggtccggtagtgatgaaaatgcaaggctttaccgaaaaaggattcaagagaaaactcgccgtgcaagcgctttttggaaagatttactatctttccgaggtaatcaatgtagaaacattacttatacttgagagaatctgcttactctttcaacattttcgttgatctaatcctgaagtcaaatatgcatacaatgttttcgatatgtgatagattttctaactccattctctcttcaacagcttcctgacttctgctcaaaagacaactccttaatcgtcaaggaaatattcggagttacagagtaagttaactttcaaattgcagctttattcttatgcttttacaatgttccttttacttgaccatctctaccaaacatttcagtgaagacgcagagaagctgcggatacacgctcttgctgaagctggagacatagaggcacttgagaccatggtcgcatttgagaaaactggggagtcttctaaggataaga

SEQ ID NO: 7968 - DNA, 1066 bp, Arabidopsis thaliana landsberg
gggggttcagacgcttcaggaactacatcaggtgaaacctagagaaaaatcagaatggaatattcaatatcagtttgcatatatagtttgatgtaccaaagacaatgtatatgtgatgtactaccttaagaggttgagaaataacagctggtacatcaagttcaacttcttcagactgtcatatatgagagaatggagtgagacacatatttgtacttgtgaaacattgaaagtaaatcgataaagtatacaactttgggggattgttccttaagatttccaaaggaagaactactattatgaaactaaacagagtaactagtatttttacctctttgttcgtattttcagattggtgttcagtgagtgcggtgttgaaggactctactgtttcttccatctaaaaaaacatagatgaagacattctatgcttagtaaaacacacgcaacatgtaagagagtgatgagagcaatgaacatacctgaatatcatcaagacgactagacagctaaacgaaaatagcaatgttatgaaggagcctataaagtgcttgacatgagggtggaaataaccaaaaaatgagtccagttcagtacctgtggttcagagttacggtcaagaccacctaacggatgttcaaaatgagtccaatcttgttcaccagtatcctttccaaagagctctcgaagaaaggtgggttttgctctgcatctagcatgcatgaatcttgaggctgtttctgaagcagagttacggacgagtttcttgaagcggaacattgagggttttgctctgcgtctagcatgtaggaatctagagtccctaaacctgttctgaataagtgtattacggtcgctgactttctttagttgagctttaagaacaccaatttcattttcaagagaatcaacacgagcagccaaatcttgtgaaagagatggtggtaagtcaggattgagatgggttgaccttctacgtttgactgagccttttggagaattcaacaaaggcttcatcttcttcttcttgttggaacgagtcttcgaagggggatggggggggggg

SEQ ID NO: 7969 - DNA, 1361 bp, Arabidopsis thaliana landsberg
gagccagtccagaccttcgtagagtccctcaccggtggtggcgcacgtgctctgtatgtacctgaagagaactatcgaagagtgttggttctctggtttgtgagctagactaataatagcaaaggaaagcaacaaaggacaatagatcatgatgcttaccagtgacgctgccggagagagtggagtccaagcttatcagttatttcagcagcattcattgcgtttggaagatcctgtttgttggcaaacacaagcagtactgcatcacgaagctcatcctgcaaggtagaaacattgataaggccagtcaagtatataggagccttagatgatcatgctaatcagactcagacaagtctgtttagaacagcggtcaacatggtctgctactaggaaacagaaagtactcagtagaggttattattactagtacatgctaccataagcaatcatgcaactgatgatagagcagaagaaatgagatgatgtagcaattatttgtgtttagaagaagaggactgaccaatggtggggatggtggtgacaatctcaccaagcttgagcttgtacaaaatggtggtcttaccagcagcatcaagacccaccataaggatgcgcatctccttcttggcgaaaagcctgctgaaaagctttgcaaatgaaagccccattttttgtgatcgtgagatattgcagagaagacatttcactcaagatttagcatgaaaactatacgcaacaagatcaaagtcaaccaaaatatgagcatctcaaaatgtattgaagaacagaacaatgatcaccaaactgagaaaatcaatcaaagcaaagaagatcccgatgttgttgtattcagaatctcttcacggcacgtatattcatatatcataagatcgtaagaagctaataaagattgatcaaaataatacctttcgaacttgataccaagggatctgaacgagagagaagcttcaaaatcaacgtgacaacgaggtttctaatgaaaatttgctctcgaaaggtaatgtatttttttcactaccacccacctctgattattacattgtcttaacttttacatagaaagtttttggccaattcgtaaataaagaaggtaatggggcaaattcgcaaatacccaaagtgttggaacaattagcaaatagttagagttgtgagtaatttcgcaaatatatgaatgaagataaaacgtatctagtttcaacgttaacgttatttacagataatgttatcaccgcagatgtcgcagatgtaaaagcatagaacagtaatcaaacatttcagtgttattaacgtgagaaaagtataatgcatctacatttttcggctaaactggagga

SEQ ID NO: 7970 - DNA, 802 bp, Arabidopsis thaliana landsberg
  unsure (1)..(802): unsure at all n locations
cctgcattntagatccaacgntatcgctgtgagcgacgtataaatgtaagaaaaatgttttttcagtaaatggctattttagtaatataaatcacatgcctcaaatacactgataattaacaaatgagtggtgcatggtacagtaacgaacgaactatgaagggttcatagttactttttttagtctatgatatagggttcaagttgatcgttatatctagctattcattattatagctcttcattggcccctacaaacacattattttagcaaaaagaaaaaaaacaaaacatgcaaatttataaatacttagtttaaattattgtttttctcctggataattgatgtattagtttaatcaagtataggtgaaaatagttgtaagaaaatatatcattgtttttcttacctctaccaaatgaatttttaccattttggaggttattaatcagcaaatcatatattaaaaaatgacgagaatacaatatcgtaatattgcggtaaaatataatggaccataaacgtgaatcgaaatctatatttttggaaatcaagtaacccatcgccatcgtaaccactgtcttaattaaggaagagttcagtgtcgaacatgcggtacacttacgtccgtcaatttaaatttttaaaggtgtttaaaatgttagcaaccaaagttagaaactttgtttggtcactctttatctccgtagaattttttgttttatttttcccattttcttaaatattcaaataaaattaatcgggtaaaaatttttttttttatggctttaaactaaaaat

SEQ ID NO: 7971 - DNA, 1296 bp, Arabidopsis thaliana landsberg
gtcctactaagcttctaggtatcggttataatcatttctcgggtcgccttagacctgacttaggttttctactaccaaatcttctatcgtttaatatgggagggaattatttcacagggtccattccaacaactctttccaatatctctactcttgaaagattgggtatgaatgagaacaatctgacaggaagtattcctacattcggaaatgttccaaatttaaaattgttatttcttcataccaattctttaggaagtgattcttctagagatcttgaattcctcacttctttgacaaactgcacccaactagagaccttagggattggcagaaataggcttgggggtgacttgcctatatctattgcgaacctatccgcaaaactcgtaactctagaccttggaggaaccctcatttccggaagcattccttatgacattggaaatctcataaacctacaaaagcttattttagatcaaaatatgttgagtggaccactcccaacctctcttggaaagcttttgaatttgaggtatttaagtctattttcaaatagattatcaggaggtataccagcttttataggcaacatgactatgttagaaacacttgatttgtccaacaatggttttgaaggtattgttcctacaagtcttggcaactgtagtcacctactagaattgtggattggggataataagttgaatgggactatacctctggaaattatgaaaattcagcagctttttcgcctagacatgtcaggaaattctttgaccggctctctaccgcaggatattggagcgctacaaaatcttggtacactatcacttggggataataaattatcagggaaacttccacaaactttgggaaactgtcttacaatggaaagtctttttttggaaggaaatttgttttatggagatattccagatttaaaagggttggtgggtgttaaagaagttgatttgtctaacaatgatctctctggaagtatacctgaatactttgcaagcttttccaagttggagtatctcaatctatcttttaacaatcttgagggaaaggtgccagtgaaaggaatatttgagaatgctactacagtttccatagttgggaacaatgatttatgtggaggtattatggggtttcaactaaagccatgcctttcgcaagcaccatctgtggtgaagaagcattcatctcgtataagaagttgtgattggagttagcggaggcataactttgctttcgtggggttatggtttcattactttgatttgttgagaa

SEQ ID NO: 7972 - DNA, 1336 bp, Arabidopsis thaliana landsberg
aaactcaaaagggttataagacataagaatacacaacgtcaaaagaataaaaacttgagcaacataagtttctagggaaactagtttctttaagaagagaaaacacaagtctataagattggatcaaacacagaccaacttgactaatgaagaagactgaactaaacttcagtcgaatgcaatctgacatgtaggtgaacgcctgaacaacaatgacaactccttgagcatctcaaatttcttgttgatgtcagtggatttagaggagatagtcaccttctttaaacagcttccacttcttaagatgaatgccgctacttctttctcttcttctgttccttcatattttacccattcgagagtttcaagacttgtcaacagacattcaggaactgcactcggttcattccagcacggccgcggttgatgagatcgatagacatggttctaagataaaagtaagatatcatcacactgttattctactgaaaatatatgctgatatatcatagagactgaataattcaggtttagatctgcagaccttaacaagtttgagttctcgtaatttaggggaatctctgagtacacacataagtagatttagccactctgtctcacatgtgcatatcgttaaacgtacaagacagtggaagacactaccaacaggataagcatcctgcataagagacactacataagtaatttgatcacaaagaaaccaataatatatgtagataacagaactatagaaacatattaccttagaggatggtatacatacatagagacgcttgacggaagaaatagaacccatgagctgctgcgtatgtacataagaattgcaaacatttgccttcacaaccttagtcatattattctcaatgacaaaaaaaccacccctaccatcttcaatgtctaagcactccaaagaaggagtatctatcacaaacccgcaatcagcatttatactggctaattccgtttcatgcaagactaaacactttagagaagacactctaacagtgaaagtagtcacattgtcatagggacagcgtttcacaaccaagtcttcaagaacaggacaattcgataaaagcatcttgatcagctcatcacctggaaacttcatggacacaagactcaaagtcttgagagatggaaatgaaaacgaggacgtagcatccacaagaaccgcgttattaagcttcaaagtcacgagcattctacagcacgtatacaggctccttggaagtaccactgaagaattatcactattagacttatcaatctcaattatcagctcacgcaaacagcgcttctctgctgttttaat

SEQ ID NO: 7973 - DNA, 1713 bp, Arabidopsis thaliana landsberg
gagagtcatctgatctaatttctcaagatacggtgatattttctttgaggtaaattctccatatatcaatactgtctcagctatcttctattgcctgtgtattttttgttttcttgtagcaaggggctttttgttttgcttgtctttccgagatttaataattgatggatctcttttattatataaggttgttttcattggaggacgtactcaaactggttcagtgaaatctgatgaaggggaacgccacccttactctataatcgactgtgaaccaaagcgtgaagctattttaccatcagttgtatacatacagaaaattttgcggaggaaagccttccttattaagaaccttgagaatgttacacggagattcttacagtcactggagctttttgaggagaatgagaggaagaagcttgcaatattcacagcacttgcattttcacagaagctctcaggattacctgcagagactgtcttccagccattgcttaaggatactcttgttgccaaagggatagttctcaattttgtaacagacttcttcaatgaatatttggttgagaacagtcttgatgacttgatttctattctgaggcgtggcaagatggatgacaaactcttggagttcctgccacccacaaagcggactacagaaagttttgccgagcatttcacgtgagttttaatttcttgaagtttgctgcattcaatagtataatgttggttctttttttacttgttgtagtttccttgctcttctgtttacctgcgtttctctaaattttagtcgcttaatactgatatgattgccatttctcattgataagattaaattagtgaaaatgcttctatataggttaacttttgtcactagtttgttgtgttcaacaattctcagttacttctgattctgtattcgattatcacttgtcttttatctctgctttcttattgtatatgtaaaattgatatatctgctatacttttccttctgattttaagtaaggcaggattgacagctctggtagagtacaatgaaaggaaaatatttgaggtgaagctgaaggaaatcaaagcggtccttacgagccaagtgacagaggaaataaacgtagatgaagtgactgaaatggtgaagcaacaggtgaaagatgcaaagctgccagagactgaggttgtgcatgtgatctgggatgggataatgaatgctgttcaatggtctgggaaaaaccagcagcagaattcgaatgctgtattacgccaagtgagttgattttctattttattttgaagcaagattatgttgttttgttcaaagctaagctaagctagccgctgttttgtggtaggtgaaaacatgggcaccccttctgaacacgctgtgtagcaccgggaacatggagatggaactgatgtataaagtacagatgcaatgctatgaggatgcaaagctgatgaaagtgtttcctgaggtagtgagatctctgtatgaactggatgtgcttgcggaagacaccattctgcactggtatcgcaaagggaccaaccctaagggcaggtactattttcgagtttttcacaaaaacaagggtagataatagtattctctttagaacatatatgtaatatgggttgtgttggtttgcattgcagtgcaacgtttgtgaagggattgaacgtttgtgaattgctcgaagagccgaagaa

SEQ ID NO: 7974 - DNA, 754 bp, Arabidopsis thaliana landsberg
ttttatagatatgttgagccaaccattcaatttatatctgtcatgtcatataagagttccatatgtagtgtgttactccacaaactgcgaaagactttcgtgctaatattagttggtagtcatgatttgtgtagaatcaaaaaaagaagtgggagtcatgaataatgaatcactaatgcaaatcgcttttgatgtcatattagcgttgaaataatatgtgatccctcttatggtcactttatctcttgatgtttgatctgtgtaggtgaaaacatgggctccacttctgaacacgttctgtactagcggaaagctagagctggaactgatgtacaaagtccaaatgcaatgctatgaggatgcaaagcttatgaaagttttcccagaagtagtgaggtcgctctatgaactcgatgtcctcgctgaagacaccattctccactggttccgtaaaggaaccaactcaaagggcaggtgtgcatttagttccatgacatattataacaacttcattacgaaagcttttcttttatatcatagctaaaaagtatgaaagcactctcttgatgttttcttgtggtgaatgtttgcaggcaaacctttgtgaaaagtttagagccatttgtgaattggcttgaagaggcggaggaagaaaagtgagtgatctatgtttctaataaacaagccatgaagacgataataattcagggtttcttctatgtttcactttggctatgagctttactctgctttg

SEQ ID NO: 7975 - DNA, 323 bp, Arabidopsis thaliana landsberg
tgtgcaggtggtaacgatggtccagcagctcagactgtggtaaacatagctccttggatcttaacagtggctgcaaccactctagaccggtcatttcccacacctattacacttgggaacaataaagtgatcctggtaaagcagagtaaatgttcgcatgcgcttttgtttctctcttgttatcaatggaactctctgattatgagtatttttaatcttacttcagggtcaagcaacgtacacaggtccagaacttggcttaactagtttggtttacccagagaatgcaaggaacaataatgagacctttagcgggtaagtaa

SEQ ID NO: 7976 - DNA, 727 bp, Arabidopsis thaliana landsberg
aacggtggtttttggatcctttggcataagcatttctttgcctacaggaccagtcagcttaacatcacttccgggtgccaaatcacctgaaaaataaagtaaaagaaaacacaatagttgaataagtgaataagttataaacttacacaagacttattcattagtacttacacaagaaatttgagcaaactcctttaacagtctctccttggtcattagtataaacaagtcttttaacacacaaagaaacctgaaacaactccttcattcacttaaccagacaaaacaaagcctcgtaaaatttgtaaaggaaatggtttattacggtttcagaattgccgagatctccaagagcgctgcttgcaatggagtaaagtctgaccttgtgaggctttccattcttgtcaattccatctgcaatcacaccaacagattgtccttctctgtacgggatttctcctatcgaagacacataaatgctacttcaattaccatcaagaaaagaatcattataaagtaagaaacatgttgtgagaatcaagtaacggaatcactaccttgatggctgaaaaccatgtgccaggtctctccaggagcatcatcagctgtgattttggtgttgagaaggcattttccagtgtaaggctcttttggtctgtacctgttaacaatcacaccttcctcgttcttctttgacactttctctactttctttggaggagtagga

SEQ ID NO: 7977 - DNA, 1959 bp, Arabidopsis thaliana landsberg
  unsure (1)..(1959): unsure at all n locations
tagaataggcgtcttgatccatgatgcagataagagtttgggtttagtatctcaagatagtgtttccaacactatgagtatgttagatattagcaacgagttccaaaagtctaaaaagctggatccgttagctcctgtttttgttcctgcttgtgcaaaactaagtgagaagcacggtgcagcagatcacatgttaactatggagacaaatgttggctcaacttctggtgtaagttcttcagacagtatgttgcttaatacttttaaggttgttgggacacattctttagtggtcgaccgcagtttaaggaatagatactctaatacaagattggataggtccagcaacaagtctcatggtcggaagaagctaaatcctctggctcctcggttctcactagcagatcataaacaaaatgtatatggctgtgaggtaaaccaagctgcaaatgactttggtgatagacatggctgttccacatcatcaccatctcaaaaagtggatgttaagaaactacttacgacgattcatggattgtcagagttgctaacacatgtacacagttcagaaacttcggatttaccaaatgagcagtatcttgatctcatcaactgtactgtgcagaatctcaactcctatatcaataacagagttcaggagcatagtggggattatgcaagtgctgtacatagttcatgtgatttatattcgttnnnnnnnnnnnnnnnnnnnnnnnnnnnnnnntacttttaaggatcatcgaagcattcttgttcggttttaaagcctgtagactatcgttttcacaatgtgcaggttataagaaatcatcatcaaacagaagagcaaatcaacccagaggtgtgtttttataaaagcttatggctcaaggctaaggcagagagatcgttgatggaacatgaaacatttctttcaaaagcaagatcttgagcaattagtgaagagttatataaggtgacatcagatcatcctaacttttttacttcatagcaacaatgtcaaagattgatttctctttctatgaggtcctattgagcgtttgctttcgattttgcaggttagcgtgtagaaattcaagcggctgaatcgaggcggcgttactagctagagaagttttgcttgcaaatgtatgtgtaggtcgaaaagagggacactcatgtcaattctagacaaagacttgaatctgtactttgtgttgtagaaacttgaaatactttatacacaaatctagctttgtttcttgaaccaaatttgtattttgaagctacatttcaatgaatatatgtaaagagattactcatcaatctttcttgctaaagagttaacaacacttgacataaacgtctcaaattatatatgtgaagcaacattgtttatggcttaaaaaaaggtaaaaataaatatccttcaaaaagtggagaaacagatatgttcgagaaaattgctaaccgaatcagaaatgaagcaacaaagacgaaccatcacaagtcttttgcaactcactaaaacctatgtagtgagttccataatggcggaaacaatatctccgttactctctttaagagccttaacagccttgggcctcgagacaccggcttgagtcatcacaagatcaatgtccttggcttcaacaccagtctcatcaacatcttcatcgtcttcctcctcttgtgcaaccgtggctgcttcagaaccatcagtgttggggatcatagacgcaacgtcaggcatcttgaacctctgagcagcttgtgcttgtagctgagagctcatgtcatcaatcttagcctcaccgaatatcacataggtctcagagttcggactcttgaacacatccggcttcgagatgacaaacaacacctaaatgatacaataacatacagaatcaaacatcgctacacaataatggaatacagtcaattaggtcattacttaca

SEQ ID NO: 7978 - DNA, 551 bp, Arabidopsis thaliana landsberg
gaaattgaaccgcggtttcaattcgaaatcgtggttcgaaatttgaaacggatgatcagaaggaaggtcttggggggatttcctaaacgaagaaatgatctcaggatcaaaatcttcaaacccttcttcttcctcctccatttgaagccataccggcttaacactaccattagacttacctccattaggaccaacatcaaacgagaaactcttaacatgattaggtgatcgtaaaggactcaaaacatcttcaagaccatccatcatttcccaagtattaatcgtttctggctcaccaggaggcgtaacaatgggagttttcggtacaatcttcggtatcttctcattcatcatacttgaccatacctttgcttccataagcttagcttgcaattccaaattcgatttctctttatctgacttctctctgacaacattcggaccaaacccatttccagttttcacagattcgccagaaacaagcttctcgctaaagtccgccaagtgtttgtgattatgcccaatagaagaatcacataacttgagagatc

SEQ ID NO: 7979 - DNA, 2602 bp, Arabidopsis thaliana landsberg
aattaaacgcgtgaatgagatattcacattaaaatgaatattattacatgttgaccaaagaaaaaacattactactactatttgtttcggtcgctcataaatgcagatattaatttataaatggcgttttggtaaatttagactgacatcaaggttattttcaacttttttataacagaagcagaagcaagcattggctaaacaattagggttaagagcaagacaagtggaagtttggtttcagaacagacgagcaaggtaaattaaaaacacacaaacaaaagatctctctatttgcctgatttatcaattttacttataagggtattttggtaaatgtgttaacagaacaaagctgaagcaaacggaggtagactgtgagttcttacggagatgctgcgagaatctaacggaagaaaaccgtcggctacaaaaagaagtaacggagttgagagcacttaagctctctcctcagttctacatgcacatgagcccacccactactttgaccatgtgcccttcatgtgaacacgtgtcggtcccgccaccaccacctcaggctgctacgtcagcgcaccaccgttctttgccggtcaatgcgtgggctcctgcgacgaggttatctcacggcttgacttttgacgctcttcgtcctaggtcctaagtctttttacttgcaaccaaagggcattttggtcgtttattaagtttcagggaccagatatgcatgtagttgttaacgtgtatgtatttttttagaaagaaagaaaaacagattaatattttactagcttaaaccaacatatgtgtcatgctaacaagtaacaacaaatatttagagccaatgctatcagatattatgactttgaaatcattttgttttgtttggttgcaataaatatttggacaaaactatcacaagaaactttattgcaataatatttatagtgtctagcgagtagccacaaaccaagaagtacaattgatgtaggaaatgcaaaagaaaattaaatggtccaaattgtttcatgtggctaatattaaatagtgggctaaaatagttgaaatttctaaaagtttttccaggatttgttgtttttttgttaaacttaaaaacaaacttatactttgggcccaagtgttcctggcattaccataacaactataagtgagaaagagattaccatatgtcatacatgagtatgggcaaagtttaggccttattgaacatggaggttaggctatgggccacttcttgggtttgaaaggttaacgcaagtgcttatccccactacatgttaaatttaaaactatttttcaatggtgtttgaaattggacttctctgagatgttgaaaatgctcgatgatcaataggattggcacgccttttacggagttagatgaattttcttacttagggatacgtttaccgtatttaggatatactaggccatgaagtagtaatatttgtactaattggcttgctaaaaaggtaagagcatgagggttcatgttttcctatgtaagcagcttggtgtcggatttactctctttggagagtagcctcttctcatcggagcattgatctatgacgttttagccgcaaagaacaaaaaccccgaaaaagatgatctcatgatcatgttcaaatctagaaacataaagagaggtatcaatctgagttataattcacatagatctccattcctgtttttgtggctgaataaatgtaacaaaaatatttgttccccttcatattacaaccttatgatgattaccaacacaaacttaaaatgtatgcttacctattattaataaataataagttctacctcgaagaatttgcagagatcttattagtagatctcttgatagactcgattctttgtaacctaatctgttctctgaactttgcaatgaactcatctgccttcttatccacgtcacttccgttgttactctcacaaactctttcttcctctactatcttcttctcaacctcgtcgtggatttcattttctcctcttctctgttctccattctcggattcttccactgccttgcttcccaagttacttctttgatcattcttctctgtgtcttgttccttcgattccacgattggatcggaccaccaaacctttttaggagcgtttctttttatcttttgctccgaggactttctccgttcgttgcttagtctgaattttgtcggaggtgacttataatactccgccggaggtggtggaggaggaggcggcggaggatgaaactcacctactgcaaatttcgtcttgtgaactgatgattctctcctctcagccctgtaaattccgggatgatcttttctcgacgaggagttataaaacgccggtagtggtggcggcggcggaggaggcggtggcggagatggatggaactcagatgcgagattaggtataggattcgactttcttggagaagagaaagaagaagatggtgtcagattcttgatcaacggctgtgattcaactgtagtcagattcttaacggacggtagagatttacctcctttgatgatgatcatgaagatgatcttgacctccatggaatcggagaagg

SEQ ID NO: 7980 - DNA, 1220 bp, Arabidopsis thaliana landsberg
  unsure (1)..(1220): unsure at all n locations
tttgaataactattttattataatatcatataagcaagaaaaagggtctaaatagtttaatattgttgttgtaataatttagattagagcaatcaaatgtctaaatattataaaattgttgattatattattactaatagtttaattaaagtacctctgctacaaataattaaatgggatttgattataaacatgttccttctatgtttaaacgcaaatcggagcctaatacgtccaaactatatccacccgtctcttcgctgtccataaatccggagcctgacccgacgtttgacccggatccgaaactcccacaatctccataccacccaaattcatctcccctaaagctttctctcactttcccgggaaaatcggcgaccaaaattggaaaatgtactcagcgattcgctcgcttccactcgatggtggacacgttggtggtgactaccatggacctcttgacggaaccaatcttcccggtgacgcttgtttggttttaacgactgaccctaaacctcgtctccggtggacaactgagcttcatgagagattcgttgacgccgttactcagctcggtggtcctgacagtgagtactactttgtctacttatctctttgttcagtttcgttgctcggtccgttaacaaaattcgactntnnnnagggtttgatggattcttctctcaaagtttagatatttctgatttctgaagaatatgtctcgttacttgattcgatgaagtttatggtttgttgttctcgagacttgaattgagatctttataactgtagctctttatgtgtcccaaaatagaagcagattctgcagtgtataaatttgtttcctttttcgaaattagtcagttgtaattaagtagtgtcagtgtcatctctaaatattttgaagcttgtgaattgctttgtagctaagatttaactcctgtgttgtcttttacctcacacatgtttttgaagagaccgttctgactctgtctgttcaatttacagaagcgactcccaaaactattatgagaacaatgggagtgaagggtctcactctctaccacctcaaatcacatcttcaggtttgataaacaaaactgattcctaattaactgttattagatctatcttggttgatgagactacacgtagaatttcaatgacttgacgcgttaggatctggaaattgctttgggtattaagaggttgtacct

SEQ ID NO: 7981 - DNA, 1793 bp, Arabidopsis thaliana landsberg
caaaagcactcgctcttcgaaggagacgagcgacattttaacttcaacttttccagcaatagttgaaccttctgggcctagggggcgtcgtggtagtagaagaaaacagctatatgcaaagcggcacaaggctagaaagactcaaccagcaatagctgagtcttctgaaccaaaggtgctgcatgtgaatgatgaaaatgtctcatcgccaccagaagctcactctttggagaaggctagcgacattttaaccacgactcaaccagcaatagctgagtcctctgaacctaaggtgcctcatgtgaatgatgaaaatgtatcatcgacaccaagagctcactcttcaaagaagaataaatctactcgtaagaatgttgataatgtcccatcgccaccaaaaactcgctcttcgaagaagactagcgacatattaactacgactcaaccaacaatagctgagtcttctgaacctaaggtgcgtcatgtgaatgatgataatgtctcatcgacaccaagagctaactcttcaaagaagaataaatctactcgtaagaatgatgataatattccatcgccaccaaaaactcgctcttcgaagaagactagcaacattttaactaggactcaaccagcaatagctgagtctgaacctaaggtgcctcatgtgaatgatgataaagtctcatcgacaccaagagctcactcttcaaagaagaataaatctactcataagaaagatgataatgcctcattgccaccaaaaactcgctcttcgaagaagactagcgacattttagctacgactcaaccagcaaaagctgagccttctgaacctaaggtgactcgtgttagtagaagaaaagagttacatgcagagcggtgcgaggctaaaaggttattttcttttgatttatttgctcaaagttatacataatcactactaagattattacttgtctacagattggagcgtcttaagggtcgacagttctatcactcccaaacaatgcaggtggtttaattttcttcatgtctttgatttatgtaacaatgttttgtatctattttatttcactaaccaaaagctgcacggtgaagccaatgacttttgaacaagtaatgtctaacgaggatagcgagaatgagactgatgattatgctttagatattagcgaacgcctggtaatttttcttttctttcttgcttttttcttgatttttattgaattgttacgaaaaatcatattcactgaaggatttttattgttttttttgaaaatattcacagagacttgaacgtcttgtgggtgtgagcaaagaggaaaagcgatacatgtatctttggaacatatttgtacgaaaacaaaggtagctttttactttctattttacttgcatacatgaattagaacaatatgatcaaagtcaagttgccaaattgttggacgggttttagctagctttgttaaaaaggtggttctttgggggcagggtgatcgcggatggacatgttccttgggcatgtgaagagtttgcaaaacttcataaggaagagatgaagaattcttcatctttcgattggtaatagtctttcatagacatcaaactaatatctaactcatactcatcatgtgatacgaaacttgttggagggataatcactttatatttgactttgccttgatgcttgcgtgcttcgtgagcaggtggtggagaatgtttaggattaaactgtggaacaacggtctcatctgcgccaagaccttccacaaatgcactaccatcctcctcag

SEQ ID NO: 7982 - DNA, 2368 bp, Arabidopsis thaliana landsberg
ggcatgattatgtttgtttggcttacgtctatgttgtaaaagacaattgagagctcttggtactgtcattttttaggtattggtaatgtttgtctgtgtttcaagtaagaaatggcttaatcaaaatctaatcttcaattagtatcttccttttagttggcttatgtcattgtaattgcacttatcttgttgatatcattcattttatatataacttgcgacctaaccaatgctttggagttcgtgggtgattaatatactcatgccaaaaccaataattaatttcttgacacgtaatacccgcagcaactgagctgtcgcatgacaagccaaaaaaccatcaagtttaaagaaacaaaatccaccaagatgagatttttaactcgcaaagatttttgttctttgggatgtaacattaaatagtagacgacagattttatgcgaaatacaaaaactttgagaaaatagttttaaaaaagacatattgtacccctccaggtaaaaaagatctagtccaacacctataaactttgaaaactctactagcattaaactttggacattactatgtctcgcataatcgcctttaggaatgctaaggacaaaaacatgttttacagttattgtctgtgagcagtagtttcatgtggctagcgtttattacgaaaccgtcggtgctgaattagagacacggacggtgaaaaatcataaacgggaaatgcttttacaaccatttatctatatgctttgaagcccaatcttagcccaagccatgatactagaagccgaatcaaaagctaatatagggcttgattggttctccttctgccacccgcaaacgctgcgtttgcgggtggtagcggttattagcggttggcaccaatcatagaaaccgctagataccgctttggaccgcttgaaatcgccagatttcaaaagttccttcccgcaagcgtttgcggttgcgggcgatagcggttaggttaaaaaaaaaaaaaattaattaattaaaataattatgtcttccacccaaaccttatacttattcttatcagaaaaccctaatcaatgaaaccctattctctcaattatggcatccacccaaactgacaaaaatcaaagtcaaaatcaagaatcaaacgtaagtatgatctatcctttcatccattcattagctagtgtaattctcggaatatttcatggcatcgttgtttttttttattttgtttttttttgagttttttgattgaatacatgttttgatttgttttctcgattagaaaatcatttggtcaaacgagaccacatttgcgttacttcaacgggttattgtggagaaataaacggaagaatccaaagaccccaaaatcagatttttaagtgatgttcaaaaagaaaatattcttaagaatattaacgtttggaaaaaatttgagttggagatgtgttaaaaatcgtttggatatcttgaagaaactttatcatatgtatagaggcaatccggaaaacccgcgagttcaacgttatttacagtttatcacactacttgatgcaatttttggtgatgtaccaaatgcataaagtattaaactttttcttacaaaatttatttatttttgaattttcagttttatttatggttttaattattaagtatgtttaatttttcaaatattatcaattttatcataataatatattgtatttttttcttttaatagtaatatattatatttattttggttattttttatttaattactatcgcactcgctggtttatcagtcataaaactcccgcaaacgcacctattaccaaacgctcaaccagtcattcaaaacgcttgataacgcttaaaaccgcaaccacttatttccgcaaactcccgtaaccgcaaccgcacccgctgcgtttaaactagtcaggcccttaactggatgcaccatctaaccgttgtttgtttctatttttgattgttcatctaatgaacctttgtttgtttggttaatatacatcttcatctagatgagtttaattaaaatataactaaaatgcccatgtttttatttaaccatatttttagtcttaacaatactaatgatttcaaatgatcgatatgggagatgctcatttttacacaaaaacgaacaacaatttcgcagcttcattcagataacaatctgaatatgcaaacgaataacatatagaaaatcttagaagtctgaaataccactatggacacttttggaagtctgacatctttcacatataaacaagaaaacaaacaagaagtttatatatttcaagataataattaattctaatcttacatatagatgcagcatttgcaatatatatatatagagag

SEQ ID NO: 7983 - DNA, 1807 bp, Arabidopsis thaliana landsberg
agtagtttaaaaagtggttggtcatcaaagtgttttcacgatacactaatatcaggtaagtgtttctaactacttatcttgatgtagatcttctgtaactagttgtttttaacttagttttgcactcaagcaggaggagatgagtctggtttatagaatgcttgattgtgggggagtttgactaactgctgattacttagtaatgttcatagttgactgatcacttgatgagtattgttgactaaatactagatgagtagtgttcactgtttatgggggagacttgtttcaatttaatgcgttttaagtttagacatattttcactgcctggtattggaggagttcattgttagaatccttctgagtgatgtgaacggttaagaacttgattttcgttcctattgattttttgcattcttaacacagttctgatatgaacaagctttaatctctagctagatgttgttttatctgtttctttttggttggtttgtttagtatctttttaggttgagccagaaagatgcttgagtatcaaactaagtccaaaatggggagattgaggatgcagattctgacatcaacgagctaatggacatcagggagctgttggatatcaggacactgcatcaaatctacatcaaacgtttgagttgctgacatggacgcgtgactgacatggcggtgctggagtggttgatgtgacgtgccaagaagatttgctgaattggtgtggtgatcaaacacgaaagttggttgagaagatttggtgaatattcttctcaacaagttaaggaaagagatatgcttgaatatcaaagaggatctcgaacaaggaaaaagggataggcttgaagatcaaggaagatctcgctcattgattttcggttatcctagggattagggttagcgagaatatcataaatattctaggagtaggcattgagccgcctaaacactctagaatattgtcatacgcgtatagctttcgaagcctaggaaaagcttagaaagtgggtgtttgtaatccctcctcttcacagatgtgtgataagaaacagatgagtgattagacttagaattgttcttagtcagtgttgatcattcgggtagaatatgtcaagtaattgccgagataatagaatttttgtaaaagatttattatcaataagaacaagtaaaaagcgtttgtttagcgcgttctaaacaaaatcagcgtgttgtgtattctctataccctcttcgaagtcacaaaatgttgcaaccaacttgatctgatcggagtggaagtaggtgttctccacgttgttgttgctggccttgcttaagtgactctctcagctcatccaactcttttttatgtgcttcattactctgtttaagcatatgttccaactgagaaaaaacccaggatataagattaactacattgggggtgaagaaataaaaattcatttataattaagaatacaagtttaccatctctttcatcatattcatggtttgctcatactccattcgtgacttctccttcaacgctgttgcatctgcttctgcaggttttctcgattcaatttccctttctttttccctgagcttatcattttcttcctgagaaacagagaatttcatacattaaaaatctgtataccatagctttgtctacaatagtttattagggagagcatgaacttataaagaacatgatagattgtttatctaatgtgattggcagatattaatctgactagccgactaggtgagatcagatgactcattcactaattaaagtcgcttggtatgtgc

SEQ ID NO: 7984 - DNA, 1033 bp, Arabidopsis thaliana landsberg
ctttaaaaaaaattctctcgttgtgatttcttctgactttttatcatctacatatacattacgggatcggaatgcagtagtggaaaatttttcttgcccattttgcttgattccatgtggaggtcacgaggtaggcactaattaattagaatcaagctttctaataatatctttcatttttaacaacgtgtattcagaagtttcatgctcatttagtctatctttgctaaaatacaatgtcttatgtttgtgcacagggcttgcaacttcatttgaagtcatcacatgacgcctttaaatttgagttttatgtaagtaaaaatttttagtgatctaattttgtttatgtttttgcatgaaattgtatgtaacaagagtactctttatctattttagcgggcagagaaagatcacggaccggaagttgatgtctccgtgaaaagtgatacaataaaatttggggttagtagtaaacttgatacataaatgcaaaattttatgtggatcagattttattcatgttagtcataatgttgaactcaccatgatgttatttttcaggttctaaaggatgatgtaggaaatccccaattgagccctttgacgttttggtaaaatttcgaatgtctttctctagtggttagcatatgtttcagcatcatcctctaaaagccaaaccataatctatgcagctcgaaaaatcgtaaccaaagaagacaaagagatgatagcaataacgttaagaaacttaatgtactccttatggagttggatttagatgacttacctcgtggcacagaaaatgattctactcatgtgaatgatgataatgtctcatcgccaccaagagctcactcttccgagaagattagcgacattttaaccacgactcaactagcaatagctgaatcctctgaacctaaggtgcctcatgtgaatgatggtaatgtctcatcgccaccaagagctcactcttcggccgagaagaatgaatctactcatgtgaatgatgatgatgatgtctcatcaccac

SEQ ID NO: 7985 - DNA, 1609 bp, Arabidopsis thaliana landsberg
ggttgtggactagagctcaatcctgaccgttggagttttctcataatttattagccgtcagataggtaaaccgttaatttaggaatcgtattcggttccggttacctttaaccggaaaagaaaaaaatatagagatttagggtttcattttcttctctctctcttgtctctgctggtcggctgctgaaacaagttgtaattgtggtgcatttgttcttcagcgcagccgagaagattcgaaaccggagctaagctatgacgacgattgttcccacctccgaagaaaatccctttctcgctgttgtccgattcacttcccagctcgcctgggccgatgctggtcccgaggtaacctccacaccttggttgtgaatttatagtgggaatttaagaatgtctatcttaagtgagatgggaaatttgatctggtatatgttgtttcgttcgaagaatctgattggttatggaagggtttgttgatagtttctggactagaatagtttgtaatctttgaggattctgatgcatacgattagttcaaccatctaagattagtttcattaagcgacttcttaagttttcaaggcttgcctgtacttaactagttatcgtttcaaattttaggcagcagagccagaaattaccaggctctgtagggaggctgaggagtcaatggtagcagagaagtggcttgaattgtcttcgttaatggtcacttcagctgaattggtatcttctaagatatctgagaaaggtttgtgttcctattcttacttatacctgtttattttgtatgtctttcgagtattcaattctcagtgatttgcatctttttttaattcagatcttgagtgtacctacaccatcatttgcagcattgtcaagaatgcgaaaagccctgagcaagtccttgaaatggtgaaagctatagcttccaaggttgctcaacaacccagtgacaaagcttcacttcgtttgaagatgtatgaatcgtttctgcttaaatctgaatgctttgctcatttatcacacacttctcattttttttttgtcttaatctttgtgtagcctcttcaatctctataacctggttgaccacccgtatgctcgatttcaagtatacatgaaagctcttacactagctgttgatgggaaggttactgagtacatagtttcttcttttaagaagatcgataactttctgaaagagtggaatattgacattaaagatcagagggaactctttcttgccattgctaatgtgctgaaagaaaacaaaaggtattgaaacataatttatactttataactatgctcatcagtcattctctgtctctttctttttttgtttccgtttgggtataacaatagcctcatggttttttctattaatactccagcttggtgaatgaatcccttaagttcttgacgaagtacctagcaactttctccaatgaggatgctcaggtcctggatgaagccaaggaggaggctgtgcgtgcagttatcgaatttgtcaaagcttccagtattttccaggtatcataatgtgaattggatttgtctttcttgtcctgacactgctcttttatatttgattggaatttca

SEQ ID NO: 7986 - DNA, 1554 bp, Arabidopsis thaliana landsberg
caaacatgggttgacttggttagaaaaggtttcttcatgtgatttaaccgtaaaaaagggctatttttagagcttaattttgtttagctcaatttgttatgccagttgacactgtaaaaaattaacattaatcagacatgtcaaagatgaatttgtatttaatttaatttataatcaaacaagctgtgttgacttggaagagggtttcatatctattatttgaccgtagattttgcatgtgatgtgttgggaagcttttagacaaggcaagacggtgcagcctagaagaagaagtcgtcactttgtcgattacgcaattcacactaacaagttatggtccatctatatacacactcttcctattcatcacatatcgttgtaataccaagtacccaaggtaaccattaataatccaaattcaatatttgtttcaactaatgaaatatgtatactctattagaatttgtatgatttgttttaggtgaaagcttaaattgaaactctgttacaaaaccaaaaccggacatcaaactaagatctatattattcaattcggaggatacataccctgaccaaataaaccgaaccaaaacagatttgaagctaataatcacgaatacaaccaaatgattctgattacagactaagagaagctttcccaccacataaactaacacaaaaaaagaagagagatatctattagagggaatgttacaaagagaagaaaagtttgacgtggactttcagatcaagcatgagcaacagagactgagtctagttcacggccatgaaccctgaagcggtagatgcaagtgtgtgaagagcttccatggttggaattgaagtctagcctgacagtgttgacaagtcctgagtgagcagagtctgcaatgtcgaatgtctgtgcattggacctgtctaagtcgtaactgaattctgtaagaaggggcattgtctcagtctccatatctatgtcacctagccatcctgatacacggcaatcctttggggcgctcgatctgtcatatgctacagcctgttcgattaaatggtgcataacataaccgtaagattagtattgccttttagtggtcagacaagaagaaatttatcagacaaatgatcacaaggatgaacaatgatggaaagcaatgtgtgaccatcacattacacactcttgagactatttcccttcagctactgtttcctaaggatatccgtaaacagtgaatattacagttccactaattgtaaacttacaagctcttcccatacatacggttcttttctctgtcaacgatgtcccaaacaaagcacaacaacacagtggcattgatattagacaaaggaactgctaaagctagtgatttgcagaaaataacaataggtaaaatcctcctcaatgcatattgtcacagctagtgcctaaactaaacctcaaactataagaactcaaattcacaaaactagtttcttgccctctattcgataacctatggtcaccagcaatccaatccgcagtacagggcatctcaatacaacaacattaacaga

SEQ ID NO: 7987 - DNA, 1017 bp, Arabidopsis thaliana landsberg
aactgataactgtatcaggattataagtccaaagctttagaaacaaacaatattaagtgaataaaatgcatgcttgttctagcctgcacaagcattgtccatctctctgtgtctcagaccacgacgtgcagtattaggatatctcctcctctgacattgtaatgagcaagtgacctattactgtataagcagcacgacccctcagcttatctttcaaatatttgggtggatttaatacttgcgaatacgcaacaacaaactcgttgtaaaaagagaacctgtaatcagttgccttcataaactcaaactgaggttccgtcatcactctttccatcagaaaccctctaaaatcatccccataccatgccacaaactgcgctgtgaccttaacggtgtcaagttcctcgaatgtcatctctttaacaagtctaaactgtaaaagattaggcaggaccaatctttgagactgaagactgaattgagactgaggaggaggatagggctcaactttggtgtagcttcacggtgatacttagaaatggattcagcaagcttgtgctggtaatatgcgtcgcgaggatctaatgagtactcatcaagcttttgcttgtacaatacgttataaggatcttcagagcttttcaggaagttaaatcttgcatcatctgtattagagtccttaaccatcatctcaaactccgacccgaattgagaaaccaaacatgatgttgtctcaacaatagctgtagttgtgacatttggaggtgcgtgaaagattttgatgtctgattcatcagtagctccgtcttgattctgagaagagtattcagcaagcttgtgcttgtaatatgcgtgacaaggatctgccgtgctcctcaagaagttgaattttgcatcagtaggataagagtcaatgatcttagtctcaaattctaacccttttttggagacgaattgggcagctttgtcaaccagagttctagttccgatatctgcaggtggggtaatgattgccat

SEQ ID NO: 7988 - DNA, 1443 bp, Arabidopsis thaliana landsberg
taaaaattaacaacagccaaatcaaatttctgtaacatgtggtgctacgatgtttaatcaaaaaaacgaaagaaggaaggattaacgccataaggcaatgaaaaattgcttatacatattcatcagcaaataaatttaatcccaaaatgtaacagaatgtcaattatcaggcctcatactatttctaaaagataaattgataaagcaatagatcgtccatcatataacatacaaaccattttaataattcctaggaagcctgaaaagaaaaggaaagatgaagaacatcgatagcaaggaaaaggcttaccagtgttacgaagcatcaaatagcaatgataataaggtaacatgaaaacaaggagcactatcaaacaaaagagatccaccttccagtttaccatccttgccctgcaaacaaagataaacctcaatagaaagtactaatggtgtcatgataaaaagaaattattggtgtctaaaatcaaaatgatgcaattcccgaagctcaatgactgtattcacaacactttcatattatgtaaaatgacaaattccatctataaaccaaaacttgctactcgaatttgaaagcttactctctagataaaacagggatgatttcgaagagaacaagctgtaaaaggttgcaagagaaggcgaagacgacgctgaaaatgatttgaaccaaagctcgcttctcttcgtactctttgtaaagcctccggttgagaaaccatagaccagccgatcctaagagacacagagatccaatcaccaacattccctcgaagatcccccatccgtaacccatctctctctaataaggaaacaaaactcagatctctttctctctaccccaacactctcatcagagtctcaagcttccgctattcgactgaatttgccgacgaacggtggttcctttgcttttcatcagaatcccaaatttggtttttgtattaaaccacactaaaccgtatctccgtaccaattatttattatttagttttgcgcgactgatttccggttcaaccacccgaatcatgcctcgttcccgccaaataggatttagttcccacttcccattaacaaagctaaaactattaaactcttgccgtttcgcaacggcccagaaagaccaacaaatatataacctaatctgttgcgccatcttccagagtaaaacaccttccctaaagaacaagtacaagaaatggagaagacaacgactacgacgtcgtcgaacatgaagaagaagaagctgtcgtcgacgcaggctatttgctaaagctgcaagttttgtttgtctccgaggacaggtttcaaagaaaattccgtgtgcatggaccaaaatagttgaactaggaaaggctcatgcaaaatagttaatgccctcgttttgcgatggcaaagaagataacgtacgtactcattgcaatt

SEQ ID NO: 7989 - DNA, 1430 bp, Arabidopsis thaliana landsberg
cagcttgttttgtcgagatcatacttgttctctctagagagtaagtcttttctcgagtaatccactctgtagtttttgatatttagctagttttggtgttttctggcattggaggtttttggaaactttacttatttgttgtcttctagattgtgttacttacttggtcctcctttgtttgcaattgcttaattttgttgacttcttacctaattggcaatgattttgagattgagtgtagattgatggagttattgtcttaagaatttttttacttgacaatttttttggtgtatgtgtaatgtaatcgagtatataaactgtgtggtagctagcttctcttgtttattcctttatgtcatgtggaaatttgatacttgatactagatgcttatatcattgagcttttgaggtgtttgtcattgtacgtaatacttatattggagggggaattcatggcattatgtagcaattgtttagttggaatattaatttagagttttaagccttggaccgatcttttgatgattttgcagggcaaggatgataaactggaaggtggatcttttttgtttgatacttcttctggttttcatgttgccgtattaccattgctatttgatgcttcgtaatagtggtaagccttatttcatatgtgaattttctttgctcttatcacttcttgtttagaaggtaatcactataattggttaattcattgcaagtttctaggagctcctgaaactatttttgttatataattgctactcaactgggatttctttgagaacacttctgtgcagctgtgtataaacagtctttggcccatcattttgatcttatatcttgaaaaatcttgatccttatctctggctttggggcttcttttataaacactcatgagttcaattagatggagattaatgaatttgagaaagcatcactttattgttcgctgccgcatattacagcattttgtgtgaactgtctgtaattttttcaagttaaaataacatttcaggtgtaagaagggagcgtgcctctgttggggctttcttattcttgtcagcattcctttacgcattctggcgtatgggagttcatttccctatgccttcagcagataaaggtatttatttcaaactactgtaaccattcctttccttccagcatcgcatcgttatcttgctagttgctactcattttcctcttctaagttcatttatcacttgcagtagtgataattataaactttaagaactaagcttggtaccagtgttacacctaatttaatttctgtatagatgaatatggcatatttatccattgttatatgcaccaatatagataatactgactactgaatatctagattagagggtatgatgttgtttgcaacgaaagataatgagagctagatagaagtgtat

SEQ ID NO: 7990 - DNA, 1362 bp, Arabidopsis thaliana landsberg
aaatccacactcatctcttccacttcttatcaaagaggccattcttttaatagcattgacaaaagtgcatcctggctttaaagcttatatggcacaccatagatttaagagcaaggtgtcataataaataaattggtttaagataaaatatatttacctgtccccatccaatgtcaaggccagaaatttctactctggagaaccccttatctttcagtgtcagagtaacagtcttcctcttgagtcctgtaagcttttatccatatacacccggaaacaataatcaggagtcaaggaaccaggtaactgttgcgcactcatgctaatcaatggaactgagggttttcaaacataggaagcattgtgaaagttgaacgctgactcacaatatcaattgttgcatttctgatagcatccagcttcggaaagcacgaccttttgctctgcaagaaaatttcagaaatgttatataaaccaaatttacgcgtgcctttatgtttcaccagccatctagagatatcaaactaaaaatgtctaatgctagactattttggatgaactaacccaagatttttgtcttttaaagtgctatatcttcagtgtatatttactacaaacccctgacccaatggtctatgattctagttatcataattgtcggttcataggagaagaaggaaatccccaaacatcctcacataatataacaggcagtaacactagtaaaacatgattaacatgttggttacttaatataagtataaagaaacacatatagagaacataaaccacaagtaaattagtatcttaccataagtaatttatgagcttccataagcttatagccttgcacccagaacatgtatgtcaactgaaaatgaaattaatatcccttctcagtatcagtcagcaaaatgtgaaaacttggtcataccttcatgagtcaaccaaataagcacaaaattaagacaactactgtttgcaacagtcttacattttttcaatactggaaagaaaagggggaaaaagagaagagcttagtaacaggtttctgtaacataccgcaacagcaggagcccttcccattccagcagtgcagtgcacatatgtaactcctccatttcgcttaacagctttgtaaagagtaccaaccacggctggaagacgcattctcaaatcaaatgcatcaaagtctctgttacatcaatgatatataatatgtcaatcccctacgttgtgagtgggtacgtccatggtgaatttttctatgcatgtgctcgtgaccagtctcacatatgccaaaagggatgatgatggaaccaagtaattagcagtaaagaaatttagtgagaatgggatgat

SEQ ID NO: 7991 - DNA, 688 bp, Arabidopsis thaliana landsberg
ctcctcatctcaaaatcttaaaattagaacaatatctaaagtactatctttaattacatccaattatctaaccaattatagtgtgtacttttttggttttttggcccatggttttatatttaactcacttttattatctataaaacgtgaaaaacaatgatttgttaaaattaatgacttgtaaaaatatttgacaagtcaaagtctttgccactcaatttctacaaaattcattaatacatttgttaccttttaaatagatttttaccttttttgttttatttaattatttgaagtacacttttttataaccactcacttcttatcgtcttatctgagtatcgttctttctaagattttttataactttccgcccatctttgggtttcaatatttgatttacggatttctgcactcgatctttgtacttcttagattcatatcgagatttaatcagttttccattttagaatcatcatttcaattcaagttggtgtttaaatggaattctcattgatctccgatgaaaatttcatcttaaacgatgctcatcgatgtcctgataatgatgatgcatcgcatataccaaaaaataatcttaactttttcaatgacaatttaggtcaatcttctcgtactggatggactttttcaccagatctgactgatatctctaatcagcaccacc

SEQ ID NO: 7992 - DNA, 1549 bp, Arabidopsis thaliana landsberg
taccataaatggggaagatgagcaatgttcatataggattataaacaagtaaaaaaaaaaaaaaaaattatttttgggtaagaaatatatgagaattttgtgcgcgttccaaaaactcttgtaaattttggcaagcttatgaatattacataaagtttggtatataactggaaacatatttatattactaaaactcgtttaatattaattgctaaagaaagaaaacaggtaacaaaagcgttaaagttaactttgattctatttattgatagatcccatcattagattatgaaatatcgtatccgattagataaattcattaccaacctttttttctttccttttggtcaactctttcattttaaacatattgaatgttaagtgggattgctaacataaaatagtaaaactttttttactataggacaacgatccaattccaagctaaagattgatatataactagaaatggtatttaagagcttatgactaacactagagaccccatctaagcccataaaatgaggttatctaagcaagttatgtctcacgtaatgatcattattgggctttatgggtaatctatcccgttactccaaatctagttcagctgccacgtcactctaactaactcgttggaggggaaagagtgatattgaagcaaacaagaacaacgacgattatgggttttggggttttatccatttctttgtctaattttatcagattttgtctagatttttggatccaaattattagcggaaatcgaaattgggttttacggttaaatctcgttcttgaaagcttcccttccatggggctttttatctggacttaaaagcttgtgctagtctcacttgatactaatgtaaaggaaggagctttggaatgcttaattggcaagtgactagtggcacaactgtcagtttatatattttgattaaacaaatcaaacgtgggtctgtggatgggcaataaacaacaacataaattgaagaatatcatcaccccaaatggtcaatggatagattagagaaatagaaaaatcaaaagaagctttggcaaagagctaaagatcaaagcttttctttgaggtaattcgtttgactcttttttttttttttgcttgaatcgtgttgttctctttgttctgctagagatttgatctgtaaattatgtgatttattaagaaattgaaagctctgtgtttcagaatgagattgtggattgtgagtgtactcgtgcttacacaccttgtccttggagctctctgttgggggaaggatggtcactacactgtttgcaaattagctgaggtgacttttcttgattagtttctgagatgttacactctaagatgaactctgtgaaagtgttgtaagatacttgaagattgatttagctttagagaactgtgaaaacaaaaatgcatctaggagctttctttattagttaggatggagaataaatgtggtttaatcggcgtttcatcgaatttctttgagattggatcatgctttaaactgaaaaggtattagctttgttgata

SEQ ID NO: 7993 - DNA, 3133 bp, Arabidopsis thaliana landsberg
gataaagctttcccccaactggaccgttgattattgttgtttaataacaggctccctatgggctaagaaaatctgaagagttttgtttttatttgctttgttggtcaagcagcatttttgaataatgtagattattgatgtaaatctaattaatagctccctaaatagccttttggtaatgcaatcaatatttttccttttttgttcgattcatgttttgagtgttcctttttttcctagagcaaacgctcctgcgaggctgcaacggtcatatacaccaacttcgttacctaaaaaccacgaatctatacgatttttttccgtgttgttttttatgcgaacttatttacgttttgtaattaaatatttgtccccacaaagcaataacggtctaatttcctccacctattggtgagtttacatcttaaggtccactcacggacccacctcttcaatttaagaagctttccttcaatttaaaagtaactaacatatgttgaaaaataaaataatttagtatcagaagattacatgacccagaaatagataaaagaacgaaaaaaaccattattataacccttcatcgaatcacagaatctggtccgacattgaaggaagtcgccggaaaaagttgaccggaacggaaggcatatcgtctctaaacctcggatgtcgaatgtagtaaaaaccagagcccaaaaggaaaactttaaacggaacgatgtagaacaaaaacgacgcgaaaagacagaacactacgaatatacacgtggcgcgtgggtctctccagttgaacaacgcctcaacacgctccccttgagccgccacgtcacctaataaagtctgtgcccgaccggccaatgcccttaaccggtcataccttatacgtacgacctccggttgtctcgttgttgggaaaccatcaaactcttcatcaagctcgtcgggagcaacggagtcaacgcaagatagtcgtgggtcaacgctgttgactttgactctgccacggtaacggaatcttaaggctaagatcaagaacgcgtacatgaatacggttggggaggactaaatgtggacacaagacgatggccacgagaagcaagtgaacgagaacggttgttggtgggtgaacccaagttcgaatcccgtgaatccaacgggctatagttgcggcccgtgacaagaacgtgatgacacggaaccaattagctttgcttctcctcatgctccacacatgattgtctgtgtctagcatgtattgaaccacctcttgacctaatggaggctcagaccgcgcaagccgggctgtcacgatacgcatagccgtgtgacgcaaaatgtcttgttgagctggaccaagcggacggacatagtgcatcctaggtagcattggtgtgacataggcttgaataatgcttagccaagatggacaagagaatcgaaccgcgatttcaacttctcccattttcttggctccgcttggtaagatcacggttaaggtgtaggaattaaggtatatgcggttcatgtcgagtgtcgagagacgtacacggattttcccgaccctaacatctctcccttgctttccggattcgtcccgtttgtatcttccattgtcgaaaactccaatagtaaggaccgtgcacggatcataaacatcccatgtgtactgctcgttccaccgcggattaaacctgtctaggatcgtacgagtccgaatccatttcggtccatatttagcaaccacataagcatcggtggtgccacgtgtaccgtctctggttttcacaggaagtaaattagtagctccacggatacccacttccaataaaccaataggtggcttggctaactgtttagcagagggtctgacatcgctcgtcacgtgagctgcttcgtctagcacgtgatacccaccttcaagacaaactttcacgtggattctcccggagtacggtttcttctcatcgccggcgagattaaaccacctcgatttcggttcagtccggtcatcatttctcctctcaacacttcccatatgtatcttagtctgaccaattgattgcccgttggttatatcttccacagtcactatcaagaacggctcaaacggctcggaagctacgaaaactagatcctcgttccaagtcgggttaccggatccggacgaagaagccgacggcccaatcgaagtcctagccgttttgaaaacttgaggtccaagctgagctttcacataaagctcagtggtggggatctttgacttagcttcggatcccaaacctagctgcaaatcttgggtttgtatgaccgttagacgcaaataccaaagcttcggagataagtaaactttggatctcgtctccggaatcaacccaccggaatcagattgccaagcttcttgaaacgcttcatcagcttgagtcccgagccaaacagcgagcatgacgtcattccccggtgatttctcagattccaatgtgtaccattgaggagccaaaggactatccggaggcactctcttaggaacctcttgaagatcaaacgacaccgttcctaaacaactctcagtagtcgtcgttgttttatcttccttctcaatcttctcttcactccaaacggaaacttcaagcgaggtcgagtttaagctctctttctcaaaagcaaacacttgatcccaatctttaccggtttggcttctggttttcacgccatttgttccgatcacgagcttcgcgtaaaccggattgcttccatcgttcttcgctcgcttcgctttagctacacgaatgtatagaaacggcattcgatcgacgagatcgtaaccaccaccacgattctgatctctggttagtgaaggaagctcgagatcagacccgattagatcttgccggtttacgttctccggtttaattcctaattcattctgtttcacagtctctgctttctgcggtataggcggattcttaacctcaaccggaggatgaagaggagcttgcggcggcatcaggccttctttgccttagtatctcgtggcgcatcgggttttttttctcgttccggatttaagctttctttccctcttggtttctcctgttcttttttctctccttcctcttctcctctgatttcg

SEQ ID NO: 7994 - DNA, 1894 bp, Arabidopsis thaliana landsberg
  unsure (1)..(1894): unsure at all n locations
gcattcttcttgcagtggttctccaatcttagtgtatatattctttttgactagtttagcagttataagagggggggttggtgataaacaactaaatgcagatacggtttgtgagatatattgtgtatgaaatcaaacggtcgaatatagtcattggacctagaaagcagcttttaggttcaccagagttaattataataataattataaaaaaaacccagtagaattcagtgaagaccaaaactatttgtttgtttttaggatcatcctggtttcattcagtgaagaccaaaggctaatatgtaatgtttcatgggcttanaatcatctacaaataagaccaaagctatatgtttgcttggtctttacttgatttggttggtttatttgtagatgaatctaagcacatgaaacattacctaccaaccttatgcttaaattaatttgatgtgaagaaggaggccccttcgcttatatctctcttcctttgttatagttgatggttataatcacatcacatagccacataccgcaatggcatccaattgttcccaaatttacagccgaatatactttctttaaaatcacactgtttttttttgcaaattaaacaagttgatacgtctaaaacaaacgctcgcaaacaatctagaatcatcaacttcgttgctccaccattgttttccagataccgtagtaccctcaaacaaacgctcgcattcgatcgggaatccttagctttgtagctccatctttattgtcaagttttagcttcatcaaacatggcatggcttcttcttcaatctccaactcatctaatcttgttatgatcactttaagtttcctcagccgacaaaaaccttgtgcgttgatgaacattttcgctcccgggtagacacaagaatacaatactagattttctaaacgttgtagtttttgcagagtaggcattgggtcttcttggagatttgttacaagtgtcagggactcaagactgggaaagatcaaatccatgtctctgggaagtctttttacgtcgcaatgcagtgttagcttgacaaggagttcgaaacgaactgtttcttcgaaaaataagctgaaggacactacttcaatcttcaagacacgaagatttttgagtttcgataaggaaactaagtccaaaggaacttttatttggtcgttcaatatgtggaactcgtagatctccaagtcccgaagatttatgagtaactcatgttttagtttgctccagctataggaggagatagacctcaaggtctgaagattcactgcgtcgcttataagcaattctccgatgaatcttccagtgagatgccttagtgatgtgagcttacttagatcagtcattcgctcgaaggagttgcctgatgcatctagtgtctgtagaaaccgtaagttggagatgaaatctggtaagttgttcacaacggtatcggcgatcccaaggtacctcaagtggactaaacctccgatcacatctggtaaactccaagggctatatccttgacaaataaaatgaagtcctccaagattaagcactcgaagtaacttcagtttcaaagtaatagtttcaacatatgtaatgtcgctcctccgtttaccgaagaacaagaaagatcgcatttgtgtgttcacacgtctgtcgcacaagtagttgtcgtccataagatggtgaaccacttcccttctgctagtagtagaagaatgctgctcgtcgtaaacatttacaaagttgagctctttggatttcttgatagtaaattctcttacaagatcatggattctaaaagacatcagtttccctttctttcttttcacgacttccactaagcttatgtccaccagatcttcgatataatacctagccaca

SEQ ID NO: 7995 - DNA, 1932 bp, Arabidopsis thaliana landsberg
tatactttttatagaccactttggctgctactattacaatgatcaaagagcatatacactggccaaaccaaaaactaatcctaaggaaatcattcacacttatgtcttcaagagattttaaatcaagatactaaaaaaatctttcttttttcagaaaatggtgtgaatgatcacagttcaatacaactaagcaaaatcttgtaacataaatccaatacgatatggaaaaacaaagacccggaaagaaaaaggtatactatacttgctgaaattaaaccaaaaaagaagaaacgaactggtaagagatcagaagagaaaactcaaaacgtgtgattgattgattagtaatcactatagttggattgttgtaattaggtagaacagcatccttttctgttagttgcagatgaatctgatatattgatcgctgttccttggcccggaagattacctgcagcttcttgtgccgctaaagctttcttgcttatgatatgataaatctcagacaaaattgtctgaaacgctttctcgatgttagtcgcttctaaagcagatgtctcgagaaacgacaaaccttccttctcggcgagagagcgaccatcttcatcagcaacagatctcaagtgattcaggtctgatttgtttccagccatcatgataacaatgttggaatcagcatgatcccttagctcacgtaaccatctcaagacattctcaaaagtttgtctcttggttatgtcgtagacaagaagagctccaacagctcctctgtagtaagcacttgtgattgctcgataacgctcttgacctgcagtgtcccaaatctgagccttcactgttttgccttcaacctagtcaagattacacatacaagcatgaacaaagacgagccatttcatttgctacaattacattaaaataaacccctaacgagaattcattttcataacataagatcttcagatctaacaatcacatgcctgttcaaatatcagaggatgcaaatgcgacgacacaatctaagattaaacaccaaattgatctggagggaaattgtctagatttagagaaagcgagagaagagagatgacctgtaaagtccgggtggcgaattcgacgccaatggtggatttggattcgagacagaactcgtttgtggtgaatcgagagagaatgttggatttaccaacaccggaatcgccgatcaggacgatcttgaacaagtaatcgtactcatgatctattctattcgccattgcttctcaaatcctagcgtctgatcaacctacgcatatacacattcacgtcaacatcgatcgaagaaactacaactaatcatcgtcaatgagatcaaaaagcagcaaatcgaaaccctagaaaatcgaattttaccttttgagcaagccggaaggatcgagaatggaacaaatgtttttttttttatattttgtttctgtatttctctgtttcctttccttatacgttgcgggttttgtgcccaagaggtgaaaacggaaactcccttttatttagtttcgaattttgagattcttttttttttgtttaccacggaagaaataatttcattaaatttcaactttttgttataagactttgttacaaatcagtcataccaaaactaagatcagattatgcaaattgcatatctaaattaaaaattcaacctttaaacttaagtttagttggtcccatccgagttaaaatcgaatttacggctaaaatcttcagaaaaagcaattgaaacgagaatataaaggccttgcttaattattaggattaacagttaaaatacatcattaccaaaacacagagccatattcaaatcaagagccataatcagaagagtctttacgcataaacatgaaacccataagctaattggctttagccagagatatcaatagacttaac

SEQ ID NO: 7996 - DNA, 2970 bp, Arabidopsis thaliana landsberg
atgctccacttgcacaccccatcagccggccctgatcttgatatttgagtccacgtactaaaatatttttttggcttacaaattaagcaaaattgttttttggccctctaatttaatcaaatttattttttgggaccttaaatctaatcaattttttcaaattggcccttaatttcagtctaaaaaattttggaccctgagcaaatactccacttacacaccccttgagccggccctgcttgtcagatatatatcagatttttttttagtaaataataaatcgtcttgctaaggaaattctaattgtaattcacggggaagttaaggactatatagtgcatgctcgcgaatcataccagtttgattttgtttcaagtttgatgttgttgtggatgcatgtttgagggctttacgggtttaaaaagaatagtttttgtcacgttaacaaaaaaaaagtttttgttaaaattggataaaaataaagatgatttgtctcattaagtttgatttgcattacctttttgatacttaaaaaatcaattaaaaggcttaaaaaatcaattaaaaggctaaaagcaattgaagatagaataaggaaaattcttcttgattcgagttcaggctaattagttagcagagttccacttgaatttttcaatggcttcaaaataagaagatattttgattgaagtagtcaaagtaaaacaacatgagagaattttcttgtatacacttggaaaagggtcaaagttcatctcttatttttattaatatatactgattattatttgattgaactaaattcaatattcaagtttcttctccatatatattttggcaaccagtatacattatttcagtagatgaaagtcaacattggtgcttgttgttgcatcttgcaagtatggtattggtatggtccagtgcttgttctacgaggtcgagtgatccaacacacttaactcaaagaaaaagaaaaagagagtaaagtcaatactgaaacccatatggcccaaaatttgttcgaagcccaatacataatttggaacctaatttgagaagtccattacagaacatttagtggataaaattacccaactattaatccaccattcataattgtctcgtgcgtttatcagaaccacaattgttacttgttagcttggatataattgactttgttcttctgatattaactcgatactggtcgtactgtctaaggttaaaatcaaatttgatggcctgaaataatttaaaagatctttaactgtattgggcctaagctcattgacgattctcacacttggttttaaatctgagatatgttcttgtttcgtttttttttgtttggttttatcatttatgttgggatcagtttcgtttagggtttctgttgaagtaacggtgtataaataagtttatttggatagatattatgagattatatatctatgattatcttcaaaagttattaactttacacaaattaagttagttataagaaaaacaaaaaaccataatgtaaatggagctcctaactacatttatgagctctttcgtttaattactttttcctctccctcttgagttttctgttcgatcacaatgaatagaaatcatcatgatcatctcgatgctgcggggaaggatatgtggtcacgtttaagtgatttggcggataaagctgatatgctatatgaaagagaaggaatatccaaagaccgcaagagtgtctcagaagaagaagaagaaaagaagacgagattcagtattttggtggatctcgtgggtaggttatgtgatcaagaggaacgtcgtactcttaaatcatctcctacaaaaaccaacactctttttgagggtagtgaaaagagccacttggatcatcacttggatcatctcccacaaaaaccaaggtcttcccttgagtgtttttttactagagtatacacgcgacgaaaccataataacgtttctacttcttcatcgctcttcaacacggatgagtttgagaggacggagactaaaagccctacaatccgtaattcccaatcttcaccgtcttcgtgtctaatggagaacacaaaacgcaagaggtatcaaagtagtggtaaatccaagaaaccaaagtttgatcctttctcactgactgcggcgagagagacgccagagtggcttttagatgtgatgagaaagatgaagggagccgaaggaccgatcaaactgatctacgagaagactttgaccgcaactgacgtcaagccaagcgagagtcgtctcttaatacctttcaataagttactcagaaacgacttcttgactcctgaggagtctcgagccatagccatagataaagaagaagaagaagaagaagacaccaagaaaattggtgtgaaaacgattatcgtgaatcaattctctaaagaatggagtttacgttttctgatatgggtgatgaagaagaaaaaatctggaaatggaaccttgtactacactttgaatcgggggtggaatggtgtcgtctcgggtaacaagctcaaagccaacgacaatattagtctttggactttcaggtgtggtggagtcctctgacctgcccttgagaaagagtagctctttccttttaactctgaatctgatatgtttcatttctacttggaacatttaaacttgattttatcaagttttccattggcagagtagaggtttttggtctatagactatagtagcatagaaacttcctcttttcttttggatttagtagtagcaatttcttgcaagtaaacttaaggttttcctacgatgtgcatgtgatcttacactttattattggcagttaacttgctctttgtatcttgtgtactctactttagttactacatgtgatatcttctttaatctagtacaaagatcaatcaggagcgagggaacggaaccaattgtgcaagggtttttggtgaaatccataa

SEQ ID NO: 7997 - DNA, 1586 bp, Arabidopsis thaliana landsberg
gttgtaagttccaagttatatgtgaaacttcttctttatcctggtcattgcttatcatttattcacctgccgctcttggatatgtgtttgccatttggagtaaagacaaatttgcttacaaaatagtgttaaattttctccagaccagtggctcactttacggtgcattatttggctcaattgtggcttttactatcgctgacgttataggttagttttacttctcactatcttcattttgtaggcatgagtatttagcaatgtttgcttgtggaaaaagataaagttttggttttgttgaatttggaaggaagaagaaaggagctgattttggctgcattattgtatctcgttggagcccttgtgactgcactagccccaacctattccgttctgataattggacgggttatttatggggtctcagttggactggtaagactgatcatgcttctttattgtttgacatctaaagactttcttatgcatgccaatggctcaaacgttatatattatgcatttggcggtgtactaagaatcgcacatctgttaggaggggagcaaattaatgctttataggactttagggcacccacactcttaatttatagtggtgactactttccaaggtcttataatattttaacttgttcccctcctaaaggatgtggagttcttatcatgtatataatcaacctaacttaacctttccaatgaatctaacagttgatgcaaatatatttccatctattgctgagcatgggttgttatccagtgcatcatcatagaaacataattgatgtctattctatgtacatgtatacagagtacacatatattgtgactgtattcttcgtccttcgtattttttatgtttttccagcttaaaagccagtgactagaaatcttgtttacctttcgaaaatattgtttatccatgtgcttttgctgtggattacatatagcagtactcttgctacgggaactgaattgtttccctacatttaggcaatgcatgcggctccgatgtacattgcagagactgctccaagtccgatacgtggacagctggtatcattaaaggaattcttcatagtccttgggatggttgtaagttcctgcaaccctgagatttaggacgttgattgctttatgtgaagcagttgagttgaaatctttgttcaccaagttaatctcacatatccccatacaaaattttacacagggaggttatggaatcggtagtcttacagtcaatgttcattctggttggcgatacatgtatgcaacaagtgtccctttggcagttattatgggaattgggatgtggtggctcccagcatcccctaggtggcttttgttgcgcgtcatacaggggaaagggaatgtggagaaccaacgagaggctgcaatcaaatctctctgctgccttagaggccctgcttttgttgattcagctgctgaacaagtaaatgagattttggctgaacaaacttttgtgggcgaggataaagaagaaaaatttggaaattagtttcaaggaaagtgcttgaaagctctcatcataggaggaggtctagtcttgt

SEQ ID NO: 7998 - DNA, 2220 bp, Arabidopsis thaliana landsberg
  unsure (1)..(2220): unsure at all n locations
gccaaagctacgatcatcaatatcactagttgaagatgtttctaagatgtggagtagtttgaaatctcgtttctctgttagcgacgggacaagagagcatcaactccacgctgatctcagcgtatgcaaacaagatggacaaacggtagaagaatattatggacgattgaagattatttgggatgatatctcagatatagacaaaggatttatctgttgttgtgggagttctagctgttcttctatgaagaaatacaagaagaaacaagatggacttcacatccaccaattcttaatgggacttgataatcaaagatttggcacaaccccatcaaatctgctatcaagacttcatgaactaaatttggagagcgtttactcacaaatagttccagaagagagacacattgaggcaacacgagaaccacaacaaaagggaggaatcgttggtttttcggtgtccgttgcggatagtttcaaacaacaatccttgacatgttctcactgtgaaaagacaggtcatgagaagagccaatgttacaagatttttggttatcctgaatggtggaacgaatcatctcaaaacgcagggagaggttcatctggtagaggtcgcgggtccttgcgaggcagagaacgtggtcgtagttcttcgttgtccgcctcacatgtttctggtgccatgactacgacaacaagcgggtcggcgtcgtccacaactggtcttctgcagctctttgatagtcaattgaatacattggccaaattcattgagaaatgcaagaagtcaaatggagcaagcaaagagggatactctggtaagagtgaaaaactgattttgtatggaactcatagtgagtttaatgtgatcattgattcaggagcgtcacaccatatgactggtggtatgaatcttctaacataaattcataaaatagatccttgccctatcaaattgccaaatgacaaggtcacttgggcaacccgatatggcacacgaattctcggaggacaattgatacttcgtcacgtattctatgcccctaaattgtcaattacacttatttctgtgtcataactcttacatgacattgcgagtgctgtcatatttactaaacagttttgtgtgatacaggaccaagcttcgaggactttgattggagcgggcactgaacgtgatggggtttatcatcttgctggtgcggttattcctcaaataaatcgtgtcaggacagttgatgctcgggatttgtggcataggagaatgggtcatccttctccaaaagttttatcttttctttcagatgttggtgttttcaaaaatagtattagtactttagaagaatgttgtgatgtttgcttcagaccaaaacaaactcgtgtttcgttttcagaaagttcaaataaagtagatgatttcttctctttaattcactgtgatgtttagggtccttatagaacaaaagctacttgtggagcagtttactttctcaccattgtagacgatttctcgcgagctgtttggactcaaattctcattgaaaaaccatcggtatccacaatgctcaaaaactttgtggcatgggtttttcgacaatttgacaagaaagtcaaaacaataagaacggaaaacggtacaaaattcatgtgtatgagttcttatttcgcagaaaacggtattgtacatcaaacttcatgcgttgatacaccacagcaaaacgggagagtcgagaggaaacattaacatatactgaatgttgctcgagcattgttgtttcaagcaaagcttccaactcgtttttggggagaaagcaatcaagctgctactcatttgatcaaccgaacgccttcaatcctacttaaagggaaaacaccatacgaagtattatttcagaatcctccttcttatgatgatataaggatatttgggtgcctttgctatgcaaagctagtaagacgttcgaatgacaaatttgaagatcgcagtgctcgatgtctttttcttggatatcaatttcgaaagaaaggatggttagtgatggattttcaaactgaaagaatttttgtttcccgagatgttgctttcgaggaggaatgttttccttactctgagagtggtntagcaagagaagatgattataacagtaccaaactcgactatcgctagtcgacagggtagaatataatactcccagatacaagctcgatcgatccagatgc

SEQ ID NO: 7999 - DNA, 1639 bp, Arabidopsis thaliana landsberg
atttgatcattgatggacgtcaaaaaaaaaaaaaaatggaaagatgcattttatcactacattaatagattgggaaatggaaaggcggtaaaaatgtagatgaaacagatttctcccatctctctctgttagttaattatatagtctaggtattgagtgttgcattagcatgataaatttataactaaaagagtgttatgtacaatatttatgtgaatgatcaatagcttaattgtcacctattatacaaaaaatattcggtcatgcattgcttagcttttttcttttcttatgttcgtggttctttgtttgaatttagggtaaccgaaaaacatgactacaatcacatgttaaagaaattaaagaaatgcaatattcattatataggtttcttgaagcatatctccacttttttatttgacaactgcaattatggctttaaatagcttaggttcttcttattcatttatcaactggtataacacaaataagtcacgccgagattaatatgtcgttatacattgaataaaaataaagcaagatcataaatccacaaattgtttcaatatgacaagagccaaatagataatttgggagtgaaactagttagttggaactctgcctttgaggaagttcttgcaaatcgtctcccaaagcttcctgtctgctcccctattctccatcgttgccttagccgcatcagcaaattcttgctgcatatttaatttacaatttcttagaaatattctagatttttgtcctcattgatatttaatattcgattccaaaacagttaaaatgatcataagtttataccagcaaggcaacaacatgccacatgttacggaaattggagtaattgtgtcaaccaaatgatagatactatgaggtgtactatattgaagtgactaatcaacaacaccctaatttacaatattctatttcgagccggtgaatatttaatccaaaacccacccatatgtactatatccaagtttttcaatgttattgttgtctgtaaattgatcaaggttaagagaaaagagaaataaaaccaaccttgacgtagcctagagcaagaacacgatcaacaatctcgaagagaatctctttgttatactcaggatgtccttggatacagaacaaatgatcctcaatcgaatacatctccacctcgtagttcttggaatacgcaagcactttagcagtttcgggcagcaccaacacttcgtcctggtgacatttgatgatcgctatgctatcaggaatctcgtttccgaagtaacttccaggcgtaatcgcatccttgacgatggttatgtctccaagtttaagttctggtcccttctttgctcttccgactgttcctccccttaccctggctatgatctaaaggaaaaatcgttttcaattagaagaatattttttaatcaacaacatgcactattcagtttttgaatcattccaaatgatatcacaacactaattcaaaccaataaaaaaaataagatgaatactcgccactagtgaagaatcagtcccttactcttatagataataatctttattgtcatgctttattgaatactctccactagtgcatacatttattaatttaatgaccccatttcatcaaaaa

SEQ ID NO: 8000 - DNA, 855 bp, Arabidopsis thaliana landsberg
taattaacaaagatgtttatgtaaattaactgggatgattccaagtaacatattccacgtgaactttgactttgacaccgaattgatcaattttaaaaacaagatgcagtttatatgcgagagagacaaagatatttgtaagtactgttatgttgtctagtgaagagtactttgtttataaaaacaatgtttggttttattcacattgtcattttattatttggaccattttcgtcttgcttagcatcccgtgcatgtctcatctaaatcctcactattaagacattttaacgcacactacatgaatattataagtttttcctttctatttctgctggtgtcatacgtactgttcatatagacatcaataagtttcttgtacaaacaactagactatgcaaaattataagagctggattgtatattgttaaaactgaggcatgtatgagttgtacgcttaaaagtgaaatattttttcggtcgcaggttatatactagaatgcagttagattttaactaagaaataaaattttgaccaaagcatttacagtataatgcatgatttatgttactattgctgctgtctcattttcagattttaaaaatcagatctaattgacgtgatagcatatagaggctagtaaaacactatgagtttatacttttattgatggttaaaattatttttacatcttgcagtcatctttcaaccattcttcattctagaaggagttcttggtgacttaataaatggctttttacaaatattttggtgtaggacttatattatacatgtgtgtggcgaaccttctggttctatctattaaatgccttttctttttgtagttttttatg

SEQ ID NO: 8001 - DNA, 2107 bp, Arabidopsis thaliana landsberg
accattgtttaactggttaaaaaaaggatttattttcatatttatggatttaaatcacctgttacacttttattgaaatcattctcttatgatcattgcatcgtaactcgagatatttatttttcatgctttagtttgttaattatatctagttttatcatgttctataacccttttttaggcactcaacataaatagcaaaccccgatttagttcaattcgcgaatcaatttcgtcttggttattcttttggctttggtcgtatttaattatgctagctgccagatcttaggcacatcactttgtttagataagattagaacatttcttcacagttcacttagtcgtcacatatcaaacaaagtagataacattataaataaaaaaattccacaaataatttctgcttatatatatagatatgtaaccaaatcacaaatttccacataattagtctcacatatacttgtaactagtcagacaaagacaatggaagaatcaaaccgtagtagtactgtcttgttcgacaaatacaacatcggaagacttctcggaaccggtaacttcgccaaagtgtatcacggaacagagatctccaccggcgatgacgtggcaatcaaagtcatcaaaaaagaccacgttttcaaacgtcgtggcatgatggagcaaatcgaacgagagatcgccgtcatgcgtctcctccgtcatccaaacgtggtcgagctccgcgaagtaatggctacaaagaagaagattttcttcgtcatggagtacgtcaacggcggagagcttttcgaaatgatcgatagagatgggaagctcccggaggatctagccagaaagtatttccaacaattgatatccgcggtggatttttgccacagccgcggtgttttccaccgcgatattaaacccgagaatctgttgcttgacggagaaggtgatcttaaggtaacggatttcggactttccgcattgatgatgccagaagggctaggtggcaggcgtggtagcagcgatgatcttttacatacgcggtgcgggacaccggcttacgtggcgccggaggttttacggaataaaggatacgacggagctatggctgatatttggtcgtgcgggattgttttgtatgcactccttgctggcttcttgccgtttatcgacgaaaacgtcatgacattgtacacgtaagtatttcttgaccaggttttggcccaaaccgtatttgtttttgttatttatttgacgaatagtgagatacaaaaaaatattgaactaaaagccaaagtagtccattttgagttgggtttctagatgcatctcaattttacatcacatacttatatatgttaaaaagaaataataatcatttttggttaaataaaatattatttgaaagagacagtttaacttgtaccaatagatacaaaacttggatataagatatactatttgaaagtttacacacacaaaaagaaaagatatatagtatttgaattatttgttcacgtaattcaaattttaataattactcaaaattatacaatattttccaagatattgaaactattatcaatttgtgaatattcgggtggtattttaggtacattaatctgatatcaaattcgataaatgttggtcgatcgtatatttcattatagttctatattatcaaaatttcacgtcccgtattttactagataatttataaaactcccgccaataataacggtctcaaatagtgctcttcttacaaattcaaatattagtattgttgaatgtgaatgtgaattgatcaaattctcattgttgtttcttgtttgattgaacctttcgaaataaacaggaagatcttcaaggcggaatgcgagttcccaccgtggttttccttagaatccaaggaactactctcaagattgcttgtgccggatcctgaacaaagaatttcaatgtcagagatcaaaatgattccatggttccgaaagaactttacaccatcagtagccttttcgatagacgaaacgatcccatctccaccggagccaccaacaaagaaaaagaagagagacctaaacgagaaagaagacgacggagcttcaccaag

SEQ ID NO: 8002 - DNA, 2256 bp, Arabidopsis thaliana landsberg
ttacttggaagaattcctaccgactgagtttgtggtgtcatttgataatcaacgtcttaacattctcagggtgaaggactaaaatgcaatcagtacactttcatcttcagtatttctctctggttgtttcctttgatttggtgacttgaaatagtctacgtaatcttgccatgttgtatgacgtgaacatgttacgaccttagcatcaagtacatctggaagtcgaagctctggtggagcattagttttctcttctatctgtgcgtcttgaacattctgtatctctttaggctggacattgatagtgatctagcaaagacaggtttgttggtttaagacctccctaagtttttgtaagtttgagctcgtttaaggaacggtagaaagaattgcatttaagaagaatgaatgaatatagtaaaacatttttttacaatcagctaatctagaagctttgaaaacaatccaatgttgattttttccagtttgaccctctgaagcttaagtaactacgagttgagagtgtccaagagatggacaaggagataacagaggcacggaaaatattcccatgtctttactgtctgctccgtcccaaaaccccttccaacttgatggcgttaatggacaagcatcagcctgaacctgagcttcttccctcttaacagctttatggctgatcagctggctttcattctccgtcacctgtctcttcctctttgcttttaaagaaatagtcttcttgttgtctcccaagtcctcatgctttcctgcttcaagtgggaagttaagaatagctttgcttcctcgtagtttaaaagctgccttgtcataacctcttgcagcttccatggctgtgtcaaaagtgcctaaccagacacgaacacctttcttgtttgggtctctgatctcagccgcatacttaccccatggtcttctcctgacgcctctgtaatgcctttgatcattctcttgaaccaccggtgcagtagtaggaactgctatagtggcaagaggtggtttgcgttggcttagagttgaggtggtgcagtggtggatggtggaggcaaaggtgtctaaggaagggaaatcagtaagaaggtgttgggttatgagatctaaagctgactggtcttgttcttgctgttgttgatgtgaagaagccatagatgatgaattatgttggagtcttctttgtggttttgattatggattttggtttttgagattggaggttatatataaaagtgggattgagaggtttcgtagctagcttcttgggttggagagaggaaggatccttttcaattgttttgacttgtttagttctattgttgctttggagtgtggcaagtggactactctatcatttattattttaagataatgaaggatttgtggctatgtctttttcttgcgagggtccatcatcatagctattgtctatttccaggcttcttcatatcccagacacaaattaaaaatgtttttctgagagatatttgaaagaaaaattgacacttttttcttacttttaagggtaaagtttagttatattttggaaaaggtggatgcacgaatgtgtatgagtacacttgactatgtgcctatgttagatggtattgctgcctgggattctcgtttgggcacactgtggattatatgatttggccgcaatatttgaaacttatgttttttttcgtttaattgtttgaaacttttattcaatttaagttacttcatttttgtttctttgttgtttatatagaccaacttgcctattttgaacaatgaaagtttgaatttcctgcatgcaagttatatagaacaacttgccaaataaatcagattagaagatgttcaataaattcatggtcaagctttgaaaaactccggcccccacaagagtataaacaaaatgctggaaataaaagttttacgaggagcatttcacgaatgttggttaatcacaaaagtcttaattacttacttcaaaaattcttgttgacgaacaacaatgaaaagaaaaaagatacaagattttttgtcaccatgcataggcccgaataatatacagaaacgcaagatggatacaaatgccaaggacaccgggtaagtcggagaagtgctggtcgagaggacctacaaacataggcggagaagagctaagggtagaattaacttcattaaaacaattaccaccaaaataagaaacattggatgagaatctaactcctacactaggagctggacatt

SEQ ID NO: 8003 - DNA, 1563 bp, Arabidopsis thaliana landsberg
tctttcaaatcttcatttttcagtattatgtgtatgaacactgtacactcatacatttaggatttgtctcttcatatattctaacctttaggaaggccactgggtcatgatcagctcaaacttggtataactttttatccttaccaaaaccatattcctagataagaactgcagactatcttggaatctacagttctgcaccaagattacaactgtttaatcaatatgggagttgaggtttgtcctctgtgagctttgtgttggaagttcagcagaatgttatgtaggaaaggatgtcctgcatctgcttgtgcttcttcattcaaatgcatagtttctgggtattttcttcaagctctccatatcattttctgcatcttgttacccggtccagtagagtgcaatggcaagagtcctaaagctacaaagaccacgattctccaaggatcatcatagtttgaaagctgaggtagctagtctagagagaatcgtagtcattagacttcatctagggacctcttggcttctatgtttccttagttcactagctatttttgtagacctattgagtccaaatctctggtaaaataatcaagtttgtgtatctgagttcttaaaccacaaatttttatcaattctagtattctttaggatcttttgaataccactaaaacaaagttcctctatgcgtaaagatcagattgtatatgttgtttgatcaataaaacaagacttttaagcataaagcaggaatgggactttccgattttgtttaattagagcctctatatgttctctttcttcccttccatgtcaaaaatatagctgtagtacctctacataactgaagttctaaaataagttgcaatctaaattgagatcccttcatgaaagccttaagggatgtattgcaacaccgttctgcgcagattttaagcaaccccatcttccgagccgcggttcctgccatatacccaaagttacagttaagattggcattcacagagacgaatatatatgtctggttaaaggaaaatgtgtacctgtccaacaccagcgatcagaaaccgaccagattttgcaaaagctaaagagttcacaaacccaggctgcaaaaaggtcataagcattggatgtcagtaacagatgcaacacacaaatagcaataagagccgacctaggaaaacaaacttacaagtggaagctcgtataaaggttgtatagcactagatccactttcaacaccccataaacgcacacaaccattaccagctcccgatgcagcaagctcgctacctctacagacagcaactgaactgacccaagaacatgctggtgtacagttatggttaacagaatcatgatcagctatcacgtggtgagcattgttaacgataaacactggtttctttttcaaaatggaccaaagtgcaatacttccattatctgatccggacaaaaactcatcactattaacaaaacagcagcactcaaaatttgattcggaagctcgatagatcaaccgagtagactcgggaacctgataggaaacaaaaaacgtgc

SEQ ID NO: 8004 - DNA, 7507 bp, Arabidopsis thaliana landsberg
atgataagttattctatattcaaaaccaaaaccgaatttatattctacgtattgcgtaaacaattttgtgatatagatatatatatatatatatatatatatatatatatatagtttgtagtttcatttgtatcaaatatatcattcaacatcttaactacaatagctaatgtagctcattgccaccaaaggcgtgttccctattttgacaaggattgatgagaatagagagatgaagcaactaaagacaattgaatcttatcaatttggtttgttttgtgacacccgattcgctgacttagtgcacaaggcatgacatgtgtgcctctccgaaaccttaccaataagcagtgcttttgtgtactattactcctaagaaaacaaacatgcatccaggatgacataaattagataactttacttagtgaaaataatccattttacccacatgatttaaaacatacatcttgccctatgataccgcatcacaaatcctcataagggatatattagcatgtaacaaataaaagaatcaacttagtaattaaatagtagttcactcattctacaagtatgcattttctagcaaccatgcatgcctacttatcatgctatgaaaaaaacactcctttgaagaagggagacaataatgacgacattgcttggtttgtttaaaaagacagattcaaatttcgcataattatatatatattttgattttttcaaacaaatttcacgtttaaaagaaaagaaattttcacaaaagtggacgaaaaaagatttgctctcaccgtttgtcaaagtgagaactggttttcacgttttgtcttttcattcaatttcggacaaaattaccctgggaaaacttaataatggcacaaaccaaaccgtgcagcagttcgtatcggttaagttgacggcgtaaaccaaaccctacagcagttggtttcggtttagttgatgcggttcagttttgaaaaagacaaaaaaaaaaaaactgaaacgaagaaaccgagaaaacgaaaaagagaataacggagagatttgagagagaatcagaaagcgaaacgaaattcagtatccattgcttcaaaattcgacataacttcgaattgttgggtagttgaattgtgccactgaactcccacatccggtgaagtgaaagttactgtttttcccggcgaagccaagagaaagttactgtttttcccggcgaagccaagagaaagttactgttttttccggcgaaatttgaacctccggcgagatagcatctttagctatggctgggaataaagctaacgacgaagtcccgaggaagcagcatggtccagggaaggagaagcgtgtattaagagtttccccgcggagaaaacgctctgcgacaaaggcaacggaggaattgggttagaatctctaatttaccgtttgttgtctttgggtgtatcagaattgtaaagcttgtttgattaaagtgttagaatttgtcggaatttagcatatctttaggatgaaaaattgagaagtagaattggaaatctctgtttccgccaaaaatatgattttgagttataatctggaaaatgtctgtgtacgtacactacttctgtttgctcaacagtatatgacttttaattgcaggtagtccaagtgttgctccgactgaagatcttacagttgaagatttaccaccaagactctttgctctagaccggtacccttccgagacgaagatgaacgcgtactctaaaccggagtacatttctgacatagcaaaagtactaaaggggaaaccagagatgcagtttcttctcgattcttcatttgggaaactttttaaaatacccaaaaacaaggcatctttcaatgctaagcttgtccttggactaatatgccgtcagttagtgacaaagaaggtgaatgagatgtggattgtattcggcggtcatccaatcagatttggattaagagaatttagtatcctaactgggctggaatgtgggaagtatcccaagaagaaagacgttgatgatgttatcagtgtgaaacctgagtgtgagagtgtttggaagactctgtttgatgagaggtttggggacacggttccaacaattgctgatttggtgagctggctgcaggaggaggaaagcatggaggggtggaagcaactggcactatctcttattattttggttgacggtgtggtagcggcccacagtaaccccaacaggcctacttcgaagactgtcgagatgactaagaacctggagtttttctgcaaatacccatggggaagggtgtcctttacccgtactttggggaggatagcaaatttccaaactccttacgatgctcagaaactaataaggggtatacttgtagggtcttatgcactccatggtttcccattagctctccagcttttagctttcgaaacaatcccatcaattgctaagctaggacctgatgatgtacctaacaggacatttgctgagaggtctatccatcgtcttgcctctctgcgagcaatccggacatctcgcattttggagtgtgaggctgctgatgaggtgtgttaaattgtgtatgtacgtacataataagtaaatgtacattatctatggttaacatacttatttgtgtaggttgaggtcaactatattgtgaaaccagctgataatgtttgtcctccatctctttcatgggatgatgaagttgatgatccaagggttgattacattgaggcactgttgatagatgggcaccagtggcaggaggatgaatgggttggaggctatgctagagtaccaaagcagtcgcgcccaccacaactagaagagacaggtaagtataagtataaatgtttttacaaatttttttggtattgcacctagaagaaaaccaattaatagcagcaattggtctattgtagatgttaagaggaaacgaaatgcaccgggcccgagccctaaagaacctgctatgaaaaaacagaaatctgaaatggactgtgataaagaagagactgctgaggattgttttggagagcctgtgcctgagaggtttattgttgaaatgaggaggtctttgaaggagctggaagaccaaatgtatcaaatgcatgaagatatgaaagactttgtccgtgaccagatacgtgctgcccttgatccaaaaggcaaaaggccagaacaaaccataccttcccatgattcgcgggaaccacctacttctatggataaggcaccggttactgcgaagaagccatcgagaaggatgtctacaaaaggaagcactggaacgagaaagtcttcaaggctgactcgtgtttctcatgatgtggacactcctgcactttctgttggctgtaattccaaagaggaagatttggatgtccctggagtacataccactgctttcggcggaagaagaaaaccttcaaagccgaagaaaaatgtttcttttgctgttgacactattgaggaacctgattccaataaggaagatatgcaaggattcattgatgaacaggtaagtcatgtacgtacattgctaaatattttataatccatatgtataactgtactgtctggttcgatacaggatggcgctaataatgaaagtgattttactgcaaatgatggattgaattcttctgccgctgaagaagagatattagacactggatttttaatagttccttatgctggatccacacaatcccatctggtatgtcgtctactaatactcttaacaatctgtttaaatggtgtacgtacatattcgcttaagaagttagttaaactatgtttcaggatagaggaaatgtctgttgttggtaagactgtcttcttaggttcaatgtctgggactgtctttgtaacacaggaagagaggcctgtggaagaagctactgttgacaccgagatggaagaagttccatctaatgtgtctgcaagagtttcagaggtagatcttctggtaatcgttatatacagatttccatgactatatgcatatatattacattaatttcttcacttatctaacgcttaactctatggtagcctatgtttcaggataatggaccaaaggatgttgttgaacctggcttagttggtacccatacaagtgccgatgaaatagctgatgctgacatagagatggtagacaatccatcagttttaccttcaacatctgcacaggtatgtgttagtcacttgttctttttccatatgtgtacgcccataagactttgcaaattatttttgtttcaggaagaagcaagagatgccagtgcatcgactgaagctaatggcagcgagtcagaagaaacttatgagccttctgatggagacacagctcacgtacctgccacaagtgtacgtacatttttgtcactatgttctgtgtacatatatattgtttcatacattactaaaaagtttctttccgatgctaaattctacaggttgaggcggcaggagaatccaaattagtgacagtgatggaagttgaaatacctgagaagacccacagtgatcccccgtcaccatttcaagtagttaacaatgtaagctaactcttgcaacaaataaaatgtactatttactgttcaaatgtataaaatttatattatgcaggtcatacgggagttggataccaaagccgttggtgatttagctgcagccactgatttggaggtaacaatttgtgtgtttcaattcctattttcggaatagcatacataggattatatgtgtacattatatatacttgtgtacgttaacttgcacaggtagtcatggaagagccgtgtattgtcgaggggtctgtagaaactgaggatcctaacccagggtcagatgaagcagacaagaccgatattcctaaaaataatgtatgtacctattttaaacatagaaaaacgtatgaaactgttgttgacaatcatatttgttaacaggatgaatcagacaatgctgctgctgtcgaagcaaaagaagaaaaaaaatcgtccccaaagaaagtgaagaaacaacttgtctatgaactagatgatgcccatcctcatggttttaaggcaaaaacagtattggtgtccgatgtaccagctcaacagatagaggttgttatcagggctggaaatgtctcatacaaccccctggacgtggttgacccttcaaaagtagaggaattcaacaatatcattaaaggaccctctgtctaagtacattatagtaaaatggattatttaatatctcaatcatcatttttccaagtcttaaggttgttatcaaatatttttctggattttacaggattcacactcttttcgggtttcgaaaagtgcccaacgagttttttgcgaaccttctaacacctggtgaatgggatgtcctcaaagatgcaaacattttcagcatgtgcgacgatctcgatgacttctacgcggcaggccacgatccaaatgacatcaactccgaaggtcgctattgacccttcgtcaaacggtgcttacaagctggtaaccccacggctatttaccatgaaggactgcgtctcgttacacatgagtctgacattcagggagctatcctacacttagagcgaatcgccccaaggaacgccgctgcaacccttgcatgcgcaattctttacatatgtgctggtaatgctcacatgggtggtgtctaccttcggctcttcggaagcaaccattatgctttggaatcggaggaggcacgtgacatttgtgaggaggtgctagaagatataaagaaatatgctaatactttaaaatacacatacgctaacagtttttcgtacccggaatgtggtgacgtaagcactcctgaatgcgcggagatgtgttacatgagatcgagactcttcaataatctttgataatatgtttttatggtcaattatcctaaaacaccaatcatgtcattgtagtattttacgtgtcaatccaaatgggtgtgatacaaacagatgagatgtgatcagaagtcactaagtcaagccaagcaataacagttttggggtttctaacattcctaagcgaacatgcagaaaacagaagcaataacagaattactaaaatcacttgaccacaataggctgattccagaagtagggtgtggtcgagtatactggtcgagtaaccgacagaaaacaagacaatcttactcgactgcacattctgttgccagacactgggtgtggtcgagtgagttggtcgagtgattgtaaaaactaagaaacaggcaatgagaacgattaagcgataacgataaaacagagaaataagatagaagagaaattcctaaggatggggtaatcgaatagagtggtatcctagcctattcgaatggttaacaagcgcaatcaagttatccatagacgacaggttcaacaagtactctatcccatccttaagaactctatgtcactactcagacaacatgctcaaagacataaacgcagataaatgataatattgcataagtaaagagataaagagtagagaaacaagatgccagatgaaatcaaatgcggaatctaaataacttggaaaaatctggaattacaggtttcaaaagcaaaagcggcgcagctagagtaaaacataaaataaaactgaagcaaaaactcaatgtcgactagatgtcccaggacaaaaccctcagacacctatttatacaaaatgaaataaaatgatagtagacggtccagtaacctaatcgcccggcccatagagtgataatgggccgagatgggcttcgtgatccgatggagctccaggctgtttccaaacacttcttcttctcctattttcttctttgttctcagcttgtctggttaagtgcgaatttgagttaactctgaagatgtgatcgagtgcttgatcgagtgatggtgatgattggtgaaggataacgtggtagagtgaatgaccgagtggtggtcaggtggcgtggccgagtggtggtcaggtggatcgagtggagtcatcgagtggcttagatgctgttactcgagcaggggatcgagtagatgggaagaatggctccaatgtcactcgaccagggggtcgagtaatggtgctggatgtactcgacctgtgggtcgagtatgtcctctagttctggctcgcttcttccagtttgctcgacaacagctccaaatcacctgaaaacaactcagaaatgcaatatgtatgcaaagctatcctaatcatgcaaagtatgcaagaatgatgagaaatgatatgaaacagtgatgaataatatgaaactagactcaaaacgatgatgaatgaacactgagaacatgcaaattatagacatatcatttggtatagttaaatgaattttttttctaattttgttacgatttaacatatttattttttactaaattttatataattttcaagtaaaaaatcatatttataatgtttgtattataaacggcttaaccgcctaaaatcgcacgatcc

SEQ ID NO: 8005 - DNA, 1570 bp, Arabidopsis thaliana landsberg
  unsure (1)..(1570): unsure at all n locations
ttatatcatctggggtcttaaatcgttctaatgcaattattccataaaatttgtacatcattgatctttcaacttctatttttttgccttcataatttcttttttataatgaatacaagtattaaacattgtttcctctcattttgcttaactatagataaaagataggataaaatctcattaggaataagaaaaacacagaacataattaagattataaataaaagccaactaactcaaaattctacagttattgctacaccacataaagggtttnnnnnnnnnnnnnnnnnnnnnntgatcatcccaaacccgacccggaatcacaacgtatccatttgggtcaccacgatggggctccgaaccacgtgtttcccaccatcaaaccacgtgactgacccaaacacagcacctgtttctcccaacacaacattccttgtattaaccgtcactgtaaccgcatagctccgtctcttaacggccgaagtaaacacaagcctcggcggtttcactgtcaccgtcactcctctcggcgactctatcctcgcccgataaaccgtctcagcctgcccgacattcgtcgccgtccttataacagttttactcaccaatcctcttctattagtaggaaacaccgccgtgatcgaaggataattcaaattcccgggagacggtttcctggtcgtcggacatctcaccggtgttcttgttatcacttggatcgtctttggtccgtacccgatggagcaaagaaacgtaatgtaatcatcattagttatatcggagacaagacccggattcatagcccgggccaaatttaaatgacccgacccgtaatcataaggcgtagccgatttcccggtggattcatcgatcaacgagcgggtagagttatcgacgaggttagtcgttgtcatcattgccgatcgtatcacggcagggctccaatctggatgagcggatttgagaagcgccgccgcaccactaacgtgaggacatgccattgaagtaccggagagaatgttgaattccgttttccttggatctgacggcaaacctgtaggtccaacagcgtctgtccatgcggcgaggatgttatctccgggagcaatcaaatccggtttaagaatctccgggcttaaaccgtttggtcctctaccggagaaagaagcaataaccggagccggtttaatcccaactatagttcctctgaaatcaattgaagcaattggattcggatgtgaagaagcatatgctttgattctatctccttcgtttgatccaacggcacaggctggaataagatgagcatctccgactaatccttcaccgttagatgctccattagcgagaatcattccgacaccacctgctttcttcacaaccaatcctttggctacgcgtggactgcttcctctatcgcagattactattttacccctcacttgcttcggatcaagcgtgttctccatacatagagacgctgatgacattcccgatttaccgggataaaccaccggaaacatacgaccgtttaaaggtactccagcgtaaagagacactcctctga

SEQ ID NO: 8006 - DNA, 491 bp, Arabidopsis thaliana landsberg
atgcaatccaaactgatcccatccactctttatcgcaatcgcatcatcctctgtgctaatgtagcagtcctcaattaccatatcctcgcacgaatctgtttacgaaaataaacaagatggtacaaaaggttttaaatgagcacagaataaccggaaaacagatataagcggtaaatgaacatacctggatcaattccatcagtgtttggtgctccggttacaggagccaagatggtgacattccttattgttacatttttgcagtcatatggatgcagagtccagaacggtgagtcacgcattgtaatgttagcgataactatgtcactcgaccacataatttgaactaaaggccctctcgtatagttgagaagtcttctttgatgcttcttccaccacgattgtccttgcccgtttattgttccattatgacctgttccttataccccttagttactaacacggttaccacaatttcacaaacatgaact

SEQ ID NO: 8007 - DNA, 545 bp, Arabidopsis thaliana landsberg
  unsure (1)..(545): unsure at all n locations
tgtacgcttataaagacattttaggtttgttcagctgttttacggattcgcntttgagatatcgatcttacgaagaagcaaaaatggcggtcccgttgcttaccaagaaggttgtgaagaagaggtctgctaagttcatcagaccccagagtgaccgtagaatcaccgtcaaggtaaaccctttttctcatttgatttcacagagttttaggattttagtagatcaatctctgggttttgttcctttaagtttttattggtagctgtatcttaaagtttgtagctttaggatgcaatatggtggttgaattaaacatctgacattagtctctatctatgaagatattacatgaaaatgatgattttagcttgcctgagttctctcatgaacaatattcattcgattccagattaggttgagtttgattccagattagtctcttatgtcgttttcagaagaatctgagctttttgacatgtttgtggtgatttggtttgatttcgtatgtactttgtgggtgggaatattcangacagctggagga

SEQ ID NO: 8008 - DNA, 590 bp, Arabidopsis thaliana landsberg
  unsure (1)..(590): unsure at all n locations
caaatgcaaaactataaacacaagtaatagcctcataggtaaatttgagtatacctgtgttagcagaaattctgaaagtagctggctcgcctctagctataggataaggagttatatcaactccttgtacttttacttcatactcttcgttattatctgcaaccaaacaatcaaaagttccccacaaatcgaattcattataacgcaacaagaggtcaaaatcaacattggatctttctatctaaatcttatcgcaaaattatagctaactcaatcaaaatactacaaggaaacaattggaaatcatgaatcaagttaggctttttgggaatcgaaagacgaaacataccgcagtagtgaacatcggtggctgcaacaatcgttgaaaccaagagaaaataagagatagcgagagatgagaatcccgtgaacttagacatgattgatgataattagattttctatcgaagaagcaaaagctgcgaattctcagatgatgatgattgacgacgaggaggagaggagagactaaacatgcatgagacanagacagaaatgcggaatcgggattctcaaatcgcaagaaatgt

SEQ ID NO: 8009 - DNA, 681 bp, Arabidopsis thaliana landsberg
gaggaagagacgaagattcctttcgacgcggcgccgtacgagcctatagcgattggatcgaggtaatacggtgaagtaatcccgtctccaccaccgattgagatcgatataacgtcgacaccgtctctaacagcggcatcaaaggcggcgagaatatcggaatcgagacaaccggaatctttccaacagactttgtaggcggcgatacgagcttttggagcaacacctttggctacaccggaggcgtaaccggacatactcgctttaaaagcgtgacggccagcggcggttgaggaagtgtgagtaccgtgtccatcggcgtcacgaggagatagaaactcaacggttttgttgattcctccgattacagcggcttgttgtcccttagcgaagaatcttgctccgataattttacggttacagttccgaggactgaatctggctccggattcgcaaacgcctctccacctttttggaattggaccgaggttaagatctgagaaactcctccgctccggccaaattccggtgtcaaaaacgccaatgattacgtctgatccgtaatcagattctgaccatagtcctttttggttttgtaaaccaagaaattgaggagaacgtgtggtgtgaagctctcgacgtcggtcttcgaaaacagcaagaactgctgggtggttacgg

SEQ ID NO: 8010 - DNA, 589 bp, Arabidopsis thaliana landsberg
  unsure (1)..(589): unsure at all n locations
atgcgagatagaaaagaagggcaactgttataacttatacataacctgtgttgttgtacattctagttacgttagttgattttttctgaaatgttcccgcaagacaaatgctgcctccattggtaactcttaacatgttcatatatgtgtcagtgtgtgtgtgtgatcaagtcatgacataccttgtgaatcttaactctttcaaaagattttctcaatgattcttccaaatgctccaaatgcctaaaaactgaaaagtacacaacagaagaagacgcaataggtatccatagtaagttaagacggttgaaacgcaaatgtatagaaaaaaatgataattaaaaccgaaaagttccacctcagtctcctatgacactccataacctgaacaagagaaaatgctacttggttagtcagaccctgttcatgaaatgtcaatacatacttttagctatcaaaagtcaagagcttagtagtctccaaaagaatcatgatgatccatcatccttacctcaatagtttgattccttcacgaaaacanattaaggaccacagttcaagtgtttccaaacgggacaanatagttact

SEQ ID NO: 8011 - DNA, 1961 bp, Arabidopsis thaliana landsberg
tcaaattagaatgaagaaaagcggtgcgatgtcttgaccatggttaaagggtacctaactggactttctatctaatccatctaaccctagttaaaatcctccactatataaattacattctcatgcactgtcccaatcatcaccaactgtttcttctcttatgctctcactagctaactaaaaatccataatttcttcttcaagaaaatgactattgatatgtatctttccttcgcttctcgttctggatcttctccatttccaagtctcgagctttgtctcagcattttcctcttcatctcccttttcgttttctggttgactccaggtggctttgcttgggcactctacaaagctcgtttccatacccgacctgagtccaaaaccggacctgccattcccggcccgtctggtctccccatctttggcctcctcttggcttttgtcaacaacgccttaacacacagaatcctcgccaatattgctgacacttgcaaagcaaaagctctcatggcgttctccgtagggtcaacccggtttgttataaccagcgaaccagagaccgcgaaagagcttctaaacagctctgcttttgcagaccggccagtgaaagagtctgcttacgagctgctctttgatagagccatggggtttgctctctttggtgattactggagagagttgaggagaatctcttctacccatctcttcagccctaagaggatcttcagttctggcgagtcccgccgaaaaatcgggcaaaacatggtaggagagatcaagaacgcaatggagtgttatggagaagtgcatataaaaaagatcttgcatttcggatcactcaacaacgtgatgtctagcgttttcggtaaaacatacaacttcaacgaaggtattgtctactcgaaagagagcaatgagttggagcatttggtgtctgaaggctatgagctgctcggaatcttcaactggagtgatcatttccctggaatgagatggttagatttacaaggtgtgaggagaagatgtcgtagtttggtcggtagagtgaatgtgttcgtcggtaagataatcaatgaccacaaatcaaagaggtcacttcgtgataatcctgaagagagcacttatgatgatgactttgtagatgtcttacttggcatgcacggcaacagcaaactttctgactccgatatgatcgcagtcctttgggtaaccacaagtacttacatgtatacacgtgggttaaggagtaaataagtaaataacataatttaaacatttttttgttgttgtataggaaatgatttttaggggaacagacacggtggcgattctcttggaatggatccttgcgaggatggttcttcaccctgacattcaagccaaggcgcaggccgagatcgattgtatcgtgggtgactcgggacgtcaagtcacagactcagacctccccaagctcccatacgttcgtgccattgtcaaggaaaccctaaggatgcacccacctggtcctctcctctcatgggctcgtctctccattcacgatactcagatcgggactcactttatacccgcaggaaccactgcgatggttaacatgtgggctataacccacgatgaaaaggtctggccggaagctcatgagtataaaccagagaggtttcttggtgcgcaagaaagtaataacttccccatcatgggatctgatctgaggcttgctcccttcggtgctggacgtagggtctgtcccggcaagtcaatgggtctagccaccgtggagctatggctagctcagttgctaggaagctataagtgggtctcatgtggtgaagtggatttgagtgagactttgaagctatctttggagatgaagaacactcttgtctgcaaggcaatccctaggggttaagtatggattaacagactatcaaattatgcaactttgtttatctctctgggtt

SEQ ID NO: 8012 - DNA, 1910 bp, Arabidopsis thaliana landsberg
cgttttcttcaagtatcttgtttctatacagaattttactagtttaacgtgacatactgggataattttagtgacaaaatttgatatttatttttttaaatgatactatctcctaataatttgtttgccgaaatggtataaaataatactaatttttaaaaaagtttgagaagaaaatagaggtcccgatagaagtacagctcaaagtattgcagttagggagacaacgtgaccaacctcacggtcgacatgtggcggcagtcgacattaggtatcagacgtctacaacattacgttgctttcttattattattatgttttcatttctttatgtgtgtaaattgaattttattccccataccaaaaacatcattttaaacatgatagttacatatatagaagatttttataatagagtagaactgaacataaaaatagatttcactcttgaattagtttgttggtctaagtacagatggcttattattttccgttttgtgaaaataatgtataatcctgtataaaataaagtttcgagtaattttatatgacttagcgaatgaatacacaagctaaatatattacccttcgttcgttgatatattggcaattttgagggaaacaaataaatgacgagactatttaatggccggatacattttgaaatgttacccaagttactttctcgacattttaggcggatgatccattgactaattatcctcttaattattcgaacaataaaaaaaactacactatccaaaacgtgtggtaagaagatatttatccacaatgttccgtaaatatctcatttatttacattttgaaacctatcatcaaactaagtaaccaaccctgaaatatttagtcaattatcttacaaaagaaactcaacaaatcccctatcattgtgacaaaacccttgatttcactctctatatatacttaatgatcttcctaaaacagtcacaacgaaataagcatggcaaaagcaatcgctttaactgtctttttgttcttattcttgtcattaatatctctaaccctagcaacagattatccactattcacaaagtctcgatggatcgtaaacaacaagggccaccgcgtgaagctagcttgcgcgaactggccttcgcacctcaagccagtggtagcagaggggctgagcagccagccaatggattcaatatcgaaaaagataaaagacatgggattcaattgtgttaggctcacttggccacttgaattaatgattaatgacactttagcctttaatgttaccgtgaaacaatcatttgagagatatggattggatcatgagcttcaagggatttacactcacaatccatacattgtcaatactcctctcatcaatgtccttcaggtataaatacataattaatcatgtgattctagtattacataatttctacaactcaaacaaaaactattcttttcatgttcaattaaaaatccatggtttttaaataagtcatttgtgactgaaaaatatgactaaaacatgttttatcttatattgcaataatgattatttttccatttcttttcagatctgatcatcgttgtaatgaaaaaaatatatttcacatgcttcttgtttttactatatgatatcttctaacgcaaggcaacatgtttgtgtaggctgtggtgtatagtcttgggaggcatgatgtgatggtgatacttgacaaccacatgaccgtaccggggtggtgttgtagcaacgatgacccggacgcgttctttggcgacccaaaattcaacccggatctatggatgttgggtcttaagaagatggccacaatatttatgaacgtgaaaaacgttgttggtatgagcctgaggaatgaacttaaaggctacaatcatacatcaaaagattg

SEQ ID NO: 8013 - DNA, 677 bp, Arabidopsis thaliana landsberg
atgaaatgtaaatcaaacctaaaacaagagttgatgtttaaaatcggtgttcgtgatatataaaactgcagagaaacatctattgttttagtcttttaggtatagacttctgttaaaaatctttaactaaagtcttatcctgttttgaaaaaataatagcctagacgaaaaaacaaactataatcaatgtacagagcagaatgtaaaacattgtagtctgaaaacagagtactataccataagaaacaccatgaaaatcaaattacataaaacaaataaaagcaattagtttgctgccagtctaacacatgttgactaatggttctgacaaatgttctgtaaacaactccttgaacacaacattcttggtttcttcttgatcaggtttcccatctttatctgtgataagaactttcaaaccagctcttgacttcactttgtccatgaaataacaattgtcttggtagatatataccaactttggaaagtgtttgcctttgactttcatctatagtcatggcgaatgcaagtttcacaggaaactgcctacgccgcattttgataggaaattttgcttccctaaggtctgagggtatcctagggatcaagactttctcaccatgattattacctgttataatcatagcctcaagcacaaaagtttcaacccgagtaat

SEQ ID NO: 8014 - DNA, 1256 bp, Arabidopsis thaliana landsberg
acaataatgcttgctatgtagaatccattccaacacgcataccaccggaatcatgctcaatttcgaaatctaaagtgaaaatgaataagcaaaatcaaaacaacaatctttcaatcgaataaccgaaagagcaaatctccaagacaagttacctgatagaagccaacagagttgagcataagactaaagttcatagcagcgatagagatattagcaacaattgagaaccagagaagctcccaaagaggaacatgcttagaagctgatagtcccgttgcgtttgacaccataccaacaagagcagtgaatgcaaagtgaaatcccgttaacgttgtagctgtggaatatataaacaaagaaatcgtcagattcatgaagtgtgtaagctaatgggagatagatagatcagagtcagagagagagaggcataccaaagccaaaaccgaaaccagaggaagacatgagctgtttattagccatgatgattccaacggagctgattacattcatagcccatgcaccgacatcagacaccgccgatttcttctcgctctccggtttctccatttggatttgagaaaatggaacaccgacactatcagatctgaatctcgtgcaagcgaaaacgagatctgagaaatctcgattcgcttgcagattttgacagaatcaaacactgaaagagatgagatctggagaaaagtcgattcacgccgttcgtggaatcagcgaagaaagccaaaaagcgaaaaacacagacacacactcacgtatctctctctgtctctgctacttatgcttcactggttcttcactcgacgtagctgaatatattatcacaagcaagcttcttctcccaccattgatgctttccttggagttgttataaattcttttttaattctctgagatttcgaaaataatattatatatattaatggaatcattttaagtattaatttcattcattgacgcgtgtcgtttaccttatttgaccttcttctttcttcttttggtccacttgtttgttatttcaatatgagttctgtatagggatagttttgtcttttcgtgccgctggtaacgtcgagcttttagttttcaaattaaattttaacttgcgagattattttattaaacgtttacttaagtgcttaaattaagccacagggaactgattacagcgaattgttaacggtaatttataacggagtacgtacttactacttaatttcaaactatatatttaatttaga

SEQ ID NO: 8015 - DNA, 2260 bp, Arabidopsis thaliana landsberg
gttatcaaaacgcctgcgaagagaggggaaatgtgaaacaagttgcaaacagttcacttctctaaagagaaattctgcagagtaccttgagaaaaatgggagagaagaatgcagtaaggaatggtcttttctgctttttctgttcatcttcaatctacaacatcagaaatatattataaaaaccttcgagtacactcaagcagtcttcaatcttttaagatctagttccataccttactgtttttcgattgatcattagtcttcttcaaatcagaatcctacaacattgaataagtgtcaacaccaaaagcattgctctaaacatgataaaaaagatttacaagaagagaaagtaccaaccagttctgcttcaacttctgccaattcttcagaacctctgcatatatatataacagattggatgagaaaatgctacctgaaattatttggaaataactagtgttccacaaagtcatctaaaatctcttaccctccttctttaaaaccatcccacaaagaccataacccaaagccaaagaacaagaatgttgttatatgatgagtccatttccgagagatctgtaagtgtggtttaaatcatcatcttagttgcaagttcatagagatttcatacactacacgtacaagcattttataattgtcataccagatttggagcagcccaaccaagtgtagcagataatatagtcatgacctaaaagtataagcaagacataaacctttacaaatcttgaagagttcagtgaactacactacacagttccattaagacattaaacaaaaacttacaatcaaagctgataaacaaccagctaatacaagcctcctaggataccgcatcgccaaaatctagttacagagtaacaatttagcatattagcaccaagaaaacatataccgaagctgaggagataaatagttagctcaacaataagaagctttagtaacaaaaagtcaacagagttggatcaaagaacataaccatttcagcattaactagaaacattggctccaaaattaacaaagaaacgtatattgaattatgaatgttgctaaagctttaagctttgaggattttagaatattgatctcgccattaaaagtatactctttttaactccaaatatgaagaggaagaagatgattaagattcacttacagcagcagcgaagaacgttttgtcaccaatctcggagaggaaagtcatggcgagtgatttagtaaaacgcctaaagaaacccatcaattagcttcggttccaaaagttacaaacttcgaattttcagagaacagattaaacttccaactggatcatacgtacctgcaaaagtgaccccatggcttccgagttcacggcggagcgatctgtttccggcgagagtcgcgtaagagaaggtgaatgttttttcttttgttgattcttgggatttgtttggtgggagtgtggagagcatatggaaaaatagattctcattggttagatcttgccacgtggaagaatatgattcgaagattttgttatgtaggacccagggaaccaagctttgacagttgacttgagtcatagagagtgttgtgttcatttattattgttccattgttgctctattaccaactttaggagacaagaagaattctataccacacaattcgtatttttgagagttgagacatcacatttcttcaaagacaaaggtacaaaggaaccaacatgagttatgttatggttttgttacacaaagcaggacaatataagaatttatgattaacaatggccacatagaagaggattacctaagtagcttcgagtattgaaagtgttaaactgttttggccaaacaaacacatatgaaaaaaaaagtacctcaaagttacatgaaacagtttatatcgagctttcttctagactcatagttaaacagttattaaccagtgagaactacatgatcttgtttatttcatatagtaaactttcgtacaagtatatcttattatctgacagagttataaaaagtaagatctacagaaatgttgttgggaatagtcccggtaagaccttttgcacctactgaatccaaagctctaagaccaagtaaattttgtgttggcttataagtaatggctaatagtctctatgctcgcacagctaaatgattaaaactgtgtaacaacaacaacaacattgctctctttattcctccacatgtcaaatcatcatcgatagtaaccttaaaagaaa

SEQ ID NO: 8016 - DNA, 1436 bp, Arabidopsis thaliana landsberg
ggagaagtcacttcccatatcccaaaaggaaaacaactacaagagataagtcacttcccatatagttcatggccgttgttggtgaccaaaacaaacaagatttaacattttcatctcccacaatggtttttacccaaatcaaactttggcttttgtgtgtcaaacattttttcttaactaaaaagattaaacagaatcaaatattatgtttttgtgttcttagccaatctagaaaaaatctagctatgccacttttggatgattgaatattcattcacgggatgtcttacgaatacagtttgaacttattcggttatcttcctgtaaactatcaatcaaagctgatatattaccttttgttgtttgtttctacgttggtttttctcatacctttagtttttcttttatgaacgttgagatactatcgaaactcaaatgtaaatacaactttttaattggaatgacgatgtttagaattatgagatacgaaaggaatctcactcatacataggacaaataggcatgttaaataataaacacagactatgaacatagtcgtcttttactagcgatggataaacgaagattgagtatacttcaaacaaaaatcacaagtttgtattattcagcaaaaacaagtcaatcttgctctaacatgccggaaaatattaattaaaagaaaaaaagaacaagtgaagatcatcattcagatccagactcttgactgttgtgcttttattaatcaaccgatgagtaacttattctcttccaggaagctgtaggttggtacttccaggttgtatggtgcaggacctttcctaattcttccagatatatcgtaatgtgatccgtgacacggacaaaaccaaccaccataatcaccagcattaggcaaggggatgcaacccaaatgagtgcacactccaacaaccactaaccattctggattcttgaccctaaccgagtcttcttgtgggtccctcagggatccaacatccacactgttggccagcttgatgtcatcttctgttcttcgcctgatgaagacgggctttccacgccacttgactgtcacggtagttcctggttctatgctccctaggtcaacctcgagggatgcaagggcaaggacatctttacttgcagacatgctcacaataagcttcaaaacaagcaggcggaggacagaggcataaacaaacctcccacccgacaagacaaaataggcgaatgcacgcttgctagggtcaccaggtgggtaacgctcatggttatggtcatcatagacaatctttgagttaggcgttttgacagcttcgactgtggctgggacttctgaaccaaaacctatctcatttccttgagcaaggacttgagaagagaagcctgaaaatagcatgaaacattaatatttcacatcaaaggcaaactttata

SEQ ID NO: 8017 - DNA, 2306 bp, Arabidopsis thaliana landsberg
acctcaacctctgctcgcaatagatccaccaaaacttccttactccggtgatgaaaaccttaaagaaaaggctacgggccatcactaagctttacacctctaatcctagatctgatttgatttttctagaagaacaatcacaccgggaggaggagaacttcctcttggaccgtcatatgcgccatgttcggtggagtcgtcgacggcgcacagcgattctttcttcttgactgaaaaatcatggctttccaatctcactcgactagaaaaaatagtgagtcttctctcccaatatatcggtttattgagatccgctcttaagatcgcccagtcaagatctcttctctcgtatcttgtgacgcctccatctccgatcatacgcctcaagcaatgacaagtcaggatcgtgagcagccgcttagtccgtcttaacagcgccaaccataaggcaaaacactaattgtcaagatgggcctcttctttgtgataggccttccttgttttggcccactaagctatctcctacggcctaaaagtatttgtacgtttatcatctttgtaactactggacccaggtatgtcccaattatatttttgttaagccctaatatattgatgtctttttcccctattgagaatggtagaagacgccaccctcacatcggatcaaaaccaatagttaggattgacaaataccatcctttaatcttgatggaatataagtttagtgttttagagctcgccactgaacccttttatccctataataaacctttgcaaccatactcttcaatagagagaactattattagaactcgacctcttttcgtagaaaccgtgttggttcctaatcttctttttagacgttacgtgcatagagtcgatatcacccaaggtcaaagaatttatattaacgtcactagccctttatatcaacgtcactatctttgttgtatccaaccataaggctgatgtttacttaatctttgtacttgctatgacttgaatgattgaaatatgatttgtccaaaaaagaaaaatgtctcgacaggcaagttatgtttttagtatcgacatgtgaacttatgttacaaaaccatagttatactctatgtgttcgatcaagtttgatgttttagattttgcacataatttaagattcaaaagtttttttatttatttaattaaaatatatgaatattgaaatccaaggtaacatgttcgttacttacacatgcaacaaaagtgagagttagaccatctccaatgtaagaccatctcaaatgcatatttctatttttttcttctattttagagaaaatagagttgattttactctattgtatttctctaaaatagagttttctctaaaattgaggaaaaaaatagagattactttatatatagagattattctatatatagagtaaaaagtgagattcctctatttgtttccgatattttagagtaaactctattttagaggcatacattggagcaaaatatttctaaaatagagtatgatttgcattggagatgctttaagcctcaatttttttctctctaaaatagagtatgatttctctccaatgtatcccttttttttctctaaaatagagtatgatttctctccaatgtatccctttatatgttactctaaaatagaggtaatgtaacaaaagatataattactcaatatatagaacaatcctatcatttattctatttaaaaataacatatagagtagggttagagagaatgtacttgaaaacagacatttagaagaaaaattcgagtggcgttgaagatgctcttacacattcaacaaattctctattatagcaccatagtcgtttcacattcctttgtcaccctctttttcattttaatttccattttccaaataaaatttattcactcaaaaatgattgaaatttttcaacttggagccacaattatattagtaaaaaaaaacagactggagccaaaaccagcaactatatttcactaatcttcaatttaaataagcgtaggtttataccatttagccatattcaacaatttgtttgggcgttccactcaaccaagaacaagaagacttttctttcataaactcaggtatttttatttatttattttagtattatgttgcattttgtaatagtgatttactaatgttttcaatttatttgttagataatgcatatatatctaatttttaggaacatcaagtagcaatttaatttgaattaatgacttatctatttatcatgagtttatgagttcacgaagagtaaaaatgatc

SEQ ID NO: 8018 - DNA, 2616 bp, Arabidopsis thaliana landsberg
tcaacaaagtgaaaaatgggttgaagttgaagtaagatcttctcaactatatttagtcttcaatagttgatggtcattgaaatatgatatcttaatttgcagtatgtcttcactaacacttgattagcttgtttacaatactagcattcagggaaatccaaacctatgtttttccagttcatgcaacaaaaagaaaaatagcatcatgttaccagttgttgcatcacttgcttctttggctgctataatagcaatgatcgctctgctttttgtttgtattaaaagacgctcatcaagcagaaaaggtatctgtatcaaattcatcaaaccagaaatattattgtatgcatacataattataaagtgatttctaattatttgtgtatggttctaggtccatcaccaagccaacaatcaatagaaacaataaagaaaagatatacatatgccgaagttcttgccatgacaaagaaatttgaaagggttttgggtaaaggaggatttggaatggtctatcatggttatataaatggtactgaagaagtagcggtcaagctactctctccatcatcagctcaaggctataaagagttcaaaacagaggtttctttggcacccttatgaatttttatacatttttgtaaggctaagttgacgtatattatatattgtacatatttggataggtagaacttcttctaagggtttaccacacaaatctggtaagtcttgttggatactgtgatgaaaaagatcatctggccctcatctaccagtacatggtcaatggcgatttgaaaaaacatttttcaggtaacacatgtatattctcatgcatatatcatgacagaaatgcatcgtgttgatatgtgacattcatgtctatgctaatacatgcaggtagctccatcattagctgggttgatagactaaacatagctgttgatgcagcgtcaggttcgtcattttcatttccttttaacaccacttgatcaaactttctattgttttgttaaacaccaaagaactttggagacaggtttggagtacttgcatattggttgcaaaccgctgatagttcatagagatgtaaaaagttctaacatactattggacgatcaattacaagctaagcttgcagattttgggctttctagatcttttcccattggggatgaatctcatgtgtctacacttgttgctggaacatttggataccttgatcatgagtaagaattttagctctttctgaaaactatcttctctaccggttaaaacaaaagaatcataatcatttcgtcttgcagatactaccaaactaataggttgtctgagaagagtgatgtctacagttttggtgttgtactgctagaaattattacaaacaaaccggtgatcgatcataaccgcgacatgcctcacatagcagaatgggtgaaacttatgcttactagaggagacattagcaatattatggatcctaaacttcaaggggtctatgactctggttctgcatggaaagctcttgaattagcaatgacatgtgtgaatccttcttccttgaaaagacccaacatgtcccatgttgttcatgagctgaaggagtgtctggtatctgaaaacaacaggacaagagacatagacacatcgagatccatggacattaacttaagctttggcacagatgtgaaccccaaggcacgttagtcttttactctttactttgcagcattcataacatgcagatatgcgaacgaacttatcattatgttgatgaatcctcatgttacaaagatcaaaattaaatgtttgtcgtagtgtaatgagaggtgaactgtatttaaacagaattcttacattaagagagacaaaaactgtacatccagattccattctcaggacatgatataggaacttcatgtcctgcaaatgttttaccaagaacactgaacacagacccaggacgtgtttaaccctattcaaacatacagtggcgaggctgatgggcgaggataagcaacaactgtactgccaacagcagtctgtcgagcaaaacctgcattcacttttttgctgacaacactgtcacttctcctacgcattcttctatctgttttatccatatttcctcctatagcagcatttaaagactgaatgtgttcgaggtgcgaaacaacctcgctcatgtttggtctcagcttaatctctgtggtgagacatctcagagacagagtagccactttacatgcttcttccatagagtactggtcctgaagacgattatcaatgactcggaatatctttcttttgtttacgaggtatggtttagcccactccacaaggttcctctctccagatgggcggttcttgtccactgctcgacgaccagacaacagctccagaaggacaaccccgaagctatagacatcactctttgttgttagatgacctaaggaaaatgtaaagtgatcattcatatgaagaagccaattccagaaaacaaagatttgaccaaaaaggatccgacacttaccggttgcaaggtattcaggagctgcatatccgtgtgtacccatgactcgtgtagagacatgacttttatcacctattggccca

SEQ ID NO: 8019 - DNA, 883 bp, Arabidopsis thaliana landsberg
agtttgaatgtaaaatgaacaaaacacacatgttctataaattcgtagctaaagagatgcattaaaccctagatctataatcttctcttaaggatttacagctccaatccaaattaataaataaaaactaaagagattcataccccttcttcatcgtcctcgtcctcgtcgtcgtcatcatcatcatcatcatcatcgtcttcattttctgcttcgtcgtcttcctcttctacattagcctctccttcaccgtcgccgccggtaacttcttcacctcctccgtctttggcttccttcacttcactgtcgtcgtcgctcagaacctgaaccaaatgtttctccttgaattccttatcatcttcaacatgcgtcatcttcttcaaacaaaaagactttcagagattttcgtgtttcttagaggagagagaggttttagcagcagtgaagcttcgaaccagctatagaacggtacaactctcgaaatccaatctcagccgttcaatctgaactatactaggattgatgagatggcatcacatcgaacggttcatattagagaataacgtggttttgatgaaaaataagaatataaatgaaaaaggtttcagttcacgaataacaaattgggccttaaacttagttttatgggctacaagtgaggcctaatgtccatgtctttttattttaaatactataaaattttacattttcatccaaaaattaaaacagtatgaagttataagaataaaaacattttcattacgttacataccgttttttattcacatattaaattttaaaaattataaataactaatttcaaaaatttaaattcagaacggttttatttttcttcccactattatttatttcgccctttttt

SEQ ID NO: 8020 - DNA, 992 bp, Arabidopsis thaliana landsberg
cgcgttttgtgggatcgtggctttcattatattggtgtgtccatttttcttttaacgccttgtgaatgttctttaacgctggaaatgttgtcttcaagaacgatccgttgtatgcagacaaaaacggctcgttccccacggctacgtacctagtgaatgaattctcggtcaaatatacacccaaaacagcgacttttaccggtttgtaggtatttagatgaatataatgtcaaatttattattattattaaattttaacaagaaactaagaatattaaaaattaacaggaaaaaaattgtctgaataaatgaaatcatctcattggtgcgattttgttcaaattggaaataaatagccaaccaaaatcgatctatttatcaaatcggtttatcatgtagtcgatcagatagaattatggtaaaaacatgattacaaaaaaatgaaaaagttttgaaggttacttgatgtcgacgccacccttacgaatatactgggtcacgttttctttaacccaatctttagcattatcgtaatcatctgcgagatactcaagaaggttattagggattccaaccataacctccatgcccgtaccagccaaagcattcatcgtccatgaatcagcgtcaaaaagcttcactttattgatcttattgtccttaagcatctgaacaacaatgttgggattcaacggatgtgatgcgatattgccccaattcacaccgaagcctccgaccaaactagccagggtcaaaacggtcattataaccgtcccgacgttaacgagcatcgctgctcttccggccatatatattgagaaggcgacgatggatgataattagggtttgtttgatctcgaagatgtgtttttgttttcttttcttttgtctggttgatgttttttcttcttccagtcggtaaaattctttttcgtgtcttgggtggtcgttgtaataggaatgtttttaggttgttagtgaaagattaatta

SEQ ID NO: 8021 - DNA, 2383 bp, Arabidopsis thaliana landsberg
  unsure (1)..(2383): unsure at all n locations
agtatataaagagacaatagagtcatcaagagaatcatcctgtttcctgatttttcctaggttttgttcctcagttcccccaggtattaaggtcctcttccttcgacgatacacaagagaagtcagagcctttcccgataccttatgcataacagatttctctgaacaactttcttgatgttttggatgttttgattcatcaagattcatagtatcagtgactggaacatttttaagaaagcttacttgagactgttcgggaactttgtggatnnnnnnnnnnnnnnnnnnnnnnnnnnnnnnnnnnnnnnnnnnnnatgggtcttgatactcggatacgttcagtagactagtttcaacagaagagctgaacgaactttccaccaacatgttttcctgagaaaccaaaaaagtatctgaaagcacattacttctctaagtaccaatgaatctgggggtcaacttcttcatgtagtccctctggaatggtaatgctcatatccttctgatcacctaaatgtcgaaagcaaaacatggaacagagtcaaaatgcaagaaaaccaagtccatgagtaccataacgaagaaacagtaagttatcttctgatcactaatttggatcaatttcacccattgttttaaactaactccagtaacttatcaggcgccccaaaggttgctctcctgattcgtgattgaataattttgtggtactgcattaagcggacacatactgttctcatcatctccaagtctcactgagaaaaacaaatcggattcctaactagtgataaaatgcaaactttccattcagaaaaacctttaatcctcagtaagttagtaatccaggatgttcttggatgctattcagatccaaattcagcacccaagtttagaaaactacaaaaattcggatctaaagtgactcgaatctggaaacccatgcgcccttcaacctagattcaagctacatatctatatcatcttaaatccagattgcacaaaacgattgtgaagtaagcaaatttcctcttcgtattctataattcaagtctcaatctctgagaaatcttaatctttcagtcgtttaaagcaccatgcacccttcaacctagattcaagctagacatatctatagcatcttaaatccaggttgcataaaacaattgtgaagtaagtaaatttctcttcctatgctaaaattcaagtcttaatctcaacaatctctgaacaaattttacctttctgagaaattcacaacaaaacagacttccgttcttatgaaaaccctagaacacaatcaagccnnnnnnnnnnnnnnnnnnnnnnnnnnnnnnagtaattgcagaaaccttcatatacctcacaaagcacagccaaatccagtacaaaacaacaaacaatacaatgaacagcgatacacaaacaaacaatttcgtaacaagaagaacaatctcgcatttaccagatggactacgaagatacacaagagcaaaatcctcgtttgggcttctccaagttatggcgtttcttctaaacaagtttctcaagtttccgactcctccactgacgcaagctctctctctctcgctctatcgctctctctctctctaactcactggcaaaacaactttctttgattttcctgtggaaaaatttatatatataacttcaaaatctaatttataattaaaccgctcagattttttgttcttgtgtaaaatgggtctctttttttagtttcttgcattctgatccctgaatctgaactgtatcagtagagaagattcacagattcaatatttgttaaccaaatcacaatgaagaaccacaaaatatttggcatttttattatatattacatacataggtgttacactgttgcagaaagttcaaagctacatgtgtcaagacttagacttgtttattccaagaggatcaaacaatacaaaactatacatatgattctgcaacataacaacatttctcctagaagctcaaaagcctctgctattgagtcctcttgggagtaaaacaagaagacttgcctaaaactcaatggctagtgcctcaggtgtaaacaaagcttctccattagtgcttcaaactcgtcctcttcttgtctctttgtcttctagaagttgctttaagctcatcaaaactcagacaatgacaaagatgtgacatcttagaagttgcgaaaagcatgtgcgagactaatggcaatggtcaggaaaaatatgagagcagcgctatcacgaatttcaacatctgtttttcgcttagatcgcttgcatctaagagttaaacaagaaaaatatctgcggttgaaggaagaaaaagagacacttgcctgctgagtgaagcagtctcgtttcggaat

SEQ ID NO: 8022 - DNA, 663 bp, Arabidopsis thaliana landsberg
acatccatgtctatgtgtagtgatatcgatgcagaaccgtgtagcatcttcatagatgaactataaagagtgattatgtcagaattcatgttttgagcctaagaagagtgaaaaaaaaaggatgagtctctctgtgtacctcgttatgttctgtagtaaggcactgcaagcaacgttgagtcacatgattcccattcaaatccctaataagattaagaaatccaggtctcaaagctgatttcaccagagaaatctgcttccttgtcttgattgattccactaatctctgaacaactcgagtacttaaccacacacaaaacaaaacaaaaaacaaccctaattatattagcttgacatcaaattgattacaaagagaaatctcttacccataagcgttgagagatattcgaataagctgaccaggttctgaagtgaccatgagtatgatctgtgtcctttgttcttcattacaaacatctaatagtttctgcatcaagtaattaccaaaaggatccatcataagctcaacaacatgaggaatcacttcattgaaaatgatcatagcatctaaagcacttccatcttcaaagatcctctgtaagaatctgcaaccatgttgatctttagccattaaataaacatatcccctggaattcagatact

SEQ ID NO: 8023 - DNA, 545 bp, Arabidopsis thaliana landsberg
  unsure (1)..(545): unsure at all n locations
aatcctggttgatttttatgagaaccttctcacatacatgttggaaatttggtctttgcttttgtccttggggcagtgggtcaagaataagatttacctactaaatcgcttaatttgatattttcgtattaaccttacttttcctatatatattgaattagtctttttattttattttcccccaataaacaacattgaattagtctttacattttatgagttaaaactattcagaagaacaatggatttcgaaaatagccaacacagtgcatgtacaaaaactatactattattctaggtattgcattcgatctaaaattaaagcagacgtttacatcgaagactagttcgtgttagttgtaaatatgcttatcaaggcagattaagcaagtcttctggtaaacttaaatttgacgtagtcatagaaaacttacataaagtatgctttaattntacctacgtcatatgttgtatttctatctagacaaagatataaatctgctaagaatctaacattttttttcgggaaatgaaatatttggttg

SEQ ID NO: 8024 - DNA, 2255 bp, Arabidopsis thaliana landsberg
  unsure (1)..(2255): unsure at all n locations
catgttttcgatttttcggctgtattaaagataattattaggctttgaggccaatggaatcagattctatctacagtctaatactcgtctatatttctctttcaaatataactgttagattatccatcatcaacctctcggattagtgatttactgtatgaacataagagattgttaatatgtctgcaaaattctacttttattgaaaattgaatcgtttacacattctcgatcaaagcttaaagcagtggaactttgttctttttcaactttaaaattcaacaaaagacatcttttgattcagatctcaccatcccaaagctcttcaagtgttttataaggactcaacgtctcatgaacaaacgacgtgccttggactaacctagcctgcacagagatgattcaaaatccaaaatacaagaggttacagttaagactactcacagatacgaaatttgcagaaatgtggtttattgtttcacttacctgctctatcttggaaaacttgtcaaacatttcttttggaatagaccatcccaagacatcaaagttctctctgattcttccttcatttgtgcttttgggaagtatactatgacccatttgaagtccccatcgaagcgcggtttgtgcgggagacttcccgatttctttagcaatcatttcaataaccggactctttaaaacatcggccttcacccacgttgttccaggagatcccaatggcgaatatccctgccacaatcnnnnnnnnnnnnnnnnnnnnnnatatgacattcggactcattaaatgatttggaaatgtttagtgttttaaaacttactgagaggtggatccctttggacttgcaaaactcatgtagcttatgttgttgccatgaaggatgacattccacctggtttacagcgggaggaacacgagcagcctccacaagatctgagagtttctttgtagagaaattacttacgccaatggctcttgccttgcctgaatcaaccagtgcttccattgctttccatgtgctcggaatatcgataggcataatgttctcaggcttaaagtcaacagtacctttcttcaaccgaacaggccagtgcatcttgaaaaaaatatcaaatgaaacaaatcaaagtataagcaagcatatgtatagtttcaaatccagagatccggacaattcaggctagatattgaagaaaggaacggatcttgaaaactgttagaacttattaaaaaatcagcatttgttcaaagaagtcgtgcttacgagatacaaatcaacataatcaagctgcagatcctgaagagttctgttcaatgcgtcctgtacatccggagggtcaagatcagtcaacctgtgcttgcataatttgtagattttaataggttaagaggcttaagcaaacagggaaactgaaaatgcataaaaatgatagagatgcagaaacttcatgaacaaaataccagatttttgatgtgatgaacagcttctcacgcttcactacgccatcatcaaacaacttcttcagaactttcccaatctgcaggttaaaaaaagctttcaatttctccatcaagaaaaacaaaaagccacatttcaaatgaacttgtaaacagtctataacaaataactccattaatcctacataacttaaagctagtttaagaaaaagatacacaagacaatgtgtgcaattgtcattcctaaatgtaaattggttaaccttagtaagaattacataaaacagccaatcgagtaagaacgatcatactatatactgttctatataaaggcaaatcaagtaacgagccgtcaaaagatgaactatatgaagcaaactatggaagatacagaattcggatcggtgaattttacctcaatttcattgccatatcttgaagcacaatcaatatgctgatatccaatctgcagaaaacgaaatgattattaagttcttctgctactgaaacgaatttccaaatcaatccgtaaatcccaagatcaaccaatattgagggaaaaccaaactatgtaaggatcagaacatctaatcaaagatctctcaggatcagtcaaatgagaaaccatgagacggaaaatcacagaagaaccttcacagcggcggcgacggcgtctccaacgacgccaggagcagcttgctatgtcccgagaccaactgatgggatctttgctccggtgttgagttggaagaaccagatttcgtcagccattgtcagagctttagaagtgagc

SEQ ID NO: 8025 - DNA, 1480 bp, Arabidopsis thaliana landsberg
agttctttggcaacttcaaccatttttggaacttcccctctaagaccaatgcatctttccgagaggacaatgaaagcttccattcgacaacgctcttcttctgtaacatcacctattttctctaacatgtttgaatcaacaatctcatcaatgcattttgcaaactttcttctgttttcaaaagttgtcaagtcactccgatcataacaaagctcatgaaatctctcttctcccatcagaagcttttgcataaaaataccaaatccaaacgcatcagttttctccgagacaataccattaatcaaataattatcatccatgtaatcataatctccacctatacaaccattaccaagcttcacaaatgtttctccttgtggaatagagacacagtaggagaagttacacaacttagcaacaccatcttcatcatccaataagatatcttctaaacgcagaatcctatatacgaaaggtcttggaaacgcagtgtgaagataagctaaagcagttgcaatctcctctgctattttcaatctttgtctccatgacacaaccattttcagatctaaactagtaggtttctttgatgcacgataaaccaaaactggatgttcagattcaagacaacatccaaccaattgcatgaagtttttatgaccactaacaatcgatgagatggctatgtcacggcaaaagtttcctccgttatgctcactaaatctatatctccatttcttgatgagtaacagtttatgatgatgatgatggttattgtttttacctgaataataccaatggtatggaatctcatcgaatagttcagaaacacgattggattcgctgaaagtgtcggtggcttctaggatttgatcagcggagaatattttgatgggatttgctttgccattgcaagatttgatgatctcttctagcaatgtcccacctctctcgtgtcctcggactaatctctcccttttaattatggctcgtaaactcttcttcttccaccactccatctcaaacaacaacgaaaaaaaagtttcttttacttttgaggataaaatgaccaaagattgaatgacgagttgaagaccacacaccgtgttgaaaagttgtaacgtgaagtcaacgaaacaccattaaggagtaagacttcgttggaaaaggtttatctttcagagcagaagaagacaaaagttgttgaaaattcttcacctctttgtctgttcagctcccttactctctcttatactctcctctgtttcaagacaagcacagagaaacgttactccctcttatgttttaagtataaagacataaacgttttggaagagaagagagaaactgatttactatattgatagttcggatccttatattgatgaagccatgtttaacgcaattctgtatgagtcagagcatcagtgcatcaattcacagagcagaaaaagttcctccgtttttgctttgaagattc

SEQ ID NO: 8026 - DNA, 2867 bp, Arabidopsis thaliana landsberg
tttaatggccataatgtttcctttgcaagatgtgttagttctaagcccatgaaacatctcctgagctataagaatattatccgagattaggcgcccttccacaaaagcagattgtgtttccgaaataaggtttggcaaaaccgtttttaatctttgacaaaggatttttgaaataactttataaccaacattacaaagactaataggccgtaattcggtcattcgagtcggtcgtcccgtttttggaataagacaaatatttgtcgtatttaaccgtttatcaaacactccatcttcaagaaatgagtttaccaaaaacaccagatcctctttaacggtaccccatgctttttgaaaaaacaaagcagtcataccgtctgggcctggtgctttttccggatgcatcataaatagagccgttctaacctcaatttctgtcgcgggttttgttagaaatacatttatctgatccgttattgaaatctgaatttctgccaaaaaatcctccatcacttgaggatctgtcgttgtgaacaaattctcaaaataagacaccgctatcttttgaatatctttttcctctgcagaccaaactccattttcatcatggaggccggttattcggttcctagcacgtctctgctttgttagagcgtgaaagtatttcgaattttgatcaccttctttcatccacagactccgactcttttaatacaaatataactcttcatcccgatacgcctcttttaaccgcatgtttaaatccgttatttcttccggtgttctgagatcatcactctgagctacaactaactctgacttcaaatcctctattgtttttcgtccataaggggataatttcttccgccattgggaaatagaccgtctacaactcgtcaatttgtccacaaaattactctcccttaatccattttctaaattccacccatctgcaattgcctctaataaaccttctttaccaatccatcttttgtcaaacctaaaactttgttttccgcgtggtatcttatccgttaaagttgcaatgaccggtgaatgatcagaggccatcattgttaaatattcaatgaaagaattgcaaaaaatctcatgccaatcctcattagctaaagcccgatccaaacgacaccggatcggtttcttatcccgccatcctcgccatgataaccagtcacctaaatatggaaattccaatagaccgcaatcgttgatcattgtattaaaagggatgaaagaagacgcatgtcttaaatttccacctcttttctcatgatttccggttagctcattaaaatcgccaattaaaaaccatggtgcattacgagacacacctaaccttgttaaacgttcccaaacttgatctctttttttcggaaccggatcaccgtaaacaaacgagagatgaatttttttgcctttataaaccgcatctaaatcaattaaacgattgcttgcaaaatttattgaaacattaaaatcattattataaaaaagagctagaccaccactacaaccaatggggtcaaccgtttttaaattttttataaccaaaatgaccaacaaatttttccataaataaagaagattttttagtttcggaaagaaataaaaaatccggccgatgaagtttcaataagtcccgaagataaccgatagttgctttattccctagaccttgacatgtgcagcttgatactttcatttatcaaatgttggttttggtgccttatttccactatttactcccttgaccgtaccacggtgtgtcaagacatttcctttattcacgtgctctcccttcaggacacttctcttcaggggagacgagagaataagcatgttgcgcttctttgagcaaacaccttgaagcaacatggctcctttcaactttcgagctgcctctgtctcaccatcattgaccatatctgcaaccttagatgacccattagtcactaagactattactgaacttgcttgactccacatttgcagccaccacaggagactccgtgatcttagagggtgcaatttctccttcctctacaccgatattcattccttatgttgtctcaacttccagcccatccgcaacatgtcagcagcagcatcaacaaccagatcatccgctgaaagtagagcttttctaacttgctttttatgagtcacttctgcaaccttagtttgtttcccgtgtgacttccaaacaagctcatcttcagccaccttttgatgctttttaccacaatatccaccagccgtggaataccaaatttttttatattgagcattactacataattttttctgctttgaagttgatgcaccattgtggttaccagactgatttcagtttatgtcatctcttcgaacctttgttacattcttacccttataaccaccagcattcttacccttataaccaccagcattcttcccttcatatttaccatcgcgcatttgattttgatttactgtacctctatagctctgtacctgagatcattcttcctcttcttaacccggagccaggggctcaactcttggattaaactgcatgattgctcatcatgaaaaagactatgttatagcttgaaaacccaaacagcctctcataccttagatatatgattgtctcctctccaatacaaaatttgatctctgtttcgtagcccagatatttaaagccctccaccgttacttgaactcgaccaccatcagtgaaaactattctaactgtacccagatctgcaccaatctcctaaaatgtttgagtagtccttaacttcattggtacttcgagtacttggacccaaatggttatatctgaagggtagttggaattcacc

SEQ ID NO: 8027 - DNA, 1962 bp, Arabidopsis thaliana landsberg
cttttaatgtctcaacttcttctcaatttcggatggcgccaaaagaactagtaaactatttttcaagtttataacttatggcgtggaatataaaaaaacatgattacgcaatatagaaagtattcataaaactaataatgttttgatgggttaatatttaaaaaaatatcaactgttattgataactaaaacaacctttaaagggatactaaataatatcatttttactaacatccagatatttatttggcactcgaatcatttttaagaggtgtttaatctaatttctaaaccaacattatattttgaaaatggtatcatcatgatcctatgtccattaacatattttaacatatattttctgccaacatttttgaggttgatcaactcttaaaatagaagaaaactaaaccatggttttccatttgaataagtgtgaaaggaagcaagaaaacatagccaacgaactgataaagacacataaatatgttggtgaccggtaatttaatttttttcttttgaataatcagcacctaattcttccaacccctaaataatttagtaaaaaaattaaattcaatttactttaactataaaagggatatttccctcttcataattctctcaaacccttctctcatatatctcttaatctcataaacgttaatctcaaatttttcgtaatctcaaagcttaaacacacttaatgacgactgttcacacattctctatattattgttcttttgttcccttttctcggcttcattgattatcgccaaagtccaacaccatgattttgtcgtacgtcctcaataaaagttgcatgttcatattgactaatacactaattaaattcatcatcaagtagtaattgtcattacttatatttctgtgtgcaatcatttagatacaagagacgccggtgaagaggctgtgcaagacccgtaacgccatcaccgtcaacggaatgtttccggggcctacgctcgaagtcaacaacggcgacactcttgaagtcaaagtgcataaccgtgctcgttacaatatcaccatccattggtacattttacacatcttatcggtttacgttttgaaactttaccaatatgttacttttcttccaaaattaatagaaactttaaacaaatcaaaaataccacacaaaaaaagtgaataagctttatcaaactttctagtttttttttttaatgggtcacagtatatatatttatcacataattaagatatttcgtatatgataatttttttttgaaaaacaggcatggagtgaggcagataagaaccggatgggctgatggcccagaattcgtgacccaatgcccgatccgacccggaaagagctacacgtaccgtttcactatccaaggccaagaagggacattgtggtggcacgctcacagctcttggctccgagccactgtctacggcgcactcatcattcacccaacccctggttcctcttttcctttccctaaaccggaccgccaaaccgccctcatgctcggtatccaccataccataccggatttaaaattttccctatttgatgcacaaatttgttgaatctctaatctaattaacaaataaaaacttaaaattcaggggaatggtggaatgcaaatccggttgatgtaattaaccaagcgactcgaaccggagctgctcctaatatatccgacgcttataccatcaatggtcaaccgggtgatctctataattgctcgaccaaaggtaaacaaaaattaaaactatataatataattaagtatttgatgcattaaagtttctgaatattttgtaaaatgcagaaactgttgtagtaccgataaattcaggggaaacaagtctcctacgagtgatcaacgcagctttaaaccaaccgctatttttcactgtggctaaccacaacctcactgtagttggagccgacgcatcttacc

SEQ ID NO: 8028 - DNA, 1198 bp, Arabidopsis thaliana landsberg
cagctgtgtctatgagagatgatcagaatcaagaagagcaggctagagtaaatctatcaatgagtcctcttattgcacctctagggattccattttgttcagctagtgtcggtgggtcccctagaacgatacctgtttcaaccaacgctgagttaattagttgctatgacagtggtggattacctgatatagagatgctgaggaaaagaatggagaatattgctgtagcacagggtcttgaaggtgtttcgatggagtgtgctaagacgttgaataacatgttggatgtatatctgaagaagctgatcaattcttgctttgatttggttggagcccggtccacaaatggagatcctgggaaacaacgtataggcaagcagcagagtcaaaacaagattgtaaatggggtgtggccaactaacagtttgaaaatacaaactcctaatgggtcttctgatataagacaagatcatcattctgtgtctatgcttgattttagaactgccatggagttaaatccacgccagcttggcgaagactggccaactctccgagagagaatttcattgcggtctttcgaggaacaagactttgaggtgtgaaagacatcttgagcatgcttgttgatgttacatattgtccaaaaggggacaactaattttgaatgcaaaaagacttactgtgtagttccatgacgaaccggaaagagacgaagttatgagttctgagctgaaaagcacatcactatgactgcagcagcagactcagagcaggttagtagattattaaaatggaactaatctcaaagaaccgtataaagatacgtgttgttggttgtcatgttgtaagattagaagtaattggcaatctcaaagagttttgagctttgtgtgtaaacccgaggcaaataagggaattgggtagagagtttttggcagagatactgtgcttttaagttggtgcaaggtactattgtcaatcatgtaatagctgcagtttgctctgtatgtaacctagtctttagcattgtttagaattcatatcataataacaaatttgacatccgcttttgttttctcattacaatggaaaatttctttctctcaaagtccacaatacattgcctcattccttactttcgactagtggttgtgtcctgtctattacttatgccttggaagtagactatttgcaagtt

SEQ ID NO: 8029 - DNA, 1196 bp, Arabidopsis thaliana landsberg
aaacttagaaagacatcaaaaaagaaactggagtcgcattctgcatattttcgaagtaagagccaagggtttcccaaaaaagaaagcaacaattgctggtggatagaatgagaaaccgaaagcagattcatcaagggatttagaatctgaatattacttgatgggatcatctgaaatagttgatgtcaataccttgtagggaaaacgaaacaagcaagaaaaccaaccagtagtaaaaaataaaaatgaggcaattttactgattttgaaaataactttttcattgaaatgaggtaacaaaaatgtaaatgtaaatgtaaaagtgatgtcaatgtgtcttcaagatatgaattctaaaacaattctaagactatgttacatacagagcaatactgcaactattacatgattgtttataccttgctcttgcctaaaacccacagtatctcagccaaaactttctcttgatttccttatcggcctgggtttacacacaaagcttgatactcgcaggaatggccaaatttcttttgatcttacaacaacacgtattcattcatatctactaacctgccccgagtttgcggctgcaggacatagttgtgtcaatcagccatcatgtccacatgggatgcagagctcaagaatcgttctgctaccaaaatcagtggccagtttttttggaccagagagcttactcagacaatttgcagcatccaacatgccaaccattttcttttacaccccttctcgttcctcgaataaagatatggaaattctttcccgtagcaatggccagtcttcaccaagttgatgtggatttagctccattgcaactctaaaatcaagcaaagacactgaatgttgttctcgcgttatgtcagatggttggttgctagtttgtatgtgaaaactattattcgttcgcaccccatttacaagctcgtctcggctctgctgtttttctaaactgtgttttccaggcgttccattcatggaccgagctccagccaaatcaacgcatgatttcattagtttcttcaggtacaagtccaacatgttatttaaaacaatagaacactccgctgaaacccctccaagaccctgtgttactgcaatattctccatcctcttcctcagcatctctgtataaaataatccaccactgtcatagcaactgacagcagctgcgctgg

SEQ ID NO: 8030 - DNA, 721 bp, Arabidopsis thaliana landsberg
tgctgatggatctatagtcatgcattgtttgctacaacaattgggtaaagaaatcactcggggacagtgtctcgacgagcccgggaaacgtaagtttctagttgattctttggagatttcagatgttcttgcagatgaaaccgtaagctttttgagacatgctttccatccaagtcctactcatcacaaaatccacttttagctaactaattgccttctttcttaattgtggtacatttgcagggtacagaaactgttttaggaatatcattagatatgtctgaaattgaagatcaagtgtatgtaagtgaaaaagcctttgagaaaatgcctaatctccaattcttgtggctatacaagaatttcccagatgaagcagtcaagttgtacttacctcacggtttggattatctaccacgtaaacttagattactacattgggattcgtatccgaaaaaatgtttgccttctaagtttcgacccgaatttcttgtggaacttactatgagagatagcaagctggagaagctctgggaaggtattcaggtagcttcttattatatatcttaattcttggtctcctcttataaaatgcctttctatttatacatattgttttgctatctatgttctcagccactgaaaagccacaagcgtatggatctgagtgcatccacaaagattaaagatattccaaacctatcaagagcaacaaatctgg

SEQ ID NO: 8031 - DNA, 1417 bp, Arabidopsis thaliana landsberg
ggatccagttgagtacaagaaaagggtgaagctgcagtccaagcagtatcctgctcttgtctaaaacctcaaaaaagagaacgcaccaaaactgatgacaagctctgaatattttctcgtcttgtgtcattatgtttagatgtcattgggtgattgaaaactcctcattttggcaccttaagacactggaatctatttattttcgaaaaaaaactcttctttctctatttaactgttaatattcttggtactgattcagttggtgttgcttctatataatacataattatgttctctggtcgttcatgagtgttgtccaaattctactaagtgaaatatgaagtcttcattccatagagtaacgaatcttagttgtgaatctagaaatacatatatttctaacttgaaactacgcttaacacttgaaagtcaaaatcttactcctctaaaatttatactccactgattttagacttttgaagtagtattagtgcttgttagtaaattgtttgctacttggaacattttttgtcaatgattgagatagaaagcttggaatatttaacagaacttggaatttagctacgaaatcaagtgtgcagaaagagataggcaaacaccgtatgtcaacagttacaaagcaataaaaccaaacattcaatacttatatacaactcaattattgaaagtcaacaacaagccaaaatcgtctacaagtgatgacacttcagatatgaaatgtgtgaactattataatctttcctatgatatcatcatcagcagatgattcctgatctattctatcatcagaacaatgattttccaaaacgagtatcctataaaatcgtcaaaagatgattgacgcttctaataaaatcatcagaaaatgatacaagtctaagaaaccaccgaacttgtgaagatatgtcattagaggatgacctgtagatccatctatgatatcataagaagatgatgtactcactgtgcaggaacctttaagcagatatacctctatggtctcttctcctaagtaaggatcatcgcatctggtctcttctcctaagtaaagatcatcgcatagtcattaaagtccgcaccctcttctcccgctcttcccttttagcttgaggagtgctcttcaacttctggatctccgccatcacaattttctcaactttgtcaatagaattgagtagcttcttctcgggtgtgatgaagccagcttcttcctcagctatctctttagtgatgtcaagtaacatcttttgaactttagcagttgatggtgggcaactacgcttgaatcccacagatggtccaggagtgaccatcgagcatttgtgttctcctgacagtggtactggagattcaagaacaccaacttgtcgatgagttgggatctcagtaatcggcc

SEQ ID NO: 8032 - DNA, 1281 bp, Arabidopsis thaliana landsberg
ctcattgattgttatctctgttgatatcttcttgtgattattgctttcatttattgagtttgttcttctcttgttgattgtgtctgtgcaatcaacttccaccttctaatatgcgctacttatgattcatgtatgcttggagaaacaaagagtgttggattgtgttagaatgtctcaaaagctatgaataatcatagttttttagtctgttctgagtgcatttgattctcggttgtatcgcttatgttccactgctgtaacagacgacattctagctatgttttagttagattggtagcagtttgatttaaagcttgatcgaaagagactgaatctgttgtacttatttgaatgctcttgttgatggaaacagcaatgccaattgtacgcaagtggatcaaaggacccatgtggttacattttcttgttggggtaagttatctacaaagatacagacttctattcttatgttctcttcttttcgtattccacgccttgttacatacataaaccctccgcggaaaagaccagtaaaattgttaagtcaaattctactattgatgtttctccatttctgtatcgatgcaggcaccacctgttatagttctttcatcagcatgtgctggactagcaggtttgagatcttcttctcctcctcattcactacttataatcaatttcatattaatcttggttttgtgtcaataagctctgaatcttgaatgttgcatcttgcttttgggggaatgtttgtaggtggcactgtaccggcactggcacagctcgcttcatcttcataccgagctgcagtccattcgtctcagccaccacaagcacaaaaggataacaaaatgcagaagtctacgacttctcctttgtaaactacacacacagcacagctctctcttttgttcttatttatttctcttcattttgtatgtcaaatcttttctttgaaagagagagcttcttggtgtaaattcttcttatcttatacaactatctggtgctaaagaaagcttaacccgtgtcacgggctttatgtacatggatgcctctggtgattcactcattctcatatagagtgatgaaaggattagttttgttgtttcagaagctgtggggtttctttataatattcgaacaattttggctctgttttgttatatatacacgagggtagttttggaatttcaggattagattttagggaattagggtttttgaccaaaggcattataaaagtcgagcaaccaaatcaatcaaagcttcaaaactact

SEQ ID NO: 8033 - DNA, 1282 bp, Arabidopsis thaliana landsberg
  unsure (1)..(1282): unsure at all n locations
tttggctttgggattccaaaattgggtttattttagtccattttaatgatttttggctaattgaattaaattaagatttggattcagcctgtttggtgggtactgcaagtgcttttcatttgggcttcaccatggtatttcttttaatctctcactgattgatttctttgtgttggtatcttcttgtgaattggtgtcccatcattgattgtttcttcttttaatgacttaagagggtaaaatatatatgcaacctgttctaagaaaaggtcggggtgaatgtgatgctcgatttgtgtggttaatgctgaaacaatcgacattctttttgtggtgtgatatgttttttaagtcagaatagaggaaacaacagtttaaagtttggaacttgcttgaaaaacattcagaatctctctttgggttgttgtgttgttgatagtgtggttcttgattttgatgcagtaatgccgattgtacgcaagtggatcaaaggacccatgtggttgcattttcttgttggtgtaagttatcacctaagaatatagaattgtctgttacatcttttctcattacatacttaaatggtagtaaaagagcttgcgtgatgattgtatttgatgtatggtttgcaggctccacctgtgatagttgtttcatcagcctgtgctggacttgcaggtttattccatcctcctccttttcaatactcatctagacaactttcagcttgtgaacgtagttgttgttttactcgtctttattagcttaaagttatatgtctttgtttggtgttaatttttatgcggacttggtcgcaggtggcgctgtaccggctttagcacagcttgcatcgtcgtcttatcatgcggctgttcattcatctcagccaccacaagggcaagataagaaccaattgcacaattcctctaccatttctcctttgtagatgttacacagctctcttctcttgctctttccatgtgtataaagattcaactttgtttcctttggacaaaatgagagatcaaattgtctgaagatccaggtttgccacttgacacttttgagggtatacaaaacttaatgcagaaacgtgattagacacagattaatctgtattacgaattcaaatttagtgctaaacaagcttcaacctataatatggcaagcagacgtggtgaaattactgtgtactcggtgctaatttgtaacttgtaagaacactagtttatatccgtacttttnataagattttatacgtgtatatattgtaacttttagt

SEQ ID NO: 8034 - DNA, 1844 bp, Arabidopsis thaliana landsberg
cagagtaaaaacagaaagaaaccgctatgacataaccactagaaacttgtaggcagtgtttttcatgttctgatgtaattaggttcatcaaactagttacttgaggatttataaaatctaaagatacttaatccgtgctccgactcaccacaagttcatgtcatcactgaaaaatccaaagaactttcagcctaatcctaatggtgtgttctaaagaactccaaatccaatcgaccaaacactacacaacctataagccatagaaagctgcatacaccaaagtaagacaaactcacatgttcctgtcaccactgaaaagtaacagaacttcagcttaatcgtaattgtaacccaatttaaaaaacgttacataactcaatggtaagctgcatagagacactaatggtcaccaaagcaaagatgcaaatgtgcttaaagaaactgaacaaaacaataaactcaacacaccactctaacattcacaaagacataacccgatgatactaaccgtaattacacaatgaatgacacaaatcaaacgatgtggttgttgaatacacatcaatcaaagcaatccaaaacacacatagcagaaaaggaaaacaatttaccaacaaagatgcattattgttaagtatcaaatcccataaagccaaaccaagcaacaaaatgaagacacttgcactcatattaaggaagaagaaacatcttcaaatatgcataataccaaatccacaagtcatcatcatcattacaagaacagcaaaaccctaagagacaacagattataataaggaagtaaaaccaaatttctcaagcctcactcttctcctcctctgaaccaggaccagcatcatctttagaaacctcactagcatcagtattagcatcctccacacttccatttccaacactagcattagatctagccttaacagattcaagcatcctcttactaatctctttagaataaagctcaagaatcttaatcccatcatcatcactcgacacagcattcgaagcaacaccataagcctcttcttcgataagtttcgcgacggtggttgcatcgtcagatttaagagtaccgtatctcttagagaggattgattcggtggataaggtctcgatcaggcgattcagaacggcgtcacgagttttctgagtcggtggccagattcggagagagattcctcctggtttcttctctgattcggcttctttcgtcagatctgtgtcttttgaggctgcttcttgagatgttggatctgtcattgcagaaatagtggtggagctttcggattccggtggcggcgatgagatcgtggtgttgattgtctcggcggtttctgccattttcgaagtttagggattttggagattctttggaaggatcagttatgacgacggttcacgaaaatgacaaagtctttagagtttagagtttagacattgattggtttggttcggtgttattataaataattaaataaccgaaaattcaggaagtatttgaaatttaaactttgtgtggtggagaaaactatagtcaatataaatatttcagttataatcttaaacttacgttcaaatctttttatgaattaattacggttttattttaaattaattacataaaatacaattaataataaaaatttcatctaattttattgatatcagatgacgataatatcagtatataaaatacaataaatgttttaaatataaatgttttgtggaaaatagtatatatataaaatcaaaataagtagggtaacttgatattttcttacaaattattttcaacagaactaatctaaaggtaatccaaatattctttt

SEQ ID NO: 8035 - DNA, 945 bp, Arabidopsis thaliana landsberg
tgattaatcaagtaaaaccttgcaattaacaagttaatcaccataattaacgagtttattaccatgattaaggaagcgaaatcatccagttaacgagttaattaccattattaagacagataatcatccaatttttttcgtttttggttcaaaatattcaagcctcaaaactaattaccatgattaagcaagcaaaatcatcccattaacgagttaattacaatggaaattaaaacgtcaaaaccaaatcaaccacaaattcatattagtaacaggtcccaaatccacaagttatacaacaacaaaaaactctgagatagataatcgcataccaatctaaaacaaataaaacgatagttagagataagagaacaacaccatattcaagcctcgtcaagcttcacttgaatcaatcttcgaatcaacagctgattcaattccatcaccatcctttggtggaggagaagccacattattcttagctttaacagattcaagcatacgtttactaatctctttagaataagctttaagaatctcgatcccgtcgtcatcaccgaatacggtggcagaagcgacggcgtaagcttcgtcttcgattgatttcgcgacggaggaagcttcttcggattcaagagatccgaatctcttggagaggattgattcggttgacagtgtttcgatcagacggttaatcacggcgtcgcgagttttttgagtcggtggccagattcggagcgaaatggttaccggattcggattcttctccgactacgctgtcggtaatgtggtggagttttcggtttctgagatcgccggcggagaagaggtggtgatcgactccgtttcggattcagacattttttctgagactatttgatagaaagcttactagggattccgaaatctgtggcagttatgttgacgtgggtgggcgatcactga

SEQ ID NO: 8036 - DNA, 774 bp, Arabidopsis thaliana landsberg
tgacgtttgccattagcttatagagtaattacttccaagtaccaatttttacatgatgacacataagacggatggtcgggcgtgcacttaaagattggattactgtcattcacaaaacgtatatggacacgcacctcaggaacagagagctcaaggcggaattttggaccatcatagtggtgaagtactggcctgaaggagtcctcttccaaggctttgcagattttcctcactctgatccttacctgttacaatttaagagaaagaagttatattagtacaagatatcaaaataaagacttaaaacaatgaaagtcattgtgatttaagtttcacctgagccggaaaccttgactctcctttgcactttttgtcttcccaagcagtagcatcaatattagtacctccaaaagttgttgcctaaacaaggaatcattcacggaataattcgaacatcaaattttcagtaaatggtagcatcaaaaccattgttatgacaaaaaaaagcacgagaacaaacctcaaagataccatgaagctggtgagtggtgtagttgtaaagaaacagaggcaatccaggtgttatagctcgaacagagtctctgtatcttggaggtaaacctgaacaatgatgaaagtcaaaaagttatttacttgcagtttgaatatcagtaaaacactagaaaagggtattgggaaattaccaaagaggtgacgtttcatatcctcctgcatagtatcattgttgcaaacaaagatgtaaccaccaagaac

SEQ ID NO: 8037 - DNA, 1323 bp, Arabidopsis thaliana landsberg
  unsure (1)..(1323): unsure at all n locations
tgcagaattcgtaattatccccaagagaccaaacaaagtatcctttcacgttgacacgcttctccctagaaacattaacgttttgaatgattgactgatcataaatatgttatatagatatggataaagaacagttaaagaagagtagcatccactcacttgatggccttgcggagaaaacatagatgactgcagagataatcaatccggttgtaatcgtgaaatgcttcggtaaagggtatggggccaccggaggtactgaatcctaattccacagtatttgagtcaatatcttgaaccatttttgaaatacacttaacatgtatagatgaaagagatgagtagtagaactaaccgttctcggtgacatagattaaagggtcaccgtatttggttttgaagtgctccattacgtttaacatccctcttgggtggtaataactgcctttagagaactgagaaagagaagatactatgaatcataatattttgcgtaaatgaatgaaataataagggtgaatcatgcataccggtggaccagggggttgaccatttgcatcaagagctgttaacacaaggatgatataatttgatggtcacaaaatgttgtgattaccaaaatatagaaaggttgtaactaatgaaatgaaagtatatagagtggtacatgtgaggtttgcgagtgagtccgtcatggcagtgagtttttccggaggacttgggtcaagggcgtgggcgtattgagtgacgtaatagttgagaccaagaaaatcatatgaaccctttaaaaggcgagcttctgtgctgttgaactttggaagccgattaccaacaagtttcctcatgatgtatgggtatttaccctttgttagcggctccatgaacctgatgtacgtacatacatatttttattaatttacatattaatttttaaaatcatttcatttataaaaaaaaaaatcattttatttttggatattgatatataccatccgatcccaagaagaattctttggccctccaagttgcttgtttgctctctagagtgtcatcatatggtagaaaccatctagttatcatcacaggtccagtcttccatccttggtactgtggtcgcatagacatatatatccacaatattaattagaatattatagtattacatcgcatgcgcctttcacaaatattggagacctgaccttatatctcgtcctgtatagatcgacgnccgtggcaagagcaagaagaaggttatgcgctactatatagggttcgctggaaggatctccaccgtgcatgttttatccacccgttgggaacatc

SEQ ID NO: 8038 - DNA, 757 bp, Arabidopsis thaliana landsberg
  unsure (1)..(757): unsure at all n locations
gcactcgttatgtgtgtgtttgctaccaactggctttctacaattatagacacagactctcctctcccattggacaccataaataacattcaaggggtcattacactgcgcctgcacactcccaactctatcatgaagcagaacttcgttcaaaggtggcataacttaactcatgttggacttagcacttatgcactgtatgcttatgacactgtctggctgcttgctcannnnnnnnnnnnnnnnnnnnnnnnnnnnnnnnnnnnnnnnnnnnnnnngaatccgattatatctgagcttgggggtggaaacttgcaccttgatgctctgaaagtctttgatggaggaaagatatttcttgagagcatcttacaggttgatagaattggcttaaccggtaggatgaagtttactagtgacagaaaccttgtaaatccagcatttgatgtgcttaatgtcattggcactggttacacgactattggttactggtttaatcattcaggcttgtctgtgatgccggctgacgagatggagaacacatctttttcgggacagaagcttcatagtgttgtctggccaggacattcaataaaaataccacgtggctgggtgttctcgaacaatggaaggcatttgaggattggagttccaaatcgttacaggttcgaagaggtagtctcagttaaaagcaatgggatgatcactggcttctgtgtggatgtcttcattgccgctattaacttattaccttacg

SEQ ID NO: 8039 - DNA, 1190 bp, Arabidopsis thaliana landsberg
caacagtcttacactcaccttgaattgcctgcaaagtgttttggaagaagatccggtatgccttccttgagttggaacgcagcaacattaagagagagccaacagtttcaagtaatactccatgcccaggactgcaattgattttaagcattagagcaaaactcttgaagagtgacccaaatgctagtgaaaacaacaacacttacacaaattctggttcagcaaagaaggggataatacgagcaatcacagggaggatagcagaaggggttccgtgatagaagactcctggaatgttccttgctgtgtgaccaacaagcttcagaacagctgtaacttccctcccgttgcctgtgaaattggaaaaagcaatcctaggttaacctaaatcaattccggcaaaatccaagctaagaatcatccaagggaacagaaacaagagacagttattaccgagagaaggaacaacgtaggtattcaatagattagggatgacagcacgaaatcgaatctctagaccatcttcgtctccggaagagtgaccgaggttgttagccggagtggaggcggatgcggccacccgttcacggagttcgtgaaccaagctcgacagattattctggtccttcgccatttcacaatcgcagaagctgtctcgctccagtcccttccccttccctcccaatttttaaaagaaaataaaatgttaaaaaaaaaaaattaataatatttgggaaaatatcatttaagggcttaactgttttttccgctaccagctcaaaggctgcatttgtgggtgattgcagttgctaacgttatatccaatcacagaaaacgttttcaatcactccggaccgcactacaccgctcgaaatcgcgaatttcaaacataaactttgcacctagtgatttgaaacctcaaattttatgttgagtttcaatttaatcacgaattcttatacttggatttattgtttctttctcgtttgagccggaaaaaaaccctgttagactagatttgtatcatgaacttgttcctctttgctagactactctgtaagctggcttattcggcacataaggaaaagaaggcagagctccatctcagagacaaattggctgaacatgaggaaatgttcatggagttataggatcacttaacgaaaaacgttaacaatgcaaaggagaca

SEQ ID NO: 8040 - DNA, 1624 bp, Arabidopsis thaliana landsberg
gctggcacattaatttaaaactacaaaccattcagtagaatactcgtacattcataaaaatacagtctctatctagtaaagagatatatatacatgcgtacctatatctcgtggctttaatagtagtctctcgtacgacaactcgttaagtctcctcgtctctgaaaaaactttctctgatagagaccagcttgcttatagcctcagccatagatatccggtttaccggtgattcttctgaacaactgactcccacccgaaacacaagggtcaagcattcgaccatattgaaatgctgagcatatgcaccacggagaatagtttcgtctgtgatttctagtgcttgtcgtttctgcaatgctgatttagtaaaactatggagagttaaaccgtccacgaataacttattggtgggtctttttccagtgaaaatctccaataggagaataccaaaactgtacacgtctcccattattgatggatgacctcccataccatattctacaaagttcagtaataacaacaacaagactaaagaatattaggacgactgtctcgtctctgcttgagataattacctaataacgattataaattttaaagtaaaataagcatacctggtgcagcatagccaatggttccacgaacacctgcagagctgaattgaatatggaatgtatcccgatcaaattttagtaggagttgtgccaaaccaaagtcgcttacatgagcagtcaaatctttgtctagtagaatattgcttggcttaatatcacagtgggctatagggttgtgacaataagtatgaagataaaccagagccgaagcaacatctatggcaatgttgagtcttgcaaaaaggcccagggttctcgagggattgccagtttcttctatttcatccgggtgcagccacatgtccaagtttccattaggcatgaactcatacactagagctctaaaatcatttccttcaaaatcagaacttgaacagatagtaaccaacttcacaaggttgcgatgccttatacctcctaatgcttcacattctgctatgaaactctttgcagcaccacgtttgcagagattcaaaactttaatggcaacagccttgttcttggacccaagaaatcctttaaacacagccccaaagttacccgacccaatcaaattgctggaagagaagccaccggttgtcttgtagagctcatcataacttatcttttcataaaacgatttcactggggagaaagaccgatcattctcattattattagctctgacactcttcactctcagtttgtaccagcatagataaaccacacacagacatagaagcaaaagtgctgccataactgcactgacacaaatggtgattatctttctgactgatgaatgccttcttggtaattcaacagagcatggctgaagctgtaatgacgggatgcctccacagaggtttatgttaccaaagaccgacatcgcactggtattacgaaataccccttccgttggcacagctccgtcgaagttgttcaaagagagattcaagttctgcagtttggaaaagttcgccatatattcaggtattgtaccagagagattattcttcgacagatctagg

SEQ ID NO: 8041 - DNA, 2523 bp, Arabidopsis thaliana landsberg
cttcgtattgatccatgacaggatcgtatccaaaaagacagttacatttccggaaccctgttactgggggtccgatctcaggtaaaccaacggatcgtttcgtggtagggttgtatatctgaaccaatttagaaaaatcgaagaacaagagatcaagcctctgatgtatcgatatacaaacaaatacttgtcgtgtccatagactgatactgcgggtttgaggctttgggagaaactagacgagacagtgaagaaagtttcaggcacacaatggtggaagaccgccaacaggggaagctgctgccccggctgagctaaatgtcgagtaaccaccgactcgatgaagtctcttaggctgcagataatcgttgaaaattgctttgagacgcatcggaacctcacaagtgactttaacgggagtttctttagtatctccacaatgagatccagagggagttgcaaatattcttcttcacggtaattcttctcttcatttccttttctcatgacctctgtttttctccttcttttgtaaacaaataaaacgtgacggtaacctaggaaacataactggaaactcacaaggattgtgaaagatgtagatatcgtgacggccgagtttaggactttagggttttgttcttaaaagaaagaaaaagtaagttactcttagggaaaattaaagaatcccaaaaccacaagtaatctcaggagtctctttgttaaaaaccgaaataattaacgattacatatataacaagaatagagtaaaagaacttccaagagaactccctcggtctaacaccatagaaaactcctcctaatccctttggaagaaggaaataatttcttaaatactctacataaatttgaaacaattagagaaatattcccaaaaccacaagtaatctcaacagtttccgaccaaaagaatagacatcgtgccgttttacaattcttaacaacttctcgtttgtatcagaaaatacaagactagccatgtgttggtaacttggtatagataaagatactttaaagatataaagattgacgcatccccaacatcaacaatttttccacttgatagttgatagtttaaatatggcccaaattgaacatcagcaaagtaattaatgaaatctcaatcctcggaaaaatcaagtttaggtgtcaatctttttaccatttaatagaacactatagacataaaaatcaaataagacattaggtgtttggtagtagatattgaaatatctttttagttcttaattgggtcgttatttcaaatatatactacacagacagactatccaagtctcaccattttcatcaatatttacgaggaaatactcaaattaacaccattaagagagacactatatattttacataaagacctggcgctataatgaatcatcatcattgcatttatgacttaatcatattcaacgtatacaatatatatatatttgatttactccatagtaactttttcctgatcagataactataacctagctgtttaacaatgaaaaaataaaaaataaaggaacgatttttattaaaaggtttaaaataatacaaataagtcttacaaccacattgtattctcgacaaaatcatgaatggcaaatacgcgaataatatctctaggttgttttcttgtctttagcctagtactttcgatttcaactcttctatagcttttttgcttcacgttataataatgaacacacaatggcatattataaaaaggataacacatactaaatatctcaccagcaggagtgatacctgagaaagttctgaaatcacctccagggtattcaagcaagccaaaagtaatgttggaccattcttgcttctcagcattctccataatccacatacttatattgttttcgttgctacttatgcatcctaacttcccttggtggttaaaaagacctcgctcagtacacttgggactccacaatgtttcaggagtgcggacatgataaaatctttccgactttacgtcgaaactcatcattaaaagttcaccataattctcattatcttttcttctaactgctacgtagtaaataattccgtcaatgcatacccccgcccggctgactgaaatgagttcgtaatcaatattgcctcggatttttctccattgaggacaatctctacccaatgtgaaaacatgaaaagtttgcgtcaactcttgcgagtcattaaccatggccaacactttgtattcattcatgacatggtcgtatccaaagtaacagtgtttgtgtctctttggtgagagtaccattgattcgatcttgggtaaaggaagacattgcctcgtggtagggttgtatatggtaaccaaatcatatactgatgaagaacaacatataaagcctcgaacgtattgatacctgaacgcattatagtggtttcgtccaggcattattgatactttgggttttgtcctttgagagaatgtagacgacacggtgaagaaagttccaggaacacattggt

SEQ ID NO: 8042 - DNA, 1581 bp, Arabidopsis thaliana landsberg
  unsure (1)..(1581): unsure at all n locations
tctctttttttatgcttggaaattggagtaagtctaaatgttttcaatccaaaagcttgcattgatttttttgcctgactgtaaattcacattcaaaaatcaatcttagcgtgtgaccgactcttgataattttgagttgtcaaattcaccaagacgtgtagagagtttattttttttatcttagacaagactgtttctgtgtgcttaacactgacctagaccttttcttagccaactcagaagaagatttgattaggttgaaaatgttgtaagattgattggctttagaatcattgtgtaaacacaaaaattcttgccatctcaagattctttacttgttttgtctgagagagttctattactactttaatggctctgcgcaacacagtacgctgagcgattatcaaaagaaaaccgttaaggacatcactgtctaaaggggatggtattggtaaatatcccacactggttaggaatgagaccaactaatacctaataaagtcacatggatacacttactcataacctaacttacctatgagggttattggacatgttatgnggttagtgtgggataggatctgtttaaaaaccacaatgaggatctaagaaaactaaaatgatatctatgatttcattcgaaatctcacgagttgatataggtctaagaatagttcatcaactcagcaactgacaaagtagctcaacctaaacggccaaagtctaggctggtaaccattcagagaaagaacgaagatgtagagaggaaaatactagtagtttagaagaaacgttacattagtgatggaacatacaaacagctattctataagtaccaaagtggaaacaagtggaacaagatggttcaagttttctatcaacctacaaacaaacaactgtctctgataacaagcttttgaaatacttaccagagcgatcagcttgctgctacgttgcaagtgccgattccatctctacagtcattggtaagatcattgaatgtttcaatctgcttcttccctctcaagaacacctctgtatcaacagacgctctcatgtaaccgtcaaactcaactgggtttcctccattaagcttcgttgtctctgaataccattcgctgctctcgtcccagagatccttaaactcatccagaaaatggggtttgtacttgtctttcaaggggttaaagaaagatacctctggttcatttgttgcaatataaagattccttccttgttcgattttgtcatggagggtagataaaatggagcttggtgaagtatccttttcaagattaggccaaacttccttgtttctagccttgtctcctctctcaatgtgaatagcatcataatcccagtttaacctcgaagcaaccgcagaaacaatctccatcagtcgtttagatttccacaatagattccaaggcctttgcacaacagattctgtctccccttcacatactccataccaatagttatctggttctacagtcccgaaattcctccttacccacgtgtcctttaaatcaagaagctacataggtgtgacccgaaaatcttccacaagatgaagcttt

SEQ ID NO: 8043 - DNA, 2213 bp, Arabidopsis thaliana landsberg
gcttgctcggtatgatactaacgttgtgttcatttcttatgaatatttttgatcaagttctgcaaccctaatatctaaattctagagatttaatatcgatttcttaatatcatatttttgctatattcttgtataattttcaggcaaccttatctcctttgccgtgttcctatctcctgtgtaagtaatatatatgcaacaaatcagaatatatatgactacgttacatcaatattctccgatataattgagtaactaatattcagtttttttttggacgcaggccaacgttctataggatttggaagaagaagacaacagaagggtttcagtctattccttatgttgtggcgctcttcagtgcgacgctttggctttactatgcgacacagaagaaagatgtcttcctcctcgtaaccattaacgcctttggttgcttcatcgaaaccatctacatctctatgttccttgcctacgctcccaagccagctcgggtaactaataattaatcctcagttcatatgacatgcatgttacgttgttcataacattattcaaatgaagttgctaaataaaacatttcttaatggatgcagatgttgacagtgaagatgctacttcttatgaactttggaggattctgtgcgattctccttctttgccaattcttggtaaaaggagccacacgtgctaagattatcggaggaatctgtgtcggattctctgtttgtgttttcgctgctcctctaagcataatcgtaagtactacgaaatagctaatttaccaagtgattaaattatgatttggtaacaataataattaacatatatatttttgtttaattatatatagaggacggtaataaagacaagaagtgtggagtacatgccctttagcttatccttaacccttaccatcagtgctgtcatatggctcctttatggtcttgctctcaaggacatctatgttgctgtaagccatttcatctctctctatttgctataatgaatatatatgttttaacatgattatcatgtcgtcaagcatcataatcatatgtctatcattatcataacagtatattacatgaagtgggtgcttttgtttctaatgaacctgagactttgaggttctaatcatagattcatagataaaaagagatatggattggcaaaagataaaaaaacacgattaatgaaagcaaaaccttttgtttggtatcgtcctttacgataaaaataaaccaaattataaagaaactctcgctttatgttccacagaaacattaaaagatttagcttttgcaaaagaagttcataatatattaagttctttttatctttattgttacatagaaattatattttgtacgtaacttctatcgatgccgcacaagtttgccataaactttactttatttcgtttttaacgtactttattcacaagctagaaagtggaaaagtgagtatattaaactattatcatgttattgccactaaaacaaatgttttttcgtgcagttcccgaatgtgcttggttttgctctgggtgcactccaaatgatactctacgttgtctacaaatactgtaaaacgtcgccgcatctagaagagaaagaagtcgaagctgctaagttaccggaggtgagcctcaatatgttgaagctaggcacagtttcatcccctgagccaatctcagtggttcgtcaagcgaacaagtgtacctgcggcaatgatcgaagggctgagattgaagatggacaaacccctaaacatggcaagcagtcctcttccgcagcagctacatgaataaaaatacgttaatgttgactttaccccaacttgatataccaaccaccacgtgtaccccgttacgctgtcgtatttttctgagtttatcaagtgtgcgaagtagagaattaattttccggagttaatttctctacttctttttaaaaatttgtgtaattatctattggggattatgtatatttcctattttctgatttaacgaaaactatttaaaatatccatcatgattctgtctttttctttgtcatacttaatgtttgctgcttcttttaaggacataatattaataatataccattaagtttttctaattatgaaagataatatttgacttgggaattaaccgggggcacatttcttttcagatattaccaaacaaaaaaaaaaacttttaaaaatgc

SEQ ID NO: 8044 - DNA, 387 bp, Arabidopsis thaliana landsberg
gaattcatatctctctttatctatgattagcatcataggctcatgtaaaatagaaacaaaagcaaccacttcatgcaaataacgataatgattatgataatgatgacttacggcaacatagatatccttaagagcaagaccataaaggagccatatgaccgcactgatggtaagagtcaaggataagctaaacggcatgtactccacacttttcgtctttatcaccgttctctgtttttttaatacaaacctaattagtaaaaatcatattttcttcatatatacttctgtagtaacattagctagagactattactacttacgataatgctaagcggcgcagcatatacgcagacagagaatgcgacacagatacctgcaatgatc

SEQ ID NO: 8045 - DNA, 1259 bp, Arabidopsis thaliana landsberg
tcgctctcttgatattgcggcttgtttcaggggcttctttcatgtgttctggagtctactttgtccacagggactgaatgctgtggtttgagcaggcttccttatttgcagtctggttggataattttgctgatatcatgtcaagttctgagtaatatttctttacactttttcgttcactcgatatatgttgcggtgctatcttttgtggtgttgtgtctcctctggttgctttattagaagtgcatgatgtagatgctaccatatttttactattactagctctctaagcctaatacgtttagatgtagaacacaacgttgtttcagttacattggttctattttcggtgttttttccagacgcatagcctattgatgcttattctttctggaaataagtgttgtggcctactgagaggtaagtgtgcaatggcatgaatggggttaatgtaatagatgctcatccagaaaatgtgtttgtgatcggtgttgattcgttattctgatttgttctcatgacttactttcatggaaaattatcgagatgaacgggaacacatgcctgctttcttacttagtttgtcgcatgtgcattgtgatcggagattgtccaagctcactcttcagatgtctccagcaaaggtaggttgtttgcatggcagtatgaaactctgaagcagaatccattaattttcacaaaggtatggatccttttgaaagatgtgtcgtggttcttcaaagtttaacatgtttttcttgagtagtttgcttgcttatagaatcaaaacgagtttcgtatcttcaaccagactttctttggcaattagttactactgctacttatgcaatagcaacctctggcaatattgattgatttgcgttatgttttaatggttatgaaaactgactcttcgatataagaacttgtaaagtaaaaactctatgtgatgaaattatgaatgatgaggatgttgttattacgagcaatgagatgtcttttttaaaaaaaaaaaatttggttgcttgcttgcaagaggacatcttagcatcaaatttgaaaccgaaagctgactcaattctggtaactactggcagtaacaagaaaacaagtcatgaacctgcaatttcattctaattctacacaagatgcaaatctcaacttaaattcacttttaaaacttgttattattgtaaataatttgaatagtacagttggaagtaaaaatccaccgtaccagtgtaccggtaacgtggaag

SEQ ID NO: 8046 - DNA, 3072 bp, Arabidopsis thaliana landsberg
aaagaattgggattcgagaaatgttctaaggagccttctctctagaactgtcaattaggactagcccgcggttttttagccctaaccgcggcgggtttttttttttgcgggtttcggcgggtcagcccgctttaaaccgcggttgtaaaaatcaaaatcctaatccaacccgcttaatgtttacggttatgcggtgcagcccgcggatttatatttgactggatcaaaacgaactaaattaaatacaataaaaataaaataaaatctagttcgttgttctcattgttagtggcttagtgcattagaaacaaaatagtgtatataacttaataacaattaacaagtcactactcactacacactactgcactagttatgactaatgcataacgccacaaaccaatttcgtcattttgtgacaaagagaaaaaatcaaatctaatataaagtctaaccaaaataacacaaaccatgtttctaccaaagtattagaaaaacaagcacactccaatatctcaataaaatggaaagaaatagaagaaaaacatttaaagactcttgtagaacttggaagggagagattagttgagaaactgaatgttcgtagtccacctacaaaagaaaaataataataccgtaagctagtatactagaagcaatttgaaactaaaaccataatttaaaagaaatttaaagaggaacaagaccaaccttcttccaaatccatgtctatatttagttcgtggttgcttcagcagctggaacatcacccctagcaacctctacaccatcatctacgtaatacaaaaaaacatttgttatctatatttaacttactcttgattataagaatttatgtagtttaccttaaaaccctttattctttacgtccacaaatcaaagctacgacatgcggaggttagagagaactgctatatttgtttagaacacgactacctatgctaaacgatgattctgaagctactgttgtaattggaatactaagaacatcagaagccatataagacaactctttgaaacggctagcgttgtctttccaataatccaagacattcatactttcaaacgccatcatgtttaatgctggttcatccaagtacacatccaaaggtgattttttattatcccctattctctgtgagtaaaaagcataaaagtcctgccaccaaaaaaaaatcaatccattacattacaatatatatccagatttacgtttataactaaacaacaacaacaaaaccaaaaaaaaaaatatcacttacattatatccagttggtgcattgtcgttggaagtgcttgcaaaagtctgtgaaggacctgtagatgttgtcggtctattactctgatatgaatcaaagagatcatacattttttggcgaatacgttcacacttttgagcacaagttgatgggtctagagcagtgaaacaaaattctaaaagagcaaacttcatccttggatctaacactgccccaattgcaagtatctcactatattcctcccaatatttatcatacttgagctgcatcttctcaaccatcttctcaataacctcatcatccgaaaatttatgacgtcgcaaccagcattcgatattccaaacttgcatgaaatataagtttgatgtgggataagttgagccagaaaacaatttggtaatctcatcgaatggcttcaaaaattcacatatcaactttcctcttacccactcggcctcagttggaaaacatttataagatggttcgatatcttgaagattctgtaaagccccttgatgtttgatcactctctcaagcatatgataagtagaattccagcgagttgacacatccaaaattagaccagctttaatctgaagaccaaccgtttccatacagttcgcatacatatcctctcgagtctcggaagcccttacaaacttaactgttgccctaatctttttcaaagaatcaccaaccacatctaatccatcttgcacaataagatttagtacatgtgctgaacacctcacatgaaaaaagtctccattacacaacaaatccctttgtagatttctctttaagatggtttgcatactatcattcgcagtagcattgtccactgtaagagagaaaacctttatctctaatccccattctttgagtagctcgataagcttcatcgctatagcatatccagtatgtggaggtggaaaagctgaaaacgacaatattttgttttttagcttccaatcactatcaatgtaatgagctgtcaaacatatgtacccttctataacgagagatctccaaagatccgtagtcaaacatactctactagagattttagccaattccatcttgagagttgctttttccttctcaaacaacttatagcaatctgatgatgctgtgttccgacaccaatgtttgatatcaggattagcatatgtgagtgcgtttcgaatccttctatattcgacaaacgaatagggaagaccatgctcaactattgccatcgcaatcatgtcacgaaaaactttttggtccaatttccgagcttgacgctttccttcatgagtcatcatcatttcacccacatcttgatctctaggtctccttttgcaagctttccaatgacgatctagagtagttgttccattcttgtgtaaatgccaatgatagatctttccacagtaattgcatctcacatcttctttaccatcaggtcccttttctccaataattgtaagatggtcccaacactcagcagtaagtcgtcgttgccgtttctttggtccgttcttaggttttctctgtgatcgattgacaccttgcctcgttggtggtggtgttggacctggaggtggtatttcttcaatatcatcaagaatatccaaattctcctcttctgaatcattgtcatcaagaagatcttcatattcaaaaaccatgatgctgtaaaaatacataagaagacatgaatttttttattaaaatagtcgttcacttgtttgacaagaaactctcatcaggtataaacgtaatcggatggagtgaactcatgaatta

SEQ ID NO: 8047 - DNA, 1171 bp, Arabidopsis thaliana landsberg
aatttatctattgcaactatttctcgtaaattaatttgtgacagcccaagctcgatgaccctaattaatgatagggtaatattacttgctttaaattatcatattccacataaaacatatatcagcttgtatgaagaaaagtctgaccaaatagtgttaaatctatgcaaatgaaattgtgcatttgtatatatatattgacctctacatccaaaacttctaccaaatttcgattcaaaatcttgtagttcaaaagaagattgatcaactataatggagaacgaatcgccctccaagaaaaacatgccgccatcgtgcggaacactcgtaaccatcctcagcctcgatggtggtggagtcagaggaatcatcgccggagtaatccttgcctatctcgaaaaacaacttcaggtttatatctatataaatttcagtagaatgcaagttactaagatagtagatacatatgataggatcataactcgccatgcgaattttgtagtagttaagtccctgcatcgatttatgatcactaattcatattaggttcttaccatatagtaactatgattcatcaaatttttgtatttactcttcgaaaaaataaaattttgtcggtatataaaggaactagatggagaacacgtgagggtagctgattatttcgacgtgatagccggaactagcaccggtggtcttgtgacggcgatgttgactgcaccggacgagaacggtagacctcgtttcgcggctaaagaaattgtgccgttttacctcgaacattgtcccaagatatttccccagcccacgtaaggaaattatatttcgctatatactaatatcaaataataattatatacaacttatgttcacatgttaacaccaaaaaaaaaacttatgttcacatgttcgaacatatatattaaatatattatttggaaactttggaggaataattcaaaccaccagtaagaaatgaaatgttttagtcctcagagaacaagtggtgtatttggtgtcccattcccatatatttgttttttctaatgaacaattagcatatatatgtatatataattccacgtagcaattaaaagtaaactctaatgaaaattgcagaggcgtgcttgctctgttaccgaagcttcctaagcttctgtctggtccaaag

SEQ ID NO: 8048 - DNA, 2063 bp, Arabidopsis thaliana landsberg
attaatgggtcggttctgaatcaaccccggtggccggagatgcacgtcgatgttcgacggaaatctagacatagctgcttgttgctgttgttgtttttgcaattgctgcaatagaagcatttgttgttgtctctgttgttgttgtagttggtgttgatagagaagttgttgttgttgctgctgctgctgaggattgttgttacctcccaatggtggcttcgtgtcctccatttttgctttctttctcttttagggattctattttgggattctagggtttttcggggaaatgttcttcgccgtgaataatggttgtcttgtctaagtgagagaagaaagaggcttgtgatttatctgggccaatctaattgggcttttatgattaaagaccacaaatattaagccaactaatcagactaaaccgggaagacgatagccaaagctgaacccgggaaaacgatagccaaagctgaaccgagaatgtttcgattttgatttttgaccgttcaatatcaaaagttattttttgatatcagacattattttactatatgattcaagtaaaaaaatacatgaaattacagagtagttgtcttataacccttaggaaaaaagaatgaaaatacatgtaatctctatggacttgcttgaacaaagggcgtttatggcgtgtacattcattcattacggtccaaaaacaagttctttcaaagatctaaacggcgagttgtgaccataagccactgcatctctccacaaagccagtcctgtttcatacaaatgggggaagaaacggttaaatgcgttcagagagtgatttatgaacatctcacacttgaatatatggtggaaaactaaaaaatggaacgatgataatgtaagagagagtatctgtgaagtaaccaacctatccatgagatcaaaccaattgtagctgccacgaagaatgactggctggtgcaatttaccctgtggagaataccggattatcgataaactcatttacttgtgacaaaagagagttgtgtgcaagggttcttacaggtataagcaaagaatatttccatatccataaaagagagttgcccatagcgaaccagtgagcctgcgtcatggtttaatgaatatcaagcagtttttttactacgggtgaatatagtttaagctgaaaggtttcgaattgagagagcttatatttaccacatcaaatcacggataaatagtgctcgagggatcataagcccgtttcccatcatcgagagcaacattgtgattgacgataagccttttatgttgtccgggtttagaaaatttgtccactgaagtgtagaagaacatcagatatccaatagggaaagagcaattaggagaaagttcaaagaacgagagaaaaaatgagttgttataccatttgggaaactggcatccacatgaacataagagttgctgtccatccagataaagaccctacaaacctaacacctttctctgaaagtttcccagttcgagcctgcattcttaccagtaggtagttaagagaaaagaagaacacttatccatataaacaactacacatcttaacagttgttttgaaggatctacgaaaccaggaattagttgtcagagaatcctaatacagacttggagaaaaagcatcaaggccaccattttttttttctataaaaaagaaaactcctatttcctgacatagttttttttgttcataaagcccaataacaacacgaggactgaagcgaaattgcaatgaaagagattcggcatccaacacttagctcaatgcaaatggttacaatattacccaagctaataatatgaaaacttgttaaaaaggtttcgagataatctcctagaggctaaaagtgactgatatgactaaccaatgtcaacacgttacttacagataaaattatggggggaaagtaaaaagtttttgaaagcttaccatgattatagctgccacagcaataccaaaagcagttgtcccaggcaagatactgtttggtacaagagggacaaatgttgaccacatgatctgcaatttt

SEQ ID NO: 8049 - DNA, 2909 bp, Arabidopsis thaliana landsberg
  unsure (1)..(2909): unsure at all n locations
attgggtttcgacggtgctcatgatgttgagcattgtcttgctgattctggtgtcgtcaaggatattattcgttatacaggagaagcggaggagattcctttcgtttattctcttccccgtttcccttttaacagaggaaaaagaccagctcctagcttttccgatattggagtagaagccaccagatgagcatattcctgtttggcttcctgcgtttcctgaaaccaagatgtctaacgggtcagaggagattaatgttgacaaaatagaaagggatgtgcagagtagagataatggatcatctttgatgagtgtgcagcagtctgtcgatgttgataggttaaaagttcagaaatccatggatcaaaaggatgttcagaagccaatagaggaaccggaaggtaacccatttcttgctgcaccaatttgggttggagagaagaatgtgtcactgtcacgtgtggtttgcccgtcagagcttaggaaagaagaaattagtaccaaccaccttcctgagaaacatatgagcatgagccatcacattccagcacttgaggcatatgctctatctgataagatcaacgacaagaacagattagctggaatggaagatgaacagaaaagagatggtgcaagaacacaaggagctttgcttcgtttcaagattgggactcgaanagcctctgaatgttggaagataaatcagtgcttagaggaaaagggttggtttaaagaggatggaaacaagagggagaagaaggtagaacgcgaagaaaagagcgaaagtattgacgcagatgtaaaataggtattttgtcatttagaatttgtagacggaatatctttgcatcctgagtttagtgatagtttgcgattgaatacatgacttgttttaggaaaagagatttttttactgactcgaactgccagaggaagagaagggtgttctgtcttttacatcatttgctggtgaaacatttttttaaatgaaaatataatatcctcagttctagttaagcttgattcctttagctctggtagagtggtgttttggaagaaaaatggtgttttgtctttacatcaattgaggtttgctgaaatattcttcttgatggatataacattgttgagctttatcttgagtggagtcttttacaaaacatttttatgaagtttacataaacaactaagaaaagaacataagaaaggggttcagagaaccaagaaaccaaatgttctcaactctgtaaaatggatgatttagattccttgatttacaattctaagtgaagattaattaggaatattagcaatgaaaaagctgccttggttgcccactgagcatccttggaaaagctgcaaactcgcttgtcacaacttcaccaatcaagtctttgaagattagcctctcaatgtctaacactaaccctggtgtctctccttcaatctccttccagttcatgccatggctttgcagatcctcccaaatgaggtcttcatcgtcctcatccaagatacactttgagttatcttgtaatcgatcaatctctgaacacagagtttgcagaagctcttcccctcttgaacttttttcgtgtgtcctttgcgtgctgattgataatgttatggatggttgctttgtacacccttctgcagcgaatctgtgagctaagatctcgttgatggtgtcaaatatgagcttcctcttacttctctcaaccaggttcaccgtttgttgttgtccaaatcctctgcctttgtgcttgttgtcctgtagactcacattgcttgtcttgttctgttccagtacaaagaaaaggctcgggttgatcggtaggtgtgcttggtgcagctggatgcttatcatgctgtagtcgatatctcgtagaagccctgatgccaacattatctctgagatgtacttgtggtcaccatttttgaattcggcatcgtcttccatgaaaccctccgtaagttcagcatcaggttgctttagactcgtgttactctcaggccacacaatcgatctacataagttgttgttcttgttcatccaatgggactcttcagaacttagattgtcgtcctctgtgacaagagagatagtaaaggtgagaaactttaaacaaatcaaaacttgcaatctgttttgaatatatcttggacaaatgtaacgagtttaatatttatgaacttgtagtttaacatttctttttttggctcgcagaaaagttgaatgccagactgaattttctggaccttcccagtgactcacctttaaagacaatggatatcttccgcacaggggatggtgaatcatcttcgtcgaaagctacatcaagaactgacaccgggctgggctgctccactgtaactttcagaggttttgacagcgacctcattcccaagtctggactctgcattgataaatggacaagattcttgtgaaacatgtacttgtgaataacttgtaaaagagaaatttgctttaggagaaaagtttataccctttgtttcggggtgtgctgctccgtaatgtcgctgttcctctcatagttatacctgcttgtaacctcagtatcaaggttagaggccaagcttacgttgctgtcagatcttagacttctcaagtcactgctttcatcacttaaacggtcttcagattgctgtaggccacgagattttatccctggctttcttctcggggaggctgactctgtctggtgcctactgagttgttgtctctggttcttgttcagttctggttttggggatgttggccgagactgcttctcgaacccaagcttctttggtggtgttcttaggctgacactaggcttctggatcttccctgacttgggcatgtcgcttttcgattggaatgggctggtactagtgtttttcattt

SEQ ID NO: 8050 - DNA, 883 bp, Arabidopsis thaliana landsberg
  unsure (1)..(883): unsure at all n locations
ttggaagttgtgtttgggtttatccttctgaattctgatggttggagttttgaggaatgattataatgttttttattcaatgagaaaggtcactgagtcatatttatctacctgttcattatctcagagtgaggaggcctctattgacgatttaatggagcttgtgcagcaaattgttgcttttcacatgaaggtgaattcctaaactaataggcttgagattagcacctctgcgatttatttatttctaaaggatttcatttactccttgcagcataatgcagaaaccgaagctgttgatcttttaatggatgttgaggatcttgatctcttacttgagcatgtagacaaaacaaatttcaagaggacatgcaactatctcacaagtgcagctaggtactttaaacatagtcaatcctatttattttatttttcctcactctttgttatttgaactgatcttgtagaaacaagtggtgagctttgtttatatttgcttccaaaaatctctctgacgtcttatatnnnnnnnnnnnnnnnnnnnnnnnnnnnnnnnnngacatgttggttctagatatttcctacatgatttacatgaagtttgaagagtatccaaacgctctgcagattgcactatttcttgataacacgcaggtaggactttaatctttctatagaatgtagtttcatttcattctttctgcgtgtgaagcatttggaaaaatcaatcctctatgtcttatttcgagtatttgcgtagacatttttgatatttaatgtgctgtatggcgtattttctgtatagcagtatgttaaacaagtatttacctcattgtcggatctgctgaagagaaacaagtctgctacatgaatgctcgtcatg

SEQ ID NO: 8051 - DNA, 2241 bp, Arabidopsis thaliana landsberg
aagtttaataatcacaaagtagctaaataaaaaggtgtgagaacaccttattcaactccaattttaaatttccaagatagaaacaaatacaacagagttcaacaagtttataaggttcaacattgaaaaatgaaaagaatgagaaaacacgaaaacaagatcgatagtattattgtacattttaatacaagaatattgaaatcacataagaaaacaaaggaatttatacaatttaccaaatgtagtgaagtgttacaattgattcttttatctctctccctcaaactttgcttcctccagtggctgatgagctacatcataggttgcatgaagaccaacgaataggtagtacaaaagcatcaccatggtgcagataatgaatctcaagaatgctacataacctagtgatccgataaggaatagattcatggcgattgaaaacgatggcaaccacggaactagtgggactccccataccttaggaacacgatatttcggaagcaatgccaaccctaaagtgcctataaaccaaataactccagtcactgtgtaagcgatccaacctttaacgcctgagttccaaagcgctgatactccaatggaggaagcaattatcaaaaacagaaaaccaagaaacttcaacaaaccggcctcaggagtgacatccttcacgtagtaacgtctcacaagcaatgctactgccacgagcatgaaaatgaagagggtagcaaaggagaaaacgcttgatagaacctctaagctggtgaagaaggatattattgcactgagtatggttacaaggagagtagcataaataggggttcctgtttttggatgaaccaaagcaaaccatggaggaatcatatgagaccgagcaatctgagtggtgtaccgagcttggcctagagagccaacaagcaggcttgtggtcatgccctttaaagcgcatataccaaccaagtacttagcccatttcatcccaatctgagcaaaagcaacagaataagctgcattcgcatcaatttcagtgtatttcaccatcatagtcaaggccagagccatcaaacagtaaaccacagtgatcatagacatcgaaccaaccaaaccaattggaatatctctggaaggtttctcggtttcttcagccatgttagccaccatatcaaaaccagtgtatgaccagtagacaactgcagcagattgcaccacacctttcgctccataagggaaaaaaggaaccaaatttgaggtttttgaatgagtaaaccccacaacgacgataaacacaataatacaaacagtgaccatggaagtaatcaaattcaaccaagaagtcctctttgttccagtcatggcaataccattagcaactaaaagcactgcaacagcaaccggatccaaaagatcaaaccctttagcaaaggaatcgactttaatccgaaaataatcagaatcattcttgaccaaactagctagatacgaagaccatgacctccctaatccagcagcaccaaccatagcctcaagaagaatattcccagcagcaataaaggcaataaaatcccccaattcaaccctaagataagagaaagaacctccagcgacaggaatctcaactccaaactcagcataacagagaactgagagcaatgcagagacaccagagataacgtaggagagaacaacagcaggaccagctccaactcgagcctcctgacccgtgatcacgaacacacccgaaccaacaacagaaccaaagctaagccagagcaagtcccaccaagtgagacaacgacgcatagggttctcgctttcgcggcgggctgcatcgagctcgtacgcatcggaagagcgagagagaagacgatcggcgaggcgtggacaagtggcggagagagctgatttgtaggtagagaagctctgaaaagagaattccgggaaaaaatcctgcttcctccatctccagtagcttctccgttgacttaggtcatcggatctcgactccagctggtgagcttcctccattgaagcagggatcgtctcaaatccacaaaaaatccgaaagagcgaataattggcaatttaaaaacttgagtgtctaaaatatgatataaaatagttatggatcgaaatgtacatagtcgtctaattgtagttaaaattcgtgcagcgttcactgaaactgaaaggtggtgacagcacaaccctataaacgagggacccacctaaagcttttattga

SEQ ID NO: 8052 - DNA, 1691 bp, Arabidopsis thaliana landsberg
ttccactgtcaaatactgttaatagattcttcaatcctgttgtttttcttccgaatagaagttcccctcccattgcaggggaggagtgttttctgagaaagaaagtttcaagattatagcataaagagagaaagaagtgatcggtaaacgataaaaataagagaagagctatctaattacgagtattcacgagacattggtgtccatgagactcttgaagaatcataaagatcgtcgccaaaaaagagaattcctccacctaaactgcttaggcaatgaccgataacattctttacataaccttggctatgaagctgtgacagaatgcttactttccccctaccaagccctaatactccatctagaggatgatgactcgaagcccctgggatttgatcgtatccacaactgttacacaaaaaactccaattaggatttactaggaactacaattgctaaaatcaaactgaacattgccggtccaagattgtagaaatagatatataccctagagcaagacggggagtgagccggagaccctgtgtatagttcatagagaagacatctctaacaagaacaccgagagaagatcctccatcagcatactcaacctcatagtcacattgctctggagtctcacatctctgattactattcaaatgcaaagccttacacagtggatcattgcaaggaataagatcactactaggctgatacagtggatgaggcgcctgaaataaataaaaaagttcgtaagatgaaactatgacattggatccagagaataacagaactgaagatgaaattattatgatacctccaagcaacgaacacaaggagcatcacattggagccaagtgagatcactaccagtatcaagatcaagataataaggtcttggtggttgtcctatgttgatggttacattatagtacctgtttcaaccaaaataaattgttttagagaatttctgaaatgagggaacgcacgcaataattttgtgaagttgagtttgcaaatatatagattacccaagaggataaacgttgccatgaactgggaacacgactgaagaaacagctctggtgaatctatctgagaatcctgcagttttcctccatctgaaatcaactgccgacgaaaaacccagaaccagagacattaccatcaacacaatcataaaacggacattcattttctccatcttttcacggcttgtggcaaaataataaaataaagagaaaattttatttgtattagccaatcacgtgatgctgatgatgaagtttgaaaacgacaaaggccaagacatttacgaattgaagatatttattacaaagaattgtctttttgttgatgcataagcaaagaaacctttttaaatttggtttgcaatatgtagacaggtaataaggattcttggcttaaaccataggggacttgagcaaaaaatattccaggttgtttcttagtatctgcgaaaatcaagaatcgagttaaggaatattgctgatgagaaagggtagagccaaagtatatcttgcagctgaagtaagcaatcttgcaggcatcttcttcgattcaaattgattcagaacaatgagtgagattcacaatcattaatccatccaagtgaataagcaccttttcacaatcttcgattcttcgtcatcatcatcatcatcatcagt

SEQ ID NO: 8053 - DNA, 1285 bp, Arabidopsis thaliana landsberg
  unsure (1)..(1285): unsure at all n locations
aggagagttactcaagatgtacaaggcgtcacgccattcttgaggggttttcttggaggccatggctcggccaatggtgaccaaagctagaggaagaccgtcgcacctggctgcaacctcttgagccactttggctatgtctgggtggctctttatagtatcttctccaacattcttcttaaacaagtcccaagctcgttcccatgccaatttctctactttgatctttgtctgtgcactcatctccttacaaacttcttcggaacatgtcgtgaacacnnnnnnnnnnnnnnnnnnnnnatccggtggcggaactccagctttcactgtacaagaaaagcagatcatttatatcacaagtaatataaacactattgcttgcaccgtaagtaatctttataaacccttaccaagatcaactttctcccaaacatcatcagaaacaaagcgaaccgtctcttactcaagatctcaaagatcttcgcagctttctcttcctcggacttactcgtccaagtcctatccaagaacccaatcttctccctaatcgtatcttgaatcttctgaagattcaggttcttggatacaaacacccacaaaacaaaatcaaacccatttgctttctgttgaagcaacctgttattaacctgagtcaaaacagtcgtctttccaacaccttccacaccatataatccaataataccagtgttctccatcgtcaaacacctccaaaccaaacccgaaaccgcctctaacccaatcgtctgctcatcgctatccttaatcgtcaatccgccacccgcccctcctccaatgcctccagtgctctcagcaacaacttcaaacattcctctgctcttaatctcctgaacctctttcagcttcttgcaaatcttcttctccatcttgtggctcgacgatatcaaaccagaagaagaagacgaagaagacatcaagaaatactcctcagcttctttaataacagtgtcggcttgtcttagccatgtttggactttgtcaagccgcttcatctgttgctgctcctcacaaagcttgactcttttcatcacgttgtttccaagatctttgagctcctccgtcgcgattttcagcttctttgcattatcattcatcttcccaacatagatgcatctagtaaccaaactcttgaaatctttccccatctttcaagattttcccaaagtagattatcgaaaatgtgttactttgtgtgtgcatatatatgaatgtgttttattagactgacttgcacgttgtgattttt

SEQ ID NO: 8054 - DNA, 2518 bp, Arabidopsis thaliana landsberg
agccgaatgaacaaacaacataaaattcataaaatttaatgtcttttgtctcaatacttcgttactcagctaacgcgtcgcaaccatcaagtaaagcatatcactacaagaaatatggatattcttaacacatggaaaaattacaatatcgtttacatatcggactcacaaacattatatttgcaagagctatcttagagtggtcacatagagtatcgttttctgtcatgctattaaatgtacctgtataatagcatgtgattattgttatcgtgctctattttgtagcacaatatttcgatatataaacttaatttgtatcatttttggattgctataatataatttatagtaggaaagtgttttgataaatattttctctttaataactatatagttttgcaataatatctttagctacataataataataataataataaaaataagcaaacttgagaaataacccagaaactgttaattatctctagatggttgattatattgacctttgtggttgaaaccatacgaaaaaataacattgcaatacattaacaaagtaatattttcatttattcatctgaagcggcgtatcctttgtttccagaatacatcttccgtgatatctaacataatgaattaaaggatcattgagcaacactaggatcgcccaaaaataaattaacaaaccctttgaaaaatgttgtatttttcatatattaaaaatatttcaaaaaggacttcataagatgtcgatcataagttatttttagaaactctaaacgctctcaagctctaatatcgaggaacctaacctaaccttgctttccgacgccggtgaagcttcggctcgttggcgtcgggatttgtcctttcttactcacgtctttagcattctgttttcagttttactctttttcgggcccatgtgtctttcttttcaaaattgtgttctcccagcaagcttccaaaatgacttaaccgatagtgacaaaggacgaaggagagggtcggcgactcctttcttttccctccctctatccacacccattccgacgaagcaaatacaaccatatctgccacaattcttccgatctggatcaaactagaactatgtaagagcttacctcctctggatttcgttgatggcaagagattctactcttggactgtcatatgcaccacgttcaggggagtcgtcgatggtgcacggcgcaaccttcttatgggttgaaagcttctacatgtttaaatttgagacccttctttttatcctctttgctcttgtttctgaggatcttataaccatgaagctgatttcctttccggcgacgatgagcccatctccgacatctttcgttgcagcgcatccgcctaccaacgtccatctatcaaacctgcaaaaggaaactagggttacagcgaacgggcctgatcctctgttgtggcccattagcaatgcttaggcctaatttcattttgagtggagttgcagttgggcttactgaaaccctaacctctctaaagatgatatttaatgggcttggcccatattctcatcaacaaaactcaggccctgctgtttatccagagaaagctctctcttacgcttgtggtcgatcaatctctccagcttcgcaaaggtctgaatttttctctaaatgtactcaattatttgactggatttctcgattcattgtgctgcttgacttgggacatcaatctagccttgaattgttaattctagttacatattgtgttcaattgtctcgaatcctatttgtaagctcatctcggctttggtccgaagaactctttaatacgaaggatagcaattcaactgctctagtctcttctcatgtgggatgggaccattactatcggacgaaatatactaatcgcgacatgccggcttctaccttctatgatcccaaggtaacactacctttagtacccatctttaccaaggagcccaagcttcatttaaaagcttcctctcgatacctatctgttcttgttttcaaaacaattgtatacacttgtggtataagaatctgatggtacagcaatgctcctctttggcgaaactttcactaccctccttcgatatggagagaactctcttttcgaactttacatggtttcccacttgcaaggtgagtaaccatccaagacttctaactacctcgtcacggttcgtgccggcaaccgttgaggtaaaagaatccttttcaacgtcattgtcacatgatatatcgatagtgactacttgtaatcttctcgaatcattcgcggacgtgcctttgacacaccatgaactcgcttgtggcatattgctttttagcctttgtctccgagttttcatgactctatcgccacagcttgttgtttacttttttgtttggtttagcttccatgtcagcttgttcctctgtacgttcattatgtcccactttaaagtggaagggcttgtaatctttaacccctttttttgggtctgaatgaatacaactatgtt

SEQ ID NO: 8055 - DNA, 2385 bp, Arabidopsis thaliana landsberg
  unsure (1)..(2385): unsure at all n locations
cgccgttaagacgacggttattgaccgagcaccaccagcgttaagtttgcttgacagagcacgaaggtaagggctctttagggattttccgagagggtaattctcaaggaggagctgtttaccgacaacaagagttgaaacgccggttttgtacttctccgtcgtcttccaccacgacgcgacggatggaccttttgcggcggtgacagaactgatagagcggatgaaatcaacgattatggaccgttggattggggtgaattttccgtaccaaatgagattaagagtaatgtttccgttcaaggttcgaaccggaggcttcaacgcggctgcggtaaagccgacggtggcggagaggagaacgagaagaatggcaaaacggtagttataagccattttgggagtatatagagtgagaagagaggttgtgttctgtttttgaatatgagttttgtgaaaccattgagagcttatttatataccgaggttttttgaacgggcaagagctgtaaaatgcaaagagcgtacatgtcaacgtatgccacgtggatatatttaattggttaggcaagtttttggacagcctgtagtaaggttcttcttagggtgacgtggtagtttccataaacgtgtattatcaagtagtactattttttggtttttaaaattttcgaaatgtagatattatgcgacagggataaacacttccgtgcatgtccggataaaagtttatactatttacgttgaacagtttacgtctgaagttattgaaagatgcaattcaataaattcaagggttatcttatcctgctaaataaaattaatttaaaaaattgaataaaaacaatgtggctatgaaatgtttaaggactatgcgcattctaaacgtttttaattaaaacaccaagttacggttacatgtaatcatcattgacaaaaacatgggcgtttaagatgaccgactcagcccatacaaaaattgctgaaggtaagaccaagatacattgataatacgattggctcagatggttttattggtgtataaaaaaaattggctcctaaaacaaaatttacgtatatatagtttttaatatttcccttatttgcatatcattgagagaatgaaatcagaatttggatttattaaaataaaaatgacatgcactaagaaaaagctactagctatagctaagctaagctacatgtcttggctatatatattgcaattaaacattagatattttagtttatcattcgagtatacgattagctgcaactagacatctaaaccgacatacactaaccacactaatatcgtaataaaccatattatttaaatgctgcttcccagagctattcaaaatctattgttttgagggaacccataatggagatataaagcacttggttactgtagtagggatcaaatccttacgtatttcagtaatcaatattcaataatactatggaactatgtatacagtatcagtatgtaagtatatagagatctacaacttacaaagtattttgagcagtggttagtatagctagggtaaggcgtacgaaccacgccctttcctatgtcaattattgccttacatctgcgtggtcctctcttcttctgtttctttgcctttccctttttaaattctataacactttatcttttattcgtcttttttttttctttaatatcttcaaagtatattttatttttctaaattctagaacgttgtgaaatgttctatattcatggatatcgaatgatgcggtctcaattttcaaacccacttaattcatggtctacaactcactatacttttttttacgtattcataggttcacatcacaatattggttgtggtctcatcaaatagttgtagacttggtagtagaactttaaaagttcaaatctcaggtaaataaaagtagagccgttggatttacctacgtcaaggcacgacatacgaggaagatgagtctcgtagacccaccacatgtaagtactttttttaaaacttgaaatatatatatacgcctattttacgtcaccttgccagaactcagaactaggcagaactgtaagcttaccttttacctttgtatttaacacgtgaatttcagtcgaaaaaacaaaaatctactaaaatatctatcacagaagccacatttttacaaaaatacaaattatccgtacccaacgtaagaaaacaaaaacatatattattaagagaaacaaacaactgcagttaccaaaaaaaaagtttttgaatttattttacataatntttttatttttttttattntacataattgtaactacagaatcttgtcagtatatatatattaaagaaacaaaattttaatacaagatctgaatttat

SEQ ID NO: 8056 - DNA, 2015 bp, Arabidopsis thaliana landsberg
ttcctaattctaggtatcttctttttcttcttagccttttttctctcagagtcaaaattcagcaagcaaaagaaagataaaaactttctctttttgttgtttgttgtaacgtatacaagactggatttttattctttttattttatgggtttctcgaaagattcgtgctttcattgtaaagtgtctagaatcctatttctctctactgggtttgggttcttatactcaattagctgatttgaagtgtttttggtactttagatcttactgttagacacatcaagaatctccactgtttgatatatgttgtccttcatgtccccagagatctaattgattcgagcaatgttgtcttttagttgcggaatttatttgttgtgttcgattgtgaaaatttacaagttcattttgtctatatttcagctgtctctttgtttccctctaggatttttcaaaaattaggaccactcagtttcttttgtaagatccaatttcgcctttcgttttcaggattttgacttggcaagtagtaacatattataaatttattcattttcaactaaaatgatatgtttttggtgtttggtgttatagactaattgagtgatagcaacatcaaggaagcagaagcaagttttggtttttgtttgtcaatggataaagcttcctcacaagagtgtccttatccaggatgtttcttctgtgtaatgaaagaaggaaacccgagtaaacgaagatcctgcattctcaaattctttagagatcttccttctcaagacgatgatggtcaagttcttcccattagtggtctctggaacacagcaatggctcatcctaatgatcctgagttcattgagcttggaatctttgagtgtatgtctgctttgatatggaaaggacttaaaaaccggcgttggctatctcatgaccagaacatatacattccttactacgcggctcacattatcgggtcttacactatgaacatggaagagtttgctgagagagctgtagaagctggtgtgattcctccacttgttgagcttttaagaggtaggcttacttgggttgaacagagagtggcggttcgtgctttagggcatttagctacttacccgagtacttttcccgctgttgcggatcacggagagatcctcgagcttgctatacagttggcaatgagttcgttggagatagtttattctcatttttaccagtatccggatcgaaggttgagttaccattgtgatctgcttacacgaggcatgggaggtgtagagatggagtcgagaaaagcagaggaatgggcgagccagttgcagtgttggtctcttcagctcataaactgtttcgcttttaaacccgagtttcttcccactttgtgtaaacctgagttcttggtgaatcttccagttatgtggggaggacttgtgaatgagaactcgcctgctggtatcggtttgcttagaacaatctgtcagcataaactaggtcgtggacctgtctctgcatgtgcaggaatgattgaggccttgtgtaatatcgctcgttcttctgatgattggcagtatatggcgatagaatgtcttctttggttgcttcaagatcctaatacgtctcacaaggtgattgataaggcggtgccaacgcttgtggatcttgcggagatcacaaacttgggcgatcacaagaaacttggagattccattgtgagtgttcttcaagaatgcagctccatgggtaaccgttcaagggaattgatagaagaaacggtaaattctcgacagagactaaaatgggagaagagtatgcctaaagaggatcttcatatcaaacaagcagcagctttagtggtcaaactcgaaggaaactctctcttttcatcaggagatatcgcgggtgcagcggaaaagtactcggaagctttgtctctatgtccaatgaggtcgaagaaggaaagggtagtgttgtatagcaatcgagctcagtgtcatctcttgctacaacagcctttg

SEQ ID NO: 8057 - DNA, 596 bp, Arabidopsis thaliana landsberg
tactaagtctaaattaggaccggaaatataaaccaacttaaatactaatcaaattcgggtatatataaaccaacttaaatactaatcaaattcgggtccgatatccagttagctaaaccggaatattaaatcacatagctattagtttggttcgaatgatactatttatgatcgagaagtagttcaaatcttaccggagagagcgatcatgtcgttaaggctaaggccgtttttggcgaagagtgaagtgagtttattgacatcgtcggtcggatgcggcaacttccctccgacgctagccgctgttgatgatagtccatctagccttcccaattccacgtcgtattgtggtccacccgcctatattgaatttaatttaataacttatactaatgttttaatttaatagaataaataagcttgagttactaacaagattaacgacgtcacgagtggccatcgtgagaatatcagcgcatgaaactttgttacgacaatttgggacggcatcgagagcttctttagctttaatgacggtgtcgaatccatctccggccaacgataaattttcctcatgatccttctccgccttatta

SEQ ID NO: 8058 - DNA, 567 bp, Arabidopsis thaliana landsberg
cacccttatgaatattaattaattatttagaccaaataagtgatttttttacgcaagaaaataatatcaatagaaaatatgttttacattgacgaaacaatcatggaaatagaggcgtagagtggcgggaatggtggtgaaagtttgttggacttttttctgtacggcgtttctaacgatttgttcgacgttaggacaacttccggcgtagaagttacggcggagttgtgcggaggagaggtcgagggtgagacatagagagagaagaagcaataagagattcgttttgttcaccacaaccatttaaaaaaaaatattttcactcaatctctctatatgtgtataattacatgaatcgagtgagagatcttatatatatgcttttatgtgtgcgcacaagtagcgccggccagcttgcatatcattttttaaaagagaaaaagactaaatacttatctaattgttgacatcattttttgatggcttttttttaactatgaattttttgtaaatttaaaaaaattggatagaattacaaaaaaaagacttttccaatccataattttg

SEQ ID NO: 8059 - DNA, 1813 bp, Arabidopsis thaliana landsberg
tagttgacaaccacggaaaataacgactgagaatgtcatgttcttcttttttttttttttgaactaacttgcagtcttagcctccaaaaaaggagggagaggttacatcaaacaaagctgctttcgctaacgaatcagcagcaaagttacttgcacggggaatgtaaaagaaaccgatagtagtaaaggaaacactcaactctctaatctcttgaagcagccctcgaagttcgacaacgctggaaccggagttgaaaagggagattaacaccttacaatctgaacagacattaagctgacgcaaacctgcagattgagcatctacgagggccgattgcatcgccattgtctctgcaataagagcagaacctacaaaacatttggatacctttttttctcctatcttcatcatgtctgtggtctgaaaaaaccaacccataccgcaattacccgagatattccaagcagcatctacatagcagctgacaaactctgggttaggtgatggtgcagctaaagctcctggtaaggttttgggatttgtttctggacggggaagaagaagttgtgcctccatccaacttcgtgcatcagagatcgcttttaacagtacctctgcttcagtgaacgctcgatcttcaaacatcagcaaatttcgagccttccaaaggtgccagaagatccatggaaacaaaggagccgtggagaggcctgttggagggagcgtcaccattttctttgcccccaccaaaagaagctcaactgtcgtatgaataacctctgaaggcttgaacaggacaggtgctaagtcccaaaccttctttgcaaaagggcaacagatgagtagatggagtgcattctccacttggttacagcgtttgcatcgcacatcctccgccagtcccctgcgaaacagaacctctccgagaggcagagcatttctcataactttctagaggaaatgcctcactttgggagaagtctgaagcttccaaatactcttctgccagttgaaccccacattggccaccggggtactgttcagcttagtaagagcataaccagttttagttgtgtacacacctgatttaacaggtaaccagaccagactgtcttcaagaggtgaagaagctatggtaattttcctgatttggtcctcatactgaggtaaatgggttcttatggctaaaatattccaactctttgcatcatcatgaagtaaatctctcaccaaaaggtccttgttctgctctgttggagggccaataggagttgtgggtacaagagaagataaccagggatcagtccacactttaattttttctccctgtcccacagcccaccctaaaccccgccgtaacacctctctgccagccaaaatccctctccagccgtgggatgcagaagccggtgccttgcaatccataagtggggaggaggtgcagtacttccctaagagaacctgagctaaaagggagtttggctccttgaggattctccaggttagtttggccaaaagagaatcattgaattcagcaatctctctgaaccctaatccaccagcattctttggcaaagtaagcttgtcccaggaaacccatgccattttccttttctccgagtttgaatcccaccagaagcgtgtgagaactgattgtatctgcttgcataaggagactggcagtttgaaacaactcatagcataagaaggcatagatgagagtaccgctttaagtagaatctgttttcctgccccagataagaacttagtgcaccagctatgagaacgttgccgcattcgatccaccatgga

SEQ ID NO: 8060 - DNA, 1704 bp, Arabidopsis thaliana landsberg
  unsure (1)..(1704): unsure at all n locations
tggttgagacttgagatctctattgcaaaacaatattactgcttaaaataagtaaaaggaaaacagattaatctttctcattggatcttatttttctaaattcacaccctttgcaaaatgcaaatacaaagcaacataaaacaggaaagccgtattcactattgagtattgattgactagtaaccctcactgactgacccctacaatatcattttattcccttatagcaaaacgccaaccattccaactttcaaatttttacatatacatatggtgaattttgtcttcttcttcttcttttttttttttgttaaagatatggtgaattttgttagacgtaaatatatcgaaacttgtatcaaagtctagtttaaaaaaaaaaaaatataaatatatatcaaaaaaagaatcacgactataatatagtcgtcataatttgtttactcatttcttatgaattcggtcataaacaaagttaatgtgtaataaaactgatgtggaatttacaagtttgacaaaatggcaaaaaagagaaattgcaacacttgaaaacttaggttgagattgatacataattcacattatatagttgcaaattgcaatgaccactcttgaaaccaacggacaaggattcatctaaaagatccaacgatcataaaccccttgatgattcgaaattacacaaacggaaattgaaaagacattaaaattcaaattcaaagtcgaataaaattacacaagagagaaaaagagagattaattcagtagtcggtggttgggagctgctcgtgtgtggtgttgatgaagaaaacttcgtagatgagtccagcgattccaccgccgacgagaggtccggcccagtacacccagtggttggtccatgtccagctcaccaccgctggtccgaaagccacggcgggattcatggaggctccagagaaagctcctccagctaagatgttggctccaacaatgaaaccgattgcgatgggagcaattgttccaagactcccgtttttggggtcaatggctgtagcgtagacggtgtaaacaagcccgaatgtcatcacgatctcgaaaacgaaagcgttcaacactcctactccagcagagagaccaaaagccggcacagcctaaaattttcaaaaggttaattagttacttgacaaagaagttaggtccaaaaagagatctaataaagggctaaagggtagtttgacataccaagccaccggtggcgaatttaaggatgaggcaagcgacgacggagccgagaagctgagcaatccagtagaggataccacggaggagagtgatgttaccaccgatgaaagcaccgaaagtgacggcagggttaacgtgtccaccagagatgttggcaccaactgagacagcgacgaagagtccaaaggcatgagccagtgcggcagctacgagaccagaaggagtggtggctccgttttcagtgagcttgttgaaagccatgccagagcctgaaccggcgacgacaaagatcaaagttgaaatgaactcagccaaggccgcctataaggcatcgggacgggttgcttcatctggacgaccaacggcgatgtttctgatcggcatgatcggacggctgagatttaagcttcagatgctagaagagtgggagatggatttgatgatttnttctggtctactatgtgctcttacttatatctg

SEQ ID NO: 8061 - DNA, 608 bp, Arabidopsis thaliana landsberg
  unsure (1)..(608): unsure at all n locations
ccatttttgaagaataaaataattccccgcaacatgtcctttcttcttttgctcttcttcccaactctctctctctctcttctgtaaattagcctcaacgcagagctgctttcatcttgatcttgtagtgaattagaatcaagccaatgatgtttttaaataagccaaacccggcaaaaatgcaaataccactttcttgtcttttccgcttcagtttctttagtctacaaggcgtttatagaacagaacgtaagcagccgaggtcttgatcttttcttggctgatttggtggacatggctatcatcaaagtcataccatcgatcacctccatgctgcaaaagaagaagaagataatgaattcatccttacgaggtcaacaactataactctatgaatctggataccatccgtttcaacaatnnnnnnnnnnnnnnnnnnncatctagatcataatactatcttactctacaagggttccacagttttgcaacacaaacgcttcaaatataagaggatatataaatgtcgtttcacttacgtgaacatatgcagtgtaatgaccacctcccacgcccccatagttaatgcaaatcccccagagcatgta

SEQ ID NO: 8062 - DNA, 1365 bp, Arabidopsis thaliana landsberg
tggttctgaatcgacggatgttttttcgttggaatcccacatctccttcttcagggacatttttttacgattttgaatattagggtttatgctctgttctaaacaggggactcaagtaatctgacgctatgagtttgttgtggtttttaaaataatattatcatttttgttttaaaagaccaacattattatccattgagaaagaaagaaagaaaactaatatttgagttttttcattaaagaatctgttctttttttcttttggaaataacaaatacaaaatccataagcatttgtacatatatatatactttcttttttataagaaatattttatcagttgttcataaaacaatatgtgttttaagaaattatatcattataaacaataaaataaatctaaaaaaatcatcttataagtaaaatatatatatatttttttataagtaaaatattggaaactccagttataaaataaaagctaaaagtctaaaacagattaccatacacatgttgttaaaaacaaaatccaaaaaccaattaaaatgctactgcccatttataaagactttttcttcccacaaaagtttgaagcaatttccagctttattagaagcaaagtgatggtgtctttttattcaaatgtcaaatgctacttttagatatctagaaaaaaaaaagagaaaataatcaacccttaccaaaagacaaaacttggtataggtttagagcaactagtttccaccaaaagtgggaaaaaaccaacgagcatccttaaatagtattggcgatgaagtagtaagatgttcaaactcttggaccttcttcttggttttaatatggtagatgcaaatcccgtacttatcatcattgcatagactaacccctttatatctaagtaactcatgatgactaaaatatatgcaatttctcataactccatctttggctgcaaccgtgattcctaggtccaaaatcaatgcttcgtctcctatagacttgattaatctccattctgatgatttaggatctatcttgtagagtttgacgaagcatttctttggattgcttgaaatgatcaaaacttctccagacaatgtcacagcaagattcctgacatagtaatcatcattcggagatgggggagttgcatattccactggagaatgaccaccggagaaatcaaacacagaaatatttcgagctggattaagcacgtaaagtttgccttctttaaacaccatgttgatgcatccttgatgctttgaaggttgaaacactttccagctattattgtcccctcctttcttgtgatatgcaaaagtgctatgatgaaaccaaacaacaaagtaatctccgtttttt

SEQ ID NO: 8063 - DNA, 1145 bp, Arabidopsis thaliana landsberg
  unsure (1)..(1145): unsure at all n locations
ccccatgcaacggggtccgtcctgcatcgatttacaagacatgctagttccatacaaggtagcacttagttaatcatatataagctatttcagctatcttaattattcatcatgaacaaattagcccgaacgtacgtaccttcttcgcctgtagaattactggatgaagaatccatagatggaaacaactaaacaagagatcagagatatccgtgaatacgaagcttgttttttttattttatttttattttttaatgttcttaatttcaaatatatagagagaaaaattattattcttgttctcttaggcacgacgccttgtaattggtctgctcacaaagcaaccgcacttgtgttttttgattcattgaatataatttatgagtgactaactaaatatttagtaaagaaagtgggaaaataatagtcaacaaattgaagcgttaaccttgccataaaatcgtcttttcattcaaaaagtgagggattaaattacataagaaaattacaaaacttttatttcataggccagaagtctagaaggtacgtaggccaatattctagtttgttcatcataggctcatcgcgataaactccatatgattaactgcaacactatttgttatgaatttccaaataatgtattttaattttgagctaggtttcatatgaaatcagaataacaaaatagtagtacgaagtacgaaaaagctaattttaaaaaacagctaaaaacataacaaaatagcagtaagaaaaagtggaaccaaaaagctgaaagtatcaaagccgtgttgctaatcaaacccaaaaacaaataatccacccttaccaaaaagacaaaacttgatagtattaattcacaaccatttatcaccaaaagtggggaaaaaccaacgagcatccttgaaaagttttgtcgaggaagtagttagatgttcaaactcttggaccacataatcgcttccgatttggtaaacgcaaatacggtcagcgttataaccatcgcgtagactaatcccacaacatctatgatactgatcattactaaaatatatgcaatctctcataactccatctttggccggaaccgtaattnctaaatccataagcaatgcctcgttcnctatagactngattagta

SEQ ID NO: 8064 - DNA, 1894 bp, Arabidopsis thaliana landsberg
tgaagaagttgaaagatatggaatgttttgcttcacgcaaagagcttaacacgagacaagtacgctccattttgttgctttgaagtcttttttttcttcttcttcttcttgtcttaacctctttttttttttttagtcttggtaataacaagactaattaaattattattttactttttttattatctaccaacaaccaaaccctagttttgcttacgtccgatctcctccttctctcttttcttctctcccaaacgttgcctttcttttttttctctaatcacgaaccaaaaagcatcataatctcgatgagttaaatccatgtatctcaaaaccctaatcaccacttagctagtaaaaggaaaggaaaataaaaaggacttgtgtggtagaaaaggaagatgagcagtagcggaaaccctagcagcagcagcggtggaggaggaggaccgtgcggcgcgtgcaagttcttgagaaggaagtgtgtcgctggctgcatcttcgctccttactttgactccgagcaaggagcggcgcacttcgcggcggttcacaaggtgttcggagcgagcaacgtctccaaactcctccaccatgttcccgagcataaacgaccagacgccgtcgtttcaatctgctttgaggctcaagctcgtctcagagaccctatctacggctgcgtctctcacatcgtctctcttcagcaacaggttaattattcttttcataacgtttaattatatgattagtactatttatgatgggaaattgcaacagttttaagttgatctactgtctctatatcgtcacgttgatcattttattttaatcattttctatgtaattatgtttttaacttcttttttttttgaagaaaattgcgttttcaaacttttttttttaaaatgagatttttcattttgacttaatgttcaattaaactacaaagttaagtcctttttcccattctatggatctcctctgattgtcatttctaggatcatatcccatcatgcaatgatgcaaattaccctttcttatgcatcgattttttttttaattcattccgatttgttcttttaaggatgaatattttttgtttttgccatgatcgaaaaccaactctacattaaaataagaggtttaaaaatctaaaattttacaactgggttcatggcctttgccttttgggcaaagttatgtctttatattaaatgtcgtgtctatgagtctatatttatgtgatatagaacaagcttatcttttgatttacacttttagtaatagtagtttgttaagaaaacatgcataaagcataattctatgtgtgtgtatttcacttcacatatagcatatatatgaaaacttctctctatttcctagtttaaatctctacagtcgtagttaattggctaggattaaggaagttaagcgatcatttagcacatatgtattgtgaagttttgttgaatgtttacaaggtttgtttccaagtgattgagatgacaaatcttcctctgttcgcaacaaccacgttgttttacacttattcccaagcatcatttttttttttggtttatcttttaattgcaatatacatatatagtacacacatacacgagatatatacaaacgtatgcaattgcattctataaattgatgttagtgaaggatatttccaatattacaagcaagcatttatttatatgttatgtacaatgtcttttgtgttataattagattgttttattcagcatatatttttctaaatcggtggtcttgattgatcaattactcctgtcgtgtttctttggcattattgaatcaacaacatttgctcgaattcggaaactcttccattattaaagattgctgaaaatatcattttatctag

SEQ ID NO: 8065 - DNA, 1828 bp, Arabidopsis thaliana landsberg
taaaggctagtaagaaaggacttggtgaacaaagagtctctttgaacattgcaggcactcggatatgcgatggcgaatggctttatgcagatactgatggtatccttgtttctcagattgaattatccgtttaaaaggacacaagtgatgttgttgatttgttaaaatctgtaagctactacttttgtgctttgtgtttctgtaaaggctatcagagtaaaagttggcttctttgaatatgattattgaactattgaatccgtttcgagttgataaaaaaaaacatttcgtaaagtgaaaattgcaaaaagatccttgaagtatccatacaagcatttttcgtagatcaatttccaataactggatacttcgagggtcattttgcaatttaccaattttctaaatccgccttcttacaatttcacagtgcttcgttttaggtcaaacacaacgaaagacagaaaaccctaatcactccggcttcagctctgtgtgtgataatggcggcggagagatcgtccatcactctcggagggaaaggttcttctttatcttcttcctccgtttacaatgttgcttccggcgtcgctaatgttcgaattgactcttctgcgatcgagagattctccactagaaacgttccatccatcaaaaggagctcctttggtatccctcaagggttaacgaacgaagaaactcgagcttctctggctgttctcttaaacaagcttattttgtcgacttctggtcctccttcttcatccaccgctcgttctgttcttccgcttaagattgttgagattctgaatttgaaggctgagagtttggaattgggtgagattgatgtgacagaaggggaaaacattgtgttggagaagtcgtgtgcttcgttgattgggatttgttctattatagatcacaaatcgacgactctttcacagattgtggattctgttgctgcgttgagttgtgaggttacaaaggctgatatagcttcgtttagcttgttggattcaggagatgggaatggtgataaagatgtgattggtgttgctggtgatctcaaggttttgcttaacgggtataaaggtacagggaaattagaaatagaagagatttcgaaaatcccttggattcatgggaaatttaggtatgtggtgaaaagcgtgcacgcggatgctaggagagaattgaattccggtgttaaaggaggcaaaactgggtctggaaacactgggattggtgaggctttaggaacaacattgttacctttgttaacggcgattaaaaacttgggagtgtgttcgttccttcgtgctaagctttgtttgggaagattgtgaatgagaatctgaagaaatgtttatctgaaaagatctgtgttgagaatgagaatctaaagaatagctataagttagcttatactgctcatttggaagaggattactgcaggtttgctcacaaactgaatgagtgtctgggaattgtatggagaattgttggtttggaggcagttgatgccttttttgctcttgctggtggagaattgtttgttcagaagagcggagatgcggacaaagaagagtcgaagaccgataagaaaaagaagaagaatgagaaaaaagcagttgtgggaaaggggacaagcctagttatccagtttatcaaagatagattggtgggtaattacgcagcaattgatggtgaccagatgcattcattgatgcaatgtggggagattgtatatcaaatcttataactttacaacccagagggtcgcagttttgatagcttgttggataaagtgaaagagattgtagaaagtaat

SEQ ID NO: 8066 - DNA, 1295 bp, Arabidopsis thaliana landsberg
ttaaggcttgcattcttcctccataaacatgtcatttcatatcttaattcagccatttcttgtgttaagtcctctgcttcttccttggcctttagtttctcttctttcaactcatccttaggcataacaaaataatggtttaactagttagaatatgtgtgacgctgcaaaaaggcaccaaatttttgattctactgttttgtttggtaactaataccttgagctgctttacaagatctttgtattgaagtatctgtcttgccatatcttccattttgtctctcagtttcccatcctggaaaacctctaatttcttgatgatgtcatggaaacaatctgcatttacaggcgcttcactttcactttccaaccttcctctaaagctttgacgtaagtctttgatattcctttcagaggctacacatctctccatcagctccttgttttgcttctctaaacactcagcattctcttctgcctctcgagacttcaaccgtagctccttgactatttctcttaacttatcgttttcttggatgctttcaccttgaaatttctgagcatcaaagagcgcctgctccaacgctactatatcaagttttatgctttctatctcacactgagactccaatgttaaggatgagaccgactcctccagcttctcaacagaaaacaaagaaaactgtagctcagtttctgtgctctccagttcttgcaacaacaatagctgctcagatttcgacgaacacaactcctccctcaaatagttaacttcttcttccaatttccctgatttagttactctgacttcaagatcgagtacatgttcactcaggtcgttcatttcctggcttctgaagtttacttgatcccgcaaataatctgaaagacaaagaaagtgttttttagctcatataaaatatatgcctagatttcagtttcatgagaatctctccattaccaatctcctggtagcaattcaacaattctttctccaacatctgaattcttctcttatcttctaaacgagactctgacaacgaattcgcattcagttccaacctctagggtaaaaaaaaaaaagacaacaaatctcagaaaaagtttgaacaatcaattcactagtctaaaacacacaagaggaacatactctgacaagttcaacactctgtgactgagattctctaagcatctccttttctctccgtagctacaattacaatgaaaacatgagatcataaagccaaaaatatgaacttcatcaatctctgagacaaaggatatagagaaagaaa

SEQ ID NO: 8067 - DNA, 1063 bp, Arabidopsis thaliana landsberg
caaacttcttttgtttgcgtctccaacctcttccagtctctggatttcttctgactaccctaccatttgatttctatacaaatcaacatccaaacttgcaatccgtctttcaatcactcgagcactttccacactcagtttcaacagaaaacccatggatgagactcagaaatgtgtgtaaaggtaaacatcaaagctcaagacttttcataacccaggaagaggcagcatttcattggaagcaggcttttttacatctctcttgatcttaacaacagaggaaagaaaagagagattagattccattttcacatattcgaccaaaaacaaggaagcattacataagtagtacctgtgcttctagctcggatattctctgtaatgatgcttgttctatgcacacacggcgattgcgttcctcatcaagcaaacatgtcatcttataccttaattcagccatttcttgtgtaaggtcttctgcttcttccttcgccttcagtttctcctgtttcagttcttcctgcacataccaacaaccgcaggtataactagttggattctgtaatggtaacaaaggaaggaaatagagttcttcagtttttcaaaagtactttgagttgctttacaacatcttcgtgctgatgtatctgtttccccataccctccactttatcaatcaaattcacattctgagaaagttctagtttcttcatgatagcatcaaaacaattgctgtgagacacaaaaccaacattattagggacggggataactcaatttgatgacttaataaattagccttaaactggagcttaccgaacttcattagacactggaagcacatggctcagttcagcgaagaagcacattgcatttagaggctgttcatcttcactttctaaccgttctttagtactttgaaagaaatctttgatactcttttcagaggcagtaaatttctccctcaggtcttcgctttgctcttcgatgtacttgacattcttctttgccctttgagactgaaactgggactcttcgatattccttttattgaacttttctg

SEQ ID NO: 8068 - DNA, 2186 bp, Arabidopsis thaliana landsberg
atctccttttaaaatgtcccagcgaagcaaactaaacaaaatttgctttaaaatctacttaaacattataacatagttctcaattcttaaatatgctaaagtctaaagactatgtatcgtaagctcacaacaatgtgtatgaaatacactagcaaatcacgatctagattaccaaactgtggaagaaaaaattccacactcacaaaaattaacaaaatttttaaaaacaaattccacactcattcatgaacatatatagttctaaactaatcgccagtgactagtaattgcgaccagcgagtgcgatcaacgaattgttctgttattcgtttgacagttgctactttgttagtttggtagtcactatgatttggtcgctccatccaacgactggtcgtttgatagttgttgatcgaagtcacagtcattagtctctaacgtgcctttaatataaggaatcttaaacttaataataaagaacacaaaactggactaatacaagatgccctaaggagcaacattaattgtttcgttaaatccataatttaatttatagtacagtttgttacttataaaaaacttacacgtattagttttgttatagtacaatttattaacttaatttgattcaaagtttccagtatttcccacaattcaatgtcatatggtcaaacatttcagcgacttgggtcaacctcttttccatgttccaagacatgtgtctcgactctcagcgatttcaagatcattgtctcaatcttgttgctattttattttacgtatataggggtataaattatatatgattaagcttttcttttaaatttatgtacatcttttatagagttgtattttaaaacgagcctttatcaagttttagatttgaattagtggttatttatccattggtcacacgagggtgatgattgtgattagaaatgtcatgatggaataatccaacctaatccaatcctagctagtagatcttgctgattggtctcatacagttttataaaatgcaagctcaacgtttgtagtcatgcaagccagttcaattagtgacaagtaacaagacagattttgcagattttacttagtacggtctagttggagcatatctgatcttgatttgttttcaaaacataattgtgagctggtcttgacaacctagttttttttttcttaatatatatagctaaagtatattttgaaccgaaatccaaactaatctcttagacctgtaaaacattgattcatattttgtcatttaaagccttacatgtcaagaaagaactgtaaacggtatttgtaaaaagagtaaaactcgatcattggccttgacccataaaattcaccttaaacaaaccgttggaccacacgttcttagtaaattgactagtacatggagttgaaaccttttaagacgtgataagatcaatgatgccattagcaaatgtgttttgtaacaaactagaaagtgatggtctcatcttcacccattttggtagcacttttaagtaagtaacttaggcgtgtgaatgtccataaagtgagagaaaagagccaagggtttttggcaagttttggcaaatatgatgtgatagtcccaacaactttgtttatacctacctactcgcaaagagaagcacgcataaataatataaccttatgtcaataacttgaacttaaatctttgaaatatttggtctattaaagtcaagaaaattttctatatatataaaaaggaacatcaactattaagctatttcaagggaaaaaaaaaatttatataaaaaaaaaacactttataaaaaatacacaaatttaccaacgtgatgttggtctagtggtaaatctccctggaaatgctgggttcgagacatgttgggaagaaactattctccaaaaaatatgaatttaacctggtatgcatcccacttctaagagatgtaagatttttgggtttgaatttccagatattcaaataaaaaataaaataaaaaacacagaattaggactcatagttgtgcttgcggatgttaacacaatttgcttcgacaagatatatacacaaattaggtttggttaattcactatccttatgataatcataaagcatctgatcaataggctgtgatcatctcagattaaacatagtataaccgatcgacttctaaaacagcaag

SEQ ID NO: 8069 - DNA, 2568 bp, Arabidopsis thaliana landsberg
caaaagagaaaaaatcagaactctttttgaaacaaattagaaaattgtctaaatatctagatttctcttaatatggaattggaaagtaaactttttgcaaaatattagatttagataactttcactttgtaaattgagaataaagttttgtgcaaattattgatttagatcatttccatttctattctcaatctttttttgagcgttcccaccgattacattgctgccccgaaccaatataatatttataatagtatcatagccggctccaatggatcgttgtaatccattatggaccgcccaacttcagcccacaaaagaaattgtccacacgaaaacgctcaataatctataaacggaccatttggcatatttaagtgttttgcaagcccaaagtaatcatatccactcaacaaaaagtataaaaaatctgaaatttaatttaggtcgtcgctaagcttgttgtagggtacgtacgtttgggagcattttaattagaataagattagaaatttagaatagttttaatcctccgaaactttttgtagtacggacttttgggagcatttttatgagtcgtgccaatcttgcaaaaggacccatgcagagcaacaaatttggttgtggcatgtcggttaggtagcccaaaagcttcattttatattagttataaactttgctgttatatagttagtataaaataggataaatcttaccgcttttagtactttgaatacatcttatttactacaatgttaacagtcaacatggtataaattctattccatgttttgtttcaaaggttgacataacggacgaattttaaaatgtaactattgtaataaacagtaatgagtattaacttgagttactctatacaattgtttgtttcttgtgataaccaaagccatcacaatcaaacatttcactcttaaaacaaggaaacagtaagtgcaatggaaggtaggatccaagtgcttctctcgcaacgattgtttggttgattctcgtaaaaatgtgagtatatgaaagaggaagttagaccgatgcaatggttgcaatgtgagcatagtcgaatttcacctgccatggtgtttcttcctttttcatcttcccaccggattcactcaaggctcgtcgtttaatccattatcgcctatgtaaccgtcgcttcttcacctgcggccacaaccaatgcaaccgctataacaagtttgtttttgatctctttatcgaccattaagtctctttatatattccttaaaactctatattgcattttgattttctagtgcgtataacattgccgttacagtaaaaatttctagttttaatattcacaagcatggctgctatttcaattcaatataagttttatcatcgtctacaataatatatgaattttatcatcatatagaagaataacagagctctgatcacagactcacagccctgtaactctagctaacaaaattatcttttaactctcttctttattaaaaaaaaaagcacttagcatagtagcattttaactgatgtatatgctttccctaagcgacacttgtcctcatgcatgaaatcaaattcaatggacgaccgattcatcttgaccgaccacaaagatccaacggctagctggagatatacaggtgttaataaattgttatattccaaaaaaatgggttataatgtggcagctttttgatagtaacactgatgtatttcttacaataaacgaccaaaaagttaatacaagaaatagaaacggtgtaggaagctactatgacggcaattccaaacgtcgtcgatattgaatcttcttcctcttcgctttgtcaagagacggcaacggagaccgtcaccgttgaaagaggctcgtctgattcatcttcaaagccagacgacgtcgttttactaatcaagaaaaaggaggatgacgccgttaacttgtcacttggtttttggaaattgcacgagataggtttaataacaccgttcttgagaaagacgtttgagatcgttgatgacaaagtaacagacccggttgtatcatggagcccgacccgtaaaagctttatcatttgggattcttacgagttctcagagaatctacttcccaaatacttcaagcacaagaacttctccagttttattcgtcagcttaactcttacgtaagcacagaacaagtttttactctttagctatgtttcttgctttacaagctttgtaaaaactagagtttttttgtagggttttaaaaaggtcgattcagataggtgggaatttgctaacgaagggtttcaaggagggaagaaacatttgcttaagaacatcaagaggagaagcaaaaacactaaatgttgtaacaaggaagcgagtaccaccacgacagagactgaggttgagtcattgaaggaggaacagagtccaatgagattggagatgttgaagctgaaccaacagcaagaagaatctcaacatcagatggtcgctgtgcaggagaagatccacggagttgattccgaaccacagcatatgcttagtttctttgccaacctggcccaaga

SEQ ID NO: 8070 - DNA, 840 bp, Arabidopsis thaliana landsberg
  unsure (1)..(840): unsure at all n locations
atcctgctagtaacttagtataaattatatacacattattattctataagaattcttttattattgtggcaaggttaacgacttatatgcgactattattttcccgacttacgtatagtcataacgtagtcgttatttgacgactaccgaaatgacaatttattatagtctctatttagagactacttaannnnnnnnnnnnnnnnnnnnnnnnnnnnnnnnnnatagccaattcatagtcgctaaatttgacgactacataaacagtcgccacttgtagtcgtaataaccgtggaattttcttgtagtcaggcttcattacatcatgtgtttgcctcttaacattctgaaatcattaacacgctactaatttcttctttcaaaagtttcctcgctctattttcttcgtcagcatttgttttacttgctagaaaaagaatctatttttttctaagtgtttgtatcgtttgttttatgttctcctatcaatgggaaactgattttaacaaaccaaagacggttcaaaaagactaatacaactttctcaaaaatttgctagctacttgagaaaacaaaggaagtaaaatcccatgaaatcttgactttattaatttaaggttttatgataatagagatgaaacaacgaaactagacggtggttcaatttttcttccaagaaccatactaccacagtactgtcaattacgaggaaaaatagccctcgttatctcaaggggaccattcgggtgattgacgacgaanaccttgaccttagtagagctagaaagctaagtttgctgttttgatgtgtgaatgcgcgcactgaggatcgcatatgga

SEQ ID NO: 8071 - DNA, 2063 bp, Arabidopsis thaliana landsberg
  unsure (1)..(2063): unsure at all n locations
atcttaatagaaatgaccattccacatcctacacagcgtcttggatttctgatttcttcatgtcctgaaaatatataaacttaagattctataattatacacatgctcgaaaaggaaccccaagcaaagagaaacttgcctggcttggagcaacgtgatcaaggtattggctcgagcctgcagcttcttcaacccatctgtagacagaatcatcaaaagtctggttaccagcggccatgtgaatatcctgcatcagcttttctgtaaacccttggtctgccaaaagagcttcttcaagtgccatctgaaaatccctagggttgcatccacgcagttcagactgttcttgtaacctaaataacaacaaaccattaagcaaaacatccacatataaatcaaaaacaattattccgtaagattctacgatcgactcacctctctacataatccacaaatgggaaaatcatccctctcctaacccatgcataatcctgcttacataatcaagttagctacagtcaatactccaacaaacagctttcagaatcacacaagaacacaattttacaaacataccctttcattctctgtcccagagtgaccaaagaacataacacaagctgcatcaggtatacaagaacgcaaaacaagctcaggcgcttgcgtcattggatcaataacaatagccggccaaaacggctcattcctcccggatttaccccaaaccaaatcacccgaataaaaatcctctggcccataaacaccttctttcttaggacgaggctcatcatctacataacgctgcttcttcatctcaaagctattaccatatctaacaatctcttcacatttatcctcatcatctatctctccacacaatgcactactactactatacttatagttcctaggagtaaatttagtttcctgttgcttaatcttcaaactatgattactactaactttgactttctccttcctgcatgcttcttcttcaatctcttcctcgcgttcttcgccactacttttattatctttcctccaattctcgataaccgagtcattaaaccgtgaaggaagcacctgaactcttcctctagatgtcttcacaagcggtggccgtgaaactaatctcgttgactttatctcctcctcctcctcttcttcctccaccacctcaactttaggagaacacgaaacttgcttacacaaagaaacagagaatccattcttaccaggaacaatcccagcaccaatctctccaagaagattaagagggtaatagtaatcaccaccactaccaccaccattgaggttgacctttctcttcttccgaactatatcatcttcttcattagtcgaattacatcgtttcaaagttttcaactttcgtttgattatcatatcgaattaccaaatccaactacaaaaacgaacctttttcaaattccacaaaccctaatcgttccccaattctcgaaaaaagttccacgaacataaaaccagatgatcctccgttgggtttgacccactatcgaagtggtagaattgtagaagaaagtttcgttcttttggaaaaaaatttacccaaaaacagaaaagaacagagacagagagatctgtttcggacaaatccttacttttatgttttgttatcgctctctctgttttaaattataagaaacccagaaaaataaaaacacaatgcgtactttgtttttcgatttggataaggaaaaaaaaaaaacagaaagctgaattttgtttaatccgaaagacgattttttttttttttttggttgcttcggtgaacggaatttttagagagagagagagagcgtgacagagagtagtattaagagagagagaagaacgaggatgagaagtgagagagaaggaaaatgaaattaaaaaagattggtttcgttatcggacgtgtgcacattaccggagaattggctaacttgcgccaatgtttttcttccttcttcgntttcttattgccttctggttttgcaccgtttagacaaattctcttcatgtttttttttgtttcgttcaag

SEQ ID NO: 8072 - DNA, 606 bp, Arabidopsis thaliana landsberg
aagtgattgtgatttggaggaagaagaaatagaatgcaggaatgagaaagttgttagttttcgggttcctaaagctactaatttgaaaagcaaggaacttgataggaagagtaagtatagtgcattgtgtaaagaagaaaggtttcacgagcaacataatgatgaggctcgtgctcgtgttgatgagaagcttccgaataaaaagggtacttttgggccagagaacttctattcaggtgacttggtttgggcaaagtctgggagaaatgagccgttttggccggctattgttatcgatccaatgacacaagcacccgagcttgttttgcgttcttgtatacccgatgcagcctgtgttgtgttctttggtcactctgggaacgagaatgaaagggtacgaagagactaatggctttccaaatatggaatctggccttcttttaagtattctatttctgactgttgtttaatgtaagcaggactatgcatgggtgaggagaagggatgatcttcccttttgtggactatgttgccaggtgggtctctttatataatcaaaagaaaaggtcttaaatgtggattagtgcttaattagctacttattca

SEQ ID NO: 8073 - DNA, 454 bp, Arabidopsis thaliana landsberg
agaacaagggatcctacatacccttgaacatggtttacacaacaattgatctccaggaatcagatctttcattttttttgccatctcaaaagaaatgactgtttcacatcctgcacatgctagtggatttctgtgtttctttaacagcccctacaaagcataatgttaattagatatattacccaaattggaggagatttacataaaaagatataagaaaaaaaagtcatataaaaatggaccaaaatcatagagacacttgcctgtcttggagcattgttattgagctcctgatttgagaccgcagtttcttgaatccatctgtagaaagaatcgtcaaaagtcgagttcccagcagccaagtgaatatcatgcatcaacttctccgtgaatccctgatctgccggcaatgcttcctccaatgccatctgaaaattcccaggcttgcaccctt

SEQ ID NO: 8074 - DNA, 1718 bp, Arabidopsis thaliana landsberg
cattttcaacaaatcgagccacaagagtctctaaaatagtttaatgtaatgaaactcgggaagctgtcaagagttctcccgcgatatttcgttatgtttggaaaattttcaaaacaatgtaattaaatatcgcggagaactcattttcaacagaatcactcatccgaatttctaaaatagttccataaattttcacgaaataccgcagaaaaacttattttcaacaaaatcagccacgccaatttcttataaaattttcaaataattttttgggttatgattactacaatttacatttgtttaattttaaaccaaaattttggtctaaaaaaaaaaaaaaagttggtagttaattttggggttggagctctatataagcgagagatggcaggattctcaagacgcatttctctctgtctctctttctctcttcatatttcccggtgcttcgtcgacgttaggtcttttccgttgacggaggcaaatttcttcgattctctttaaaccggcggtccatgtggtcttaccgacgagaaaaccctaatttcagggattagatagctttttgaaacaaattagagcaatgaacacagagagagctcaagaaggtgataggaacgatgccgcatcttcctctggctgctccgagtcctacgagtttagccacgcagccgctaaagctgcagtagctcaggtctgcgagagcgttgggtacgagaatttcaaggatccagctctcgaatctctatctggattcgcactccagtacattcttcagctaggtaaaaccgctacttccttcgctaatctaactggtaggagtcagtgtaacgtgttcgatatcattctcgctttggatgatttgactgataacaatggcgaacaaggaatttcgtctgagagttgttcattaggtcgttcgattaaacttagggagattatcgatttcgttaattcgagtgaagaagtcccttcctcgcagccattgccaagttttcctgtagctataagtgataggagtaggaagatgatcccaagctttgttgaaattggtgaaactccacctgggaaacatattcctttgtggcaaccagcttttcctgatcctcatacttataaggaaacccctatgtggatcgaaagagtatcagatccaaggggagataagattgaacaagcgaggcagagacgaaaggctgagagagctttgttgagtttgcagaggaaacttgtttgtaaaatctcctcaaggaatcctgtgtggggagatatggatggtgtgaaagaagaaatgagagatgatgagagtgaactgcgttctgtatcgtccggggagaaagtcgaatcattgaatagagatggcttatcagtgatagaggcatttgctcctgctatggaggctgcaagagatgggttttctagtgaagctcacactgaatggaagaagaataaacctgttgctctttctaagctcagaaccgagaagaaatttctcggacaacctttggatctaagtctacagatgaagggtgaagatagacccatatcctttgtgcgtgaggaggatagagatgacaaaagaagaagagcggagttcattttgcgacagtgtatggagaacccagtagacctcaatcagttgtaaaataagtgattcattacagtctgtgtagcgtagtattaatcttgtgatttgtaacctttctttatacagggcc

SEQ ID NO: 8075 - DNA, 472 bp, Arabidopsis thaliana landsberg
  unsure (1)..(472): unsure at all n locations
tttctatcgaaacaaaaacttaccgattcctcgggaggaaggacacgctcttttcctattttctaactcgacgcatacacaggcatgattgtcgcaccaccggcacgtgagctttgcatcatcagttcatcttagcgatagctgtacttgtgaaggatgctgttatctgcttctgatgctcccttctatactgacacacacacatgtcacatggcattttattgctttcatttctcacaatggggaaactgttatatgccatacctgtcccgcgacggctttgagaagagcaataatacactggaagcctcatccgagggcgataccgatgtgacatgccatcacatcgcaaacgatggcaaagaacacatcacatgctaagaaatcataggtgatcccgcagacattaatgaacataacgatggcattaccatgcannnnnnnnnnnnnnnnnnnnnnnnnnnnntcacat

SEQ ID NO: 8076 - DNA, 1112 bp, Arabidopsis thaliana landsberg
tttttttgtcacaaggatccaaatccatatgctcccatagatttaccaaatttgtagtgaatagccaactttgtacagtgtaatagtataagaatacacacgttaaaaataaaagatcatttttacaaatgaaaaaatacaaaaagcccacaaggcccatcacgagacccaacaaaaacttaaaacgaattcatctctaaagcgttcttcttgcactttaacaaagcgacgaccgcttcaccgtacatacaatctccgacgaaagcctccgtcgccaactcagcgtcatctccaacttcaaaatccgctccgctaggtcgaacaatcacgagagtagctgattctaaacagataccactcttaagtttaagagacggcgcgtgtctcatactcatcctcacgctcgggacaacactcctcttattttttaccacgcgctcctcgtcttccacacgcgcctccgtatttcttaactctttaagcccttcctcgttcatcaccaccgtcccttctctttctttgtcacgcataactaaactttctatctcctcatgctccttcacgacttctctcatcaagtaatgacgagacgaagcagccatcaacgcgcttatagtccacaccacgcgcgtcttcagtccagtcacgaactcggcgtctgactcaccttctacggcgacgggagaagacacggtaccggcggaacggaacgcgacgatgacgcagcttttgagtgttttcccaaactcagctttccacttaacggctgcacctttctcgagctttacatcgccgccgggaagctctacgtccagatttcgaatccggtcgaaccgggagagaatcttgaaggggagactcggagagagggtggttattgtgattggtttagccggtttggataaaagagaaactagaccgctgaataaagatcggaaaatgcttgtgacgacgggtgaatcggatactgagaggtcgagtcggagggtgagtgactcatactgagggacaagcgagtgaaatctttttgaaagagagctgcatggaagtaaggttttgacagtcaacgactttgttcaagatgtcgaccatgatcgggccaggaagtccat

SEQ ID NO: 8077 - DNA, 1047 bp, Arabidopsis thaliana landsberg
gggccaagcagatttaaatcctgagggaagaaaaaaaatatatatatctttttagggagcgagtccatggagtatcgaaccctgctcttcagagccaaaagaatagtgtctgaaccactaggctgtgagtaactttttgcaatttaaaaatcaactctttccttagatctgatctcttcgaccatcggaagttggaaccctagtttctttgcgagggtaaacccagaatacatctaagagccaaggaaggtaatgtattcatttttcaacttatcttgtttgtatttggaagaaaagtgagagttctagtcttctagatgttttatattgttcttcatttactcaattttttcacgcagtgcaaacattattctcaagatgacacagagaacttcgagtcagatgagtacagagaaaaccaagaaagtagcagagttaaaccagactcaccggttaactatcaaacctacttgcagtatcgtttgtttgaaaagctgcatgcgatcattcatcttaattgttcggtttcttactcctctgcaaatcatacttattaccataacgtgatctagaagtttcaacaagaggctgatgcatagaaagctgatgaagaagctgaaactgcgggtaatgtaagaagtcactgctttgctcattttatcatatgctttagtgatgaacctcctttttgtaaaatcatatttgtttgtccggttctgtttgtgcatgtatattcagcaactacgatttgtcgatttaacctgaaaatttgattttttggcctggttttgtttcaaccaactggattagtttactcaaaattcatttcagaaaatgatcatttaaatgttgtggttcttgcaggcgaaatgcgaggaaacgcacgtgcgaggtgtgttgctcaagtagaaaccgagaacggtccaagatcagaccgtacagagttccaacggtggattatttagcaagacaaattctgggcttctttttgattatttagcaagacaaattctgattttcaagacttgctctagaatgtcattacta

SEQ ID NO: 8078 - DNA, 571 bp, Arabidopsis thaliana landsberg
tgttgcgtgaaatgcaggtactaattgattctgtgtttctttttaatactaaaaactgtttgtgatgactactgtcgtggctaacttgacaaagaatttggagcaagtttctaagatccttgcggtgagtttttttgctttatgtatgatgtttttggtgatttagctgcaaagttaaaactgaatcttaactcgtttgattgtcaggctgcgaataggcatttaatgcaaaagattcagagtgtcgatgataaagtaaaaaagcagattgatctcaacgaggaaatcaatagccaagtatgaattatgttggtgtttactttttctttagttcctatgattagaacgattggatttttattttgaatttaatgctaattatattcaaaagaaacacatttttacaccgagtgcggcgataatttaaaggacaataagctgaaataagattaaatatgcttacatggtcgtgcctattggcaataagaaaggcatttgccaaaaatataaataaactctttaggtccccaaatctagtaaatattagtgtattagagtggttttagaagac

SEQ ID NO: 8079 - DNA, 545 bp, Arabidopsis thaliana landsberg
  unsure (1)..(545): unsure at all n locations
ttcgacgattggctatggatgtttgacagctagcttcgcagcagcagataacggtcataaattgggtttatggtgctatgtaaagattagggaattgtaattctactcaaatagtttgctaagtgttgttttctatgtgtgtgtgttcatcaggactctcttcttttttggttgttttgagctaacctacaagcccttgatgttcctacacactgtgtcggtcaaaggaggtttcaatgttgtatggaactaaatattgtttatgattgttcactgattagggattttcattcagtgacctttatgtatgtgacaaaagccaacatggctactgccgtggctaacttgacaaagaatctagagcaagtttctaagacttttattgtgagttttatttttttgctttatatatggtgtttttggtgataaatttagctacaaagttaaaactagatcttaatcctttgattgtcacgttgtgaaaaggctnttaactcaaatgattcagagtgtcgatgagaactgataaggtagaaaaccagatt

SEQ ID NO: 8080 - DNA, 534 bp, Arabidopsis thaliana landsberg
caattctgatccgtctctttcgctagctaaaggtaaaaggcggaacaacaaaagaaaccctagcttcacctttgtacctctctctgttccaaaccatggtaagttttgtctaaagcttataattaattttcatggatttagtgattaagaagatatataatctgtaaatccatttctggtattgtgtggtggtctgaagtgagaaaatgtttaataagcaatccttattcttcgaatttcgatctgagatcatatgagttttctgagacattggattttttttgtgtggctctagcgttgagttatcaaattgagaagtttttattagatattgcaaatgtataatgctagtttttgtttggttttgtagtcgaagagaaagaccaaagagccaaaggttgagaatgtgactcttggaccagctgttcgtgaaggagagcaagtctttggagttgttcacgtctttgcttcattcaacgacactttcattgtgagtggcttctttatttttcaagcacagttagatttttatgt

SEQ ID NO: 8081 - DNA, 848 bp, Arabidopsis thaliana landsberg
agttcggtatgcccagttccttaccgcccagctgaagatatggccttttccgttgcaaggtttatccaaaagggtggatctttcatcaactactatatggtaaatctaaagttgtggtctttttttttttgtttttaccatgttcacaaagtaaataaaattgctatttcgagcttgtctaattctcatacacggtttgtcttactcagtatcatggtggaacaaactttggtcgaactgctggtggtccgtttattgcaactagctatgattatgatgctcctcttgacgaatatggtaagcttgctaaaacttaagtttttatatttcctaaagataaagattgttgtcttctttatcattattgtcatgtgttttcaaacaggactagaaaggcaacctaagtgggggcacttgaaagatttacacagagcaattaagctgtgtgaaccagctttagtatcaggagagcccacaagaatgcctctcggaaactatcaagaggtctcaactcaaacgctttcagtttttgttattagtgtttttgctgtggtcaacttggtaaacttttgttcatttgtaattttgcaggctcatgtgtacaaatcaaaatctggagcttgttctgcattcttagcaaattataatccaaaatcttacgccaaagtttctttcgggaacaatcactacaatctccctccgtggtctattagtattctcccagactgcaaaaacacagtttacaacacagccagggtaagaataatcaaaatatgcttcaagttgatataatgatatgagcaaaagatagactttttgttcttcttggtttttcctgagtactgaca

SEQ ID NO: 8082 - DNA, 535 bp, Arabidopsis thaliana landsberg
acttgtttctatgatctccttgaaaacttcgataatttgatccccatatttatttgcaatttcattaaggtacttcttcttgtgaagctccatgttcatatagtccaaatatctgaacaatgtaacatattatatattttccacataaacactataatctagcatgttataaatgtaactataacacacaaacgcaaacataaaagcagaaaccagcctttttcttcttctgtatggttaatatatgcacacgtaccttaaatcggttttggaaagctcaagggcattagctttcttagaatgttgaagtggaccgatgagaagcatctgaggagtgtatgcctctggattaactctccttaaccggttaggtactctatagatgcaacaatactctttgctaaacgaagaaggccatataccggaaatctcagattcatagcaagaatccggtttatacggtttagtcgtgacagaaacaatctttgctttctcagctgttccgtgtttagaaaccaatggatcacgaaatcct

SEQ ID NO: 8083 - DNA, 1008 bp, Arabidopsis thaliana landsberg
  unsure (1)..(1008): unsure at all n locations
gctaaaagccagtaaaagtgatctaatctatctttgttaaggtcattatcgcctaaccaaccttctttggtcccggaaccattactagaagtaactctattcacggtcgagacaagaacagagctaagataaaacccgaaagagtaagaacagtatgtcattgctgtgagaaaagattgcatactctgtgaagactgtttgtaaaaaaactccactaatccaacggctgtaaacatctctgataaaccannnnnnnnnnnnnnnnnnnnnnnccaaaagatcgagagcattacgttctgttccaagaacgattctcgtctcttcttctccactaaagcggctgcaaccatcgagaaagttgctaagaacagtccagtgccaattctctgaagaggagagattccagaatcgtttcccgtgagttttctagcgagtgggacgaagaacgtctcgtagagaggcacaaagaagatgagaatgatgtaaggaatggcttgaaaagaaaccggtgggatttggaatgtttttgtgatgtgtgtgttcatagaacttccttgctgaacacccaaagtttgaagctgagctaagatggtattgaagatgatagtacacgcgaatatcggtatgactgataacaatatcttgacttgatggacttgttcgattgtgcagagtctccatggactctccattgccttgccttgcgtcttgatgcaagccttgtcaagaaacctgcacgtcaaaaaaaaaagagtcggttagttagttagttagctagttagtcaatttggcggctattgtaaaaaagattaaagtcaaatcacctgaatttattagaatggaggagaggtttgacacaaacaagatccgttgaacgttggtgaaccatgtttgggtttgatgggcaaatctgtttccgattagtgaccgcggctactaatacctgatcgatcgaagaataccagaaaatgtagtcatgatcaagctcttctaaatgactcaaaatgt

SEQ ID NO: 8084 - DNA, 1010 bp, Arabidopsis thaliana landsberg
aaattagtattttaaacataaacttttcactttaacaaaattttctacttcaattcttaactagcggcacattacttatttattttaagtgtgtgatgataccttttctacatataaaaatcaattaacatatataaggtaattttccaaacaaaaatataaaaatttcaagtatatttataaattttaaaatatatcaaaactatttaaaaaacattaaaactaattttattttgcatatcgcgcgagtctacttctagtgtatatatattgtttgatgatgttgtgttttatatagagaaaaaacaaactcataacataatgttttttaatttcgtcagaaaagccaaattaattagacaaaactacatttttcttctaaccacaccttatagagtgcttttttctttcaagtgcgtttctatatctgtgacaaagaaatacgtattgcactgctttttcttttcttttttttcttcaaataagtagaaccacacataaaaagctggaacgcgtcgtacattcacgcccttactttaatctatttggttctgtttctttttcttctgtgtctcatattatatcctttcatatttgctgtcaaaaaccttttaaaagtcttagtattttactcgctcatctccttgtattaagaatcttattttgaatttttgtgaaagcgttactcgttaaataatcaacaaactcgttgactctgcaaaaccgtcatgcatgtgctaagttccaagtaagtgtctatagctttctgctccaacaacaaaaagaaaaagaaaaacatcatccagtgtttgatccatttcttgaatcttgtaaaagggttatgttcttttgatctctctgtaacaatttcgaaaatggcggatatatacgagcaccaagttcctgagaagcttcgcgtgagtttccacaatatccaaaactcagaaccaaaaatctttcaatgtttttggaaaatttcaaccctaaaattcttggttatctctgaaaaa

SEQ ID NO: 8085 - DNA, 1907 bp, Arabidopsis thaliana landsberg
tagatccaacaaaagaatcaagcccctaaaccccccaaaacctctccggatccatgtcttcgttaactgatgctgaaacgccgggttctcctcctcttcaccctcccgttgttcttttgtccgattccgccgccaaggacgccatgctcacttggtttcgcggcgagtttgcggccgccaacgccatcatcgatgctctctgcgctcaccttatgcaggcctccggcggatccgctcaatacgagtctgtcatggcagcccttcatcgccgcaggctcaactggatccctgtcctccagatgcagaagtaccattccatctctcaagtcaccctccagctacaacaacatttggctaaaggctttcatcatcatctcgacgacgaccacgacgatgattctccctccagcgacatcactgatggaggatcccgggaagaagaaaccctctccatctgttgtaagcacgaggacgaatgtgaatcacgaggagcctcactcctcaagcagtccaagcgtttctcggccaaggaacatgttagaggacatacggcaagttcatcatcctctttaccaaagctgcagacttgcttttaaaaaacacatctgaggtttgattgtttagtaactacgtactactgaaacaacatatatatatatatatatatatttaaaggcttattagatcctatcaatcatcattactcattccttagtgtgtaatctcgtcgtcccgatggatattgaatttgcttcattaattgtttccatgactaagaagactgcgtggttgctcctctatctcgcaggccaatgttgtcaaaggccttaaactctaccaagatgtcttcactcgacctcaactctccaagcttctggattctattaatcagctccgagaggctggtcggaatcaccaactttcaggtgattttatcctttgaatttaattgcgtctttttttctttcataaaccttacacacgagagtaagtttctctcatctcaaatgcaggggagaccttcgatctgttcaacaagaacaccaagggaaccaaaagagagcttcttcagcttggagttcctattttcggcaacaccacggatgaacactctggtaatgacaacaaggcagggacttggtgcttccgctatttctagacatatacataccatctcctaatttataacccgtccttgcagtggaacctatcccaacccttgtccaaagtgttatcgaccatcttcttcaatggcgtctgattcctgaatacaaacgaccaaatggctgtgtgatcaacttcttcgatgaggtacttacttacacttccatttccagaatccagatcaccatctctcgatccttccttccagctaaggtttgggattgttttcaggacgaacactctcaaccatttcagaaacctcctcacgtggatcaacccatatccactcttgtcttgtctgaatcaaccatggtgtttgggcacagactcggggtcgataacgatggcaacttcagaggctcactcactctcccacttaaggaagggtaatggaaacactcccccgatgttgattgtatccgagttttctttctaatcagaaaatgaatctcgcaggtcgttgctggtgatgaggggtaacagtgcagatatggctaggcatgtaatgtgtccctcgcccaacaaaagagtcgcaatcaccttcttcaaactcaaaccggactccggtaaggtccagccgccgcccaccctatggagaccaggcaccccttctcctctggtgatgctagctccggcgcccaagaggctagacgctggcactggagttttcttgccgtggacaccgccagtgtcaagaaaaccagccaagcatctcccgccgcgtgtccagaggctgcgtctct

SEQ ID NO: 8086 - DNA, 1441 bp, Arabidopsis thaliana landsberg
gaagcttccataaagttacaagttcgtttgcttcatctttcttgcccttacgactaagtcctgatgcaatcacactctgcaaatcaccgctaggaacatatccaccttcgttcatcgctttcaacacctcgttgctctgtccaaacctatcaacgcttctcaaagacttgaggacatgttgcagcataacatccggcacaacgttgccattcccagtataagctttcaaagttcttgtaaataagtccatgtccaatttctttgcagtgacaattttcttgagcagtaaactgcagcagtgtggggtgggtgtgttgctaatgctacctgccattgcaaactcaaacaactcaacagcttctttaatcattttagtctgacagaaccttgctgaaaccctaacataagtctccatttccatctcgtaaccagcactcctaatttcttctatcatgtgctgaaacctatcaagaaacttctctttccctaaaaccctggccatagcattatacgtcttctcatcatgtttaaaactgccagactcatcaatccacctaaagaacaacaaagctttcctcggatccacgtcaagtttttccaaaaccatctttaccacatcacttttaaactcgagcttcaaatcccttagctgtttctctacatcagcaccccacacttccttcatcacaatcttacacaccctattgcaaaccttgtcaacagagttatccatagaacctgaagcaaatagctctttcagcctctccaaatcattttctagtccatctttcttaaacttgtcaccgactctgtccctaacattagctgaaacaccatgccctttcttcttcatatcatcaaccaacctccaaaactcatcaactaatccattaacaccaaaaatacgcagcatcgtgttataactctcggaagaatgtttttgaggataagcctccaaaccccatttgaaaaaccttcccgcaacatcagggcttgattcaagttccctcagaactctcaatgctaattcatggctaatcacaacatcattcgaatccagctctttcgtaatctcatccttaccattcaatctgctaaaaacatcaatcacaacagtctcagcaggaagtttctcttctatcgcagactcagatgaaaagcgtcggctaacagagctcgccaatggcgatcgcaaggcaaaaagacactgtctttgttgcactccaaaacgttcgtggaggaaagaagagaaagatcgagtcgaattggagattacctggaaccgcgagtgatgagaaagaaatggacgaggagacgaacggtagctccggaaaagaagcgaacgccattgatacctcatccttaaggtctatctaagctacaacaacactagagtttggcttgattttgaacaaaaagtttggatttttacgaatgggaa

SEQ ID NO: 8087 - DNA, 781 bp, Arabidopsis thaliana landsberg
ttaccataaaggtgtttgtttgctagcttaggatatgttttttaaacagtgtatttaaggtttcgtgatcagctagatgaaattgagatacttgattatattattgttttcagagaaagtgtgttggatagcttttcaaagagaattgttatattaatgtagataccagttgaggtgatggctgccttggagcctatcaaggataacgaagaagctgtgaaagcctatggtattcaccttggaacagagatgtgtaaaaagatgttggctcatggagtcaagtctcttcatctctacacattgaacatggagaaatctgctcttgcaatattgatggttggtactcagtttttctacttgatgtaaagcatgatactgatagtggagtagccttactatttcgttgttgtttcagaatcttggtatgattgatgagtccaaaatttctcgttctttaccctggagacgccctgcaaatgttttccgtactaaggaagatgtgcgccccattttctggtaacatcgcttagtttctcttgttgtgattttacttagccacatattttactctgcagggaaaataagacttgtgctttcttctaatcttttgaagggcaaaccgtccaaagagctacatttctagaaccaagggctgggaagacttcccacaaggccggtggggtgattcacgcagtgcttcatatggtgcactctcggatcatcaggtactacaatacatcatctgtaattgcacaactctctttcaagatttcatagcaaa

SEQ ID NO: 8088 - DNA, 1041 bp, Arabidopsis thaliana landsberg
tgattgtgactcagcttttctatgatactgatatattcctcaagtttgtgaatgattgtcggcaaatcgggattaattgtcccattgttcctggaattatgcctatttccaactacaaggggttcttgcgtatggctggtttctgtaagaccaaggtatgttgtgatctctttcatctgtgtgatgatatggcttgctctgtagacacatgtcgtctttgtgcttaaaggctttaagatgagattgagtttactgcatctatctagttgcttggtgatatatatatagacccttggtgatgatgccttatgactaatgtgttcagatatcatttttctttgatttatattccactcatgattctattattgcatagatacccgctgagctcactgctgccttagagcctattaaggataatgacgaggctgttaaagcctatggaattcactttgcaacagaaatgtgcaaaaagattttggcccatggaatcacttcccttcatctctacacattgaacgtggacaaatcagctattgggatattaatggttttcttctcatttccttctaaattggtttctgtgtagtaatataacacatggtattgtgtataccggagaacctaacagtggtgctcaaattgcagaaccttggtctgattgatgagtcaaaaatttctcgttctctaccttggagacgccctgcaaatgttttccgtactaaggaagatgttcgcccaattttctggtaacctgcattttgtttctcttgctcggagtattattacagatctttaactttaagatatatttgcggaggaataatactgttacttcattttttatctttgcagggcaaaccgtccaaagagctacatatctagaacaaagggctggaatgacttcccacatggacgttggggtgattcacacagtgcagcatacagtacactttcagattatcaggtacggacgacatatttatcagttttctgacatatcgtctttatattttgaaaacttgaattctgaaaggcttg

SEQ ID NO: 8089 - DNA, 2393 bp, Arabidopsis thaliana landsberg
gtcatcagtcaccatcattttctccatcattggcgtcatcttcatcattgttgtcaatttagaagttttaagctctaatcggtatgtttcttctcacaattcgagttttaagggtctaagatcattaaattgaaataattggaattcataaactgttgttagtagtgttcatgctctaataagtgatggatttgtataaggtcagaatcacttatcaagtaagtaaccagaaggagatgagaaaatagaagaattaggttgagaagcagaagaattcagaattagaaagaagaagaacaagagagaagagagatgatgaagaggataaacatattgttataatctatttcgatagtgttcccgtaagggagaaagagttgttaaatacaaaggttatgggcttaagatgccaacaaattggcagcccaataacatactaaaagaggcccaataaaccacaattggatacttatcaatactccccttttgaagtatcaccttgtcctcaaggtggaaggaaattaaactctgccagtacaatcattgccttgtttgcccgtgcatcaacctttgttgtagcttcgagaatgtctgcaccttcagtctttaacttgatggagaagatctcattaaagtccttatgagtaatctcaaactgcttccgttcgttctcttcaacttgtatctctcacgcagttgtgttctcaattattgagaccaactttgaaaagaacagctccaaaagcttgccatcactggaaactctgtttcggaatcttgatactttccccaagaatgcaaactgtaagagagggtccttagacagtgacttccaaacatgagtgctacacgttttcttcttcatgtcaaacggtctattctccactgtcatatctatattttgggcttcacgggttgctctaaggttctcctgttcctgccattctccaaacaacagttcaggtggccgtgacgattgagacacttcacagttggtatcaatcttaaccaagtttccaagatgaaactgaaagagctgggtcgacatggtctctatcaaagtagattgatctctcacaagacaaatgaacttatttgatatcatagctgcaacgtccttattgatcttgatcaacctacttgtaatcttttgttctatctctaacaagtatcccaagaccataacgacaacttccgtactttttcttaaatcgttgtgcttctgatatttctcaacaacatctctctcaaccaatatttttgaaacttcttgagttgttaatattgttgtctcatagttcaactatagcaattgacgtcttggtagtggctcagtagctttaatagaacacacaaactcctctttgcccaaagagtagacacaacccaaatcaacgtcacaaacaactcttgagacactgttcttacccttgttaacatcatctttgacatttcttagtttcttctttactgtgtcgctaacccatcttctgtcattacctttactcgcccctgaaaaatccaccttgtcctcaaggtcgatgaacaagaaaagagtttctttgctaatgttctcacttaagtgaacatctaacgacttgagcaacttttccaaatcaaaacctgtgagtaaaagtagcttccgcctcaaaattccttttttatacccaacacgcaactttttcaagtcccttctcatgaccttttgtaaattagtcttatcaagcttctgtattaatcttaacactccaaaatttctgtaaccttcccaaatccatagaacttggctaacctttaaaccaccacgctcgcatacgcgattagctctcccagggtcagttggttgtttgttaccggtacaaactctacaggctagacgcttaacaacatcaacatcatgctctaataagtgatggatttgtataaggtcagaatcacttatcaagtaagtaaccagaaggagatgagaaaatagaagaattaggttgagaagcagaagaattcagaattagaaagaagaagaacaagagagaagagagatgatgaagaggataaacatattgttataatctatttcgatagtgttcccgtaagggagaaagagttgttaaatacaaaggttatgggcttaagatgccaacaaattggcagcccaataacatactaaaagaggcccaataaaccacaattggatacttatcaatactccccttttgaagtatcaccttgtcctcaaggtggaaggaaattaaactctgccagtacaatcattgccttgtttgcccgtgcatcaacctttgttgtagcttcgagaatgtctgcaccttcagtctttaacttgatggagaagatctcattaaagtccttatgagtaatctcaaactgcttccgtt

SEQ ID NO: 8090 - DNA, 3483 bp, Arabidopsis thaliana landsberg
gagaatgagactaaaagattcaaatcctcatagtttctcctaataacaagaaaggatagtatctttagttaaacatgcattgtgtattatcaaaacaaacggaaacatatttttaagaacctgttcataaacttcaattcgatttcatcggctgcaccaaatatggatttacggaataatctatcgccaatcaaggacaaccaattagatactttccagacaagagcatggtataaaactcaagtccacttttctggtcagcaaaactagacaagcgttcattagagtaaaagtaaatcagaaaactgttgtcacctatcatcccatcgagaaagacggcaagccaagtgtgctataacctcatgaaccgttcttggtacattataacctcctgcataaagcagctcctatcaggagaatcatcaggaaaattagtgtaggtcagaacccatattatagccttgtgttatttaagctttaagaatcttattaagtagaatattttgacactttttgaactaacctctacttcagttataccaaggacattggtgttcgttacatttccttttatgtgcatcacggaaactaagaagttcttcgcttgccaagagcggaaaacaacgggtacatcatcctcactgattactggatcaccaactgattgtcctaaaagttcaaacaataaaccaccagctactctcactggaacctaaggatatgcaacagaactgaagtaagaaaacaacatccaagaaaatacactatatgtacatgtttaaactgtaacgagacatttgatgtaacactaaatgaaagacatactatgctcagagactaacaaacatttttaattatatcaaaaccactatgatcaatgtggaagtatttcaatagaacatgtctataaaccaaaattaggtggctgaattttgacactcaacttgattatgcacatacctcatatagaagatgtctcatccgttcacttattagcttactttcatccctcaatgccagactaattgcaggatgcaaccacgtagcacttctaagccatccctcaacaaaagagtttccagcagtcaagtgacaccaccatgtagggccacctggtcgttcccaatacggagctgctaaatctgtaacaggaacatcttcttcatcatcaatcaactctagattaggccactccgcatttacttgaaccatttgaacaagttcagttattctagcccaaccaataggtacccaatgacttccctcatatctctcaacatgtcctgatggaagcaaatgagcctctttaaaatccaaagaagataccgaccttgaccttaaatcatcaactggagacgaatcaacaaacgggttatgaccagggagactatgactgattggtccatcttcttgcttcaaagcacctttatcaagttgttttgaatcaacatgttttttcggacctcgaataaactcaaaggcacaaataatcccatcagtccaaagatcactcttgggaacacctgaataatttttactttcaagtttcttggatttactctcttgagagactgaaagattctccccgttctcacccattgttcatcaatagaaaaatctaccagcttctcaagacagataatctcaactctgcaagatcaaagagaaagatgttgatttaaacataactctgcaaagagaatttaaacataacacaatctgttaaatcaaagctcattgtataaaaccaaagcagtaaaagaacaacaacaccaaaactgcaaactttacgcaacaaatactagaaaataacatgcaagtaacagaattaaagtacggtatagcataaattccaaaactttagactcaagaggatgcggtgtttcaaataaagtaaccttagagtagggttctggtaaaaacccagaatttataattagaaatagcaagttcatcagaaagtaattataatccaacgatgaagatgattgcaagaacaagtttattgagaaaaggagagacacaaatccgatgataagagcatacaagtttctactggtttctagagaattcaagttaaatgtgatctctaaattagtcaaaaaaacgtaataatttcgagaaaatcaaaactcaccaccatagaagcaggttagctcttttctccagatgcctaatccaacactcagagttcgcaattttgatactttatatgtacatcttttcttcttttttgacaccctaattacgaatactttaaaagcaagtagcaagctttaagagacgcgcgtcaacatatttgctccatatattttagattcttacagatttaaccacaaacttaagaaattttgtcatttaacccctcactttctcgattagtaagtattacaaaactctccccggaagtttctgctccgcaaccgcttcggcaccaatgagtcggctcttgctacctaaacttttctcaatctctagaacacaggttaaccaaaatctccctcttcgtgtatgtttatgtgcatgtatgtatatctgggatttgcgtgtgttttacctctcatttttttgttaggttccagctgcatcattgttccataacctgtacggacgtcaccgaaggtaatgatttgatatttagatttttggttttggtgaagaatagtagcaaaggatggattttgataattgggttgtgactataatctgggtttgatatgtacaagtgtctcatctttcagattgttgttcttgttgtggtttgaatctcaagaagtgaaatcgaattcactgatttgttaatacctataacttttggtgtatttgatgttattctccatttgtttgagttctatagaggacaagtttctctgtatacaagtcctggcatgtaaagatgatatatttttgcagttttgttcattggactagtaagatgtcacaagatactgtaagatcatccactactgttggttcagcttctggagctagatcattttgctccctagaaggtaaaattcgtcattccactgctataacatttgttatttgaatcaagatttccttgttttgactgaatcgtgacatgcttcatttgtttggtacttgtgtttgttgaggtttgatgtatatgatgaacatccaattgattgagttctgtctcttatgtggcgaacataggtcctcttatagagaaactatacttggcaccctgagcttattctatgatataaaaacagcaaatgatgttacccacctcgataatattagaacaacttctattggagatcccttagcattttcccatctctgttttagataagtatctggtgaattaggggcaagatgatgacgagttaggaagaataagtttcaaacaggtgttattcttccattgtgaaacttggaaagacaaaaccagattaattccagtatcagtatccatcattctcatacactactagctaaagtagtatcattaga

SEQ ID NO: 8091 - DNA, 1859 bp, Arabidopsis thaliana landsberg
tctccccatgtctttaagcggttattcgtacatgttactgaagcttggtcctctgcaattcacaaggaaaggtttgtctgttggaagcacagccgcatgcttaacctttatagtaagtcggtttttcgacttccgcggtttacctatttcctttcttgattagatcacttaatggaacatttggtttttggtcacagatcttccaaagtgctagtatttgccttgcaaccacaacaccagagcaacttgcactagctctacgttggttcttgttcccattgacatatattaggtgttccagtcagagaaattatcctcacgctactgctttcactgagattcattaatttggttttcgatgaggtaacgactgtttttttattcgctttaatattatcaatcagcctagttattccaagtcctaaaccacataatggtacgttgtgcatatgttacattgtaggtccgaagtgtttcactgggaattgtatcgcgaagagtaaactggcagcagcttactgttctggagacacttgatagtaagaatctaaaagtttcttctctctttctatatacatctcatcttacaagtgatcgctttttgtagttttcgcgtcattcatacgccgcatcttcaagaatatatttcgtcatgccgaacaaatatcacaggtcaaatagatttcacttattatcatctcattgatttgagaatcaaataagaattctctgttgaagaagtttgtaatttatgtgcatgcaggccatgattgttagaggcttcagaggagagagcagtagccacaagatctacttcttctctggctcttcgaataagtttgcagattttgcatcagttttgtgtttaatcggtgtaatctcaaccgcactcttgtctgaatactttcttgtctaatattgattcatactaatctttattcgagctaaacttggaccataattcagaagaaaagatgatcttgaggtagaatctctatcatgatcatccaaatgttgtatgtgataaatttcttccccaatgtgtaagatttcgttgggcgtccggttagggtaacacaatacaactttgttatgctcgtcgaccaagaaactcatcccattagcaaacatatcccaactcggattaatggtttgtactgttaagaacttgctccatgagatgactgaatccatactagttgtcacccatacatttaagtcttctgaatgtgtttcatcattataataacctaacactaacagacaaagttttctatttttgcacgaagaaattatacctaatgaaacaaataccctttagaaaaagtgtaagaaattgccacatttcttctttcaaattacgtcaaaaatacaatctatacttaaagagttaagaaagatgatcccaagccaaccaagggcgtgatctcttcaatctcactcgataaagtctggtagacccttgtgtgatttgatatggttttcgtgtccagaagagacaaaggcagacgaaaacagtgtctcacatctttttctagaaaataacgggtcaatgtcttcccaagccactcgtgcttgcttctataaacaacatcaatcttgaattctaccaaaaacactcaaactatatttcggcaatatagtttcttgcattggaagcaatcacttgtttccatcatcacagcttgaaaaagatttgtcattggaattagttcatatttacagttctcatttaaaacatgtcaatatatgtagtccaatgcttgtttgattaatcccatagagcaacattacattaattcagcataaattagatttgtgaaaatcacattaaaaatggaaaacgacaggggaacaac

SEQ ID NO: 8092 - DNA, 541 bp, Arabidopsis thaliana landsberg
gagcttcccccaactcctgctagaaatatgtcctgacataaaacaaaacaaaagttacaaactgtgttgcatgcaagatttttaaccacttatcttgaaagattatagatttaccgagatcatccctttgagatgatcagtggtgaacttgaaagagtctccctctttctcttgcttcttcatcatatcaatcatcacatcgatgatatcagagctctctcttccaggcttgagatgatcatcaagaatattctgaaagaaagtgtctacttccgagtaaagtctattcaatctcttcctctcactgaagatccactcgatgagcctacccattaatccgggaaagaaatcagagaagatagaattccttatgacatcttcagacttgtgcacaagatcatcgatgctatcttcatcaacgaactcacactcacggagatttatcccaaaccctatcctacacactatacttccgactaaagtaaaaagggttttctcaagattcaccaaagatcgtctcgaagctaaatcagagagtttc

SEQ ID NO: 8093 - DNA, 2584 bp, Arabidopsis thaliana landsberg
  unsure (1)..(2584): unsure at all n locations
tgaaatgcacttgtatagttaatgtatcagtgagatttctcaggagaacaatgaaagaaagaacatgaacctgcagaatgtggtggagatcatattcccgggctttcgtagaagtaccgtagtatctgtaaaaaggaaagaaagacaatcagtatcactaaaacactagttcagtatatacaaattaaagaaagtcgctcttactccctagtcatttgtgaaagtcccacggtagctaattctttcatccagtgaggcagcaaggtttttggggccactaccagagcacgcttgatcaatttggagtggaataaaccagcaagaaaactacaaatctgcaatgcgaatcaaccaaaatcaaagatacattattgataacgaaaagaaaagtgcaggttgcagatttccgtacctgcatagttttacctaaacccatatcatctccaagtattccacctttcccttgggtatgcaatgaccaaagccaattcaacccttccctctgatgtggatataacattgttgcaatctttccaggcaatgtgtaagacaaattgaggccagttaaagtgatagacccttcatcttccaacgatctctcatcataaccatgtcttttggcgttataagaccgagctggcttattaattttcatttcagccgcctttttcccggacaaaatgagacagtcatcttcatcatcatcctcgtctaagtctcttagcttggcagcattagaccttccgactgttcttatcttctcacttacctctatgtgcctggtcgtcttcatactttggtcgacttccttgcattggctcttcccacggtcaagattgtatccctgcctattatcttcagagttatcgtcaaagtgccgaccagaatatgagttttgctttccaacattcgaaattctttcttcccattcccttgaaaattccttactagtttgctcttcccggatggcaaaaccagatttgccttgcttgtccttgatactattaacgccagcattatatgtggtaaccacatctggtgaggacttagatagatccgatagcaaggaaaatgaggatttggcatcctcaaaatcaaatttatcaacctggctcttcactccacatgcatcaaaatcattgctttggctatccttcttcttctgaatcgacattgtcccaagcttagaggtcaaatcatccaaaatacccatgatctcgttccttcctccatcaccttgcatttcctctttttgcttcaactgaggtgagggcgaacaaaagtctgtgattatcgaaaagttaggctcgccagccagctcagtgttagcttcctttgattcatcccaagatgtgaatttgttcccaattccagcgctgtctagtgatgtctctcctttaactgattagagcatcatgcaaaaacaaacgtattcaagtaaagttatctgacaaaacgcagtataataacagctataaagaacgaaaatcaaacaccagactagaaactcagatttcgaagaaaccctaatttcaaagtaagctactaggacaaaattgaaatacatcatcaacggaaacaccaatttctttctgtaaactaagagacatgggtttgcgaaaaccctaaaatcgggtgaaatctcaaaattacctgnggaatagaaatcaaccaaatcaggatcgtcatatccatcagcttcgtcttcctttggcaaggccttgcaaagacgacgtcgtccagcaagcttaatcatggacttcttcgtctcttcatcttctccatctgaagtccccaaatataataaataaaactcaaaatcaaagacagatacgaatccgaaaccatagagaaacgatagaagagaacaatcgtacgagaagaagagggaggctgtctaggaggcgcagaaagatcctggaggatactgtagtgacgatcgttcaagctccgaggttttcttctatggctggccgtattttccgccattgctacaccgttttctggagatgagtttgtgtttcccgatgatcgattgtgataaatggagagaagagtgagaagaagaagaagatgatgaagagaatgtttggaatcccgccttccttggcttttttgaattttgaagatttctcagttccgagacaaatggctcttgtgcgctctctctctctctctctctcacatttaacctacaatacaacaaaatatgattttatttcctttttggtcagatataatagtataatattttttgcgttggtctgaattgtttagtaacaagaacatccgatgtggtacactttttttacaagtcatttcagatattacaagtcatttcagataatacaagtaataatttgttcaatatctcatgatggaaccaaaaaatgacggtttgatggaggcggtcgctttttggaatttccggctctattcatggctttggatgatcgggaaaaggaagagaatgtgtgaaattgtgagctcgtggacgtggagggttcattacttactaccttggtaaatacttggctccttccatatacagtacaacaaaatttgctgcaagagtttggagact

SEQ ID NO: 8094 - DNA, 1916 bp, Arabidopsis thaliana landsberg
tagtaccttataggactgcagagcaaactcagttcaaatctggctttgtctcaaccgttagtctctaaacaagagtatgtgatgatcaataaatgtaatggctggagtaaaattcatgtttgttatatacattgtgaaaatagtctattatagtatgaatataagaaagcagcttgcaatatgcaatatgaactaagctagaacaaaagatcaggttaagaacacacatcattgcccttttattttgcctttgttagaaaattggaccgttggttgaatgggataagagagagctaacagaaactagtagtgtactaataacaaagattttaactccatatctgtcaagtgcaacaaaagggcttacaatacaaaacaacaaagaaactgacaacttgggtcggagaacgcaaaaaggggaaacccaaaaggtgttcaaaaaactgtcaacgaaacgcaaaatagacaatttaaaaccgtggtttccagcagaagtcaatacccgaaccactttaccttttttcatcagcttgagatgaaattaaacgcaaaaggtgcgttcttgacttcctttggatttcaaaaaacacaaaatgagaaaccataaccgctcttaatccttccttttctcttattcttacttcttctgcataaggaaaaaacacttgttacttgctccacaagaatcccattcggttaagatcttagttgtggaatcatacctgaaaaaaaactacgctcctcctccaacatcacaagaaacagcagctttaatcctctccaccgtacatttgatcagactattaaccgtagccaccgagccaagtgagagtttagctgtaggaacagagtcaacaagaatctgaaacgcaacggttaaaagcgaaccaccacaactcccagaagaagtagtagaaaccatttcctgatgctgattcccatctcctcctccaaccgaaccatccggtaaaatagcaaaaccagacggcaacaacgccacgtaatcaggatctccaccgcttagaaccacattcatcgccactatatccactggcgcgtaaatcacatacgatcctgatgcatctgtacagctctcttgtagaatcaacatgttgctctggctcgagtttccactctgtttacaacaacaacaaagtttcctcaatctgaaaacgataaaacaaagagaaaatatcgatagttaataatgtcaagtcttacattgactcggagcaaggagacacagtttccaggttcatgaccattggctatatgagccatttcctgaaccatacctccatttgacagaatatcccactgcatcaaagttcaaaacctaaattaacaaacctaaatctacaaatcgtgactcgcaaggttctaaccctattttctttgtttattcaatttggtctgaagtaataattttaaacttttgcattacctcttttcttgaattttcgtcacggaggaaatcaaaaacacgtttgggagcaactgggatccagaatgaagtagctgcactaagaacaatacccggaggtcttcctggatcatccatactcttgcgggtcatgacccgaacatcatcggatcctgttgtcgacattgttgtccaagcgtgtgcagtcgacgcgccaacaccactgcagaaactcataaccattctctcagctagcttcaacatactcttccttccttcaggactcgttatcactacatatattaattaccataaattataaggaccaaattagtaaaaattaaaactaacgttttcatttaatttagccccaacatatttgaattgatcagaatagcccctaccggaaagatcaccaagaatgttgctggccatggagctagcaagccgctcgcattgtcgttcgagtgtagccacccaacgtttcgcaccg

SEQ ID NO: 8095 - DNA, 2629 bp, Arabidopsis thaliana landsberg
atgacatttatataaaagacaaaaaaaaatcccaagaactaatctaagaacttaccaataatgatgctttaagcatgcaaatgatatcattttaagcacaaatagtaatttatattgggctgataggcccataaactgcattttattggtaaagttttaggccccaagcatgtgtagcaaaatatcatttttagtcacaaatactcattcatattgggctaatgggcccataaacttcatttttatttgtgaagttaggcccacatattttgtaattcttcgtcttcttccacttttgtctttgagccgtcgaacaaaaacaagtagtctgaagacaaactacacaaaacccttgaggaaataaaactgcaaaattgaaattagggtttatactttaaagcagtcaccaaatccagccaccatctcttgctgaagccatgggacgctctcgagttcaagttaacaaagctcacaagactcgtttctcctctaaatcttctcgtaatctccatagaaccaaccttcaaggtaaaccccttaaatcctcaacaattcatctctttcaatctccacatactgaaaatcgcgtttgaatggaatcagatagtggccggattgggaaatcggatagtaactatgttaaaggagctaaagctgctcgtgttcaacgtggtaagatgcttagagagcagaagagagcagcagttttgaaggagaagagagcatcaggaggaattaacagtgctcctcgtgttatcgtgagtttttacatgtttgtgtgtttgtttgttgcaatgttccacttatgatattttctaatgatgataggttttgtttcctctctctgcttctgtggaattgaattcacttggtgaagatgttttgaagttgttatcttctgatggttctggaattgcttcttcgacagttgcatcttctgagtataagctacgagcaactgtatgtgtattcctaagatttgtttatatagatatatgaatatttgtgtgatcaatgttgtgactatatatattacaggtgttaaaggcgcctcatggggatcttctgacatgtatggaaatggccaaggtatgtgaattgtcttgtattcgtttgttggttctttcagtgagcagagtttgttataggtgtttactgattttttttggtactggtattaggttgctgatttgatggcttttgttgcatctgcaagtgctccgtgggaagagaatagctctaacttcatagattctttcggaagtcagtgtctttctgagtttagatcaattgggctaccaagcactactgtgttgatccgtgtaagttctttctgctctatattagtagcgaccaggtttctgatttcttgaaattttgcttgaagttgagcttaacaagttcgttttgtatgattgcaggatttgcccagtgatgtgaaaaagaaaaatgagatgaaaaagatgtgtgcctctcaacttgcttctgaatttcctgaggattgtaagttttatccagcagataccagagatgagttgcataaggtaaatgtttatgactgataattttttatattattttactgagtggttttcaatagttttaatgttcttaattagtagaacatttctgggcttgtttgcagtttatgtggttattcaaggcacaaaggcttactgtgcctcactggcgaagtcaacgatcatacattgtggctcgcaaggtgtgtgatttatgcttatataagttcattacatttaatctgactctgagaagaaaagggttttatagaaagtagaatatctctgtaatgttgaatggtgcatttaggctgggatgctggtggatgatgaaagctcaggaaagtgcactctacttctctctggttacttgcgtgctcgcaaactgtctgtaaatcaactggtaatcaagccattctgctatctatatcatgccttgtgctatacccatggatcccttgttaatttattttctcaaattaggtccatgtttctggcgttggggattttcaattctccaaaattgaagtgctgaaggatccatttcctttgaatgaaaggaaaaatcagaattccatggaattagatgattcacatgatgaagaggtatattatatataatattttctttacaaatcaacaaactattactttagaaaagatacattaagttgaatccttcagatatagttataggaaaagaggttatatagtttgttggaatgctgtcataatatcatattacacttaatttcattcttaaaaataggatgttattttgctttcataatgctattttcacagctttcttctctttgtaaattcactttattttttgtacctgtgtttgatttgaccaggtattgaagtctctggttcctgatcccatgaaacaagagcctttagtaattgaaaacactccagatcctttagcaggggaacaggtaagtctgattagttctctaaaaaatgaaggtggcagttggctcgtgttgttatctgttctgggaagtcacttgtgcaattcttcctttgtgtagacatggccaacagaggaagaaatggctgaggctgacaaaaatcagaagcagggcaggctaaagaagaag

SEQ ID NO: 8096 - DNA, 514 bp, Arabidopsis thaliana landsberg
tggattttattgtcttaccaagaacctgtgcagccgtgattcgtctcttcgtttctttggttttctatcttcctaacaagatctttcgcgctttcagatatagaaggccatggctcacttacaaaatcaatttcgccttttatgacctcatcgaatattcctttctcattttctaaaatataacatatgaatatagatcacacctcaagaagaaaacaaatcaatgaatttggttagcttaaaggtcttttaccggcccaaaaaggaggtacaccgctgagtaggatgtataaaatgacacctgcactccaaatgtcgatttcttttccgtaacttcgccttaatacttctggagcaacgtagtaagcactcccaactatatcccggtaaacttttcctgcatttgttggtttcacagacatatcatgaagcatattaacataagaatcaaactaatgaaaattacatacttgacaatatcataagatgtgtacaaaagacaagataaactcga

SEQ ID NO: 8097 - DNA, 1470 bp, Arabidopsis thaliana landsberg
gataaagatgattccgtttggagcaggaaggaggatctgtccagggattggattggccatgttgcatttagagtattttgtggtgaatttggttaaagagtttgagtggaaagaagttgaaggttatgaagttgacttgtctgagaaatgggagttcactgttgttatgaagtatcctcttaaagctcttgctgtgacaagaaggaaggagaagacacatatcgtcatggcttagagacagagtagcagattgatttcttggggatgtttttgttctttagtttttcagtttttttttttttttggttttctagagtgtttttggttcaatctgttgtggtagaaacgttgtcgtttcaataaaggcagccatttattgaaacgttgtcgtttagatgcctctcatttttgttgaaagccctagaaaatggaattagacgtataaattgatttcatctttctcagcttttgctaaacgcagataaacaggtttctttctgattcttcttcgtattggaacatacaattatacaattgggtataaccattttcttggatttcagtgtatgattccttttaatgttcaaagttctctgctttctcttgcgtaattttgctctctgttttttttttgtcttcatctgtataatggaatctcccgaaaaaactcgaagtttataaactggattgattcctttcttctccattgtggtcttaggtttcgaaagtttctcactttagacttgtgttagctctagaatgcttgtatgatatgtttgtgacattgtggtggagatgatgaatgttaagtaaaaggtctgagtaggttatgagtaaagtgtgtagcttttgattttaatttagtttcgaggagacaattttttaacttaataggagagggcccttgtccatgccttgagtcatggcatctgtggctccgcaacctctccaacaatgaacctgattcaccacgtgcttgtgtgtgcaatctgatgggtcgatttttaaaggcttggggttgctttctattattgattgccaatctagaattctccctatatacattggtctccttgtgcttctttatcatcaattagctgccctcataagtcctgcactgatcaaagacctccttgactgatccacgcgaaagtatctaaatagttctttgtattgctatcttgaagtttgaagctttttgacaaagcttgtttgatataggcattgcttgtggatgatgtttatgattccctcattattgtatgtgtggactacagaactattcatgtattagcatttacccttttgtggttaagctgaagaagtataccataccttctagtgtttgtttgattgggtttttcactgtggccattagagtgtttaagataagtactctgtttgtcgatactcttggatctttttttcaagtgtgtctgatttgaagactttttttatgtgaatatataa

SEQ ID NO: 8098 - DNA, 1163 bp, Arabidopsis thaliana landsberg
aacagtatttagaacagattagttcgaatggaatcgcagtgctcttgtgaaggaagctccttgccctctttctcaagctcttccatctgagcatctttactgtcatcattaccttcatcgccactctcactctctttatcatttccatcttcaaagtcctcgctttctccatcctcgtcttccttgttatctcctgcatcatcttcctcgatatctccttcatcatcttcctcggtatctccttcatcgtcttcctcactctctccctcatcatcttccatgctatctacttcatcatcctctatcccatcaggtaattgatcatcttcattgtcgctttcggcctataatatagagaaccctcgaccaaataaattcacctataccatctaaataacttaaacgagacaaaagcaacataaacataccttaaggttttcttggtcgcttatgtcttccgattcactgtcaagtcttgctcttttagacctctttgaccccccagccattttaacaacttttaatgctgcaatcactaaaaactaaatcaattgaggaaggagaaactattatacagtagattaagcaataaaaatattgaaacaaataaagaaggaccaaatatagagcaacaatgaggtaaccataccatcaaacaagctttgtcaaaagcttcaaacataaaaaaaaaaaaaaaaaaacagaaaaaacagagacctatagataatctcataaaaacagctcacgtggatcagtcaaagggtctttgatcagtgcagaatcacgagggtagctaattggtgatatggaagcacaaggagaccaatgtatacagggagaattctagattgacaatcaataatagaaagcaaccccaagcctttaaaaatcgacccatcagattgcacacacaaatcaggttcattgttggagaggttgcggagccacagatgccatgactcaaggcattgacaagggccctctcctataaagttcaaaaattgactcctcgaaactaaattaaacatcaaaagccacacactttactcataacctgctcagaccttttactttaacattcatcatctccaccacaatgtcacaaacagattacaaagaacaacattctagagctaacacaagtttaaagcaagaaaactttg

SEQ ID NO: 8099 - DNA, 2068 bp, Arabidopsis thaliana landsberg
tacgctcaagggttgataaagcgatgtatccctcaatcttcgacataattagcagaaccgtagggagaatccacaagaaaattttcagcgcaagaccggggaggaaaccctgtaagaatgacttgatgaaatccctgcaataaataccaaggagagggatcaatggtctaacataccaagaagcaaaaaaccgagatagatggagagacttacaatctagtaacaggtctgaggaaaggtgcaactctgtcaagaccttctaaattggcaagagattgcacgaaggcgataggaatcatgtagaaaaagaccaaggcaaagactgagacaccaattacgagtttccggatggttaaagagataaaaggtatagcaaggttttgccaatagatatcacgaggctctggagcactactcgttaaccataatgtcggattcttgctctgctgcgtctgtgcacaaacagcagcaccccatcgtgaatcaaacgacacaaatgcaacaggaagcattagcttggagtccttgagaactttttgacgctccaaagacatctgtatcaccaaagatgaaacgaggtttaagtttctgtttcagcagtaacttaaaaagcaaatgaatggcttacattgtggtcaaactccttgatttgttgcttgtagtactcaatggaatcaaccctcttaccccatagaccaagaaaacctgtctgaaaaaagaaaatccgcccatcacaatcaacatcgtttcatttcaaaaagctaaacaaatggcgtgggagagactaactctgcaagtaggctgcttatgcggattacgttgatgcttcagcacataatagtcaaaccaacgttgcaacttcgctctttgcttcaccagctttgcgtaagtgttcgcattataaacagcctgaaacaagaatgttgaattcatcaatcacacactaacgcattctacaactaaagtaagtgatgaaggacaaacaaaattacttgatgacagaggtaatgctcagggtgattcgtcttaaagaactgatcaacggtatcgggaaccgagtgaccaggcatgtcagggacgtttctaacaacaacctgcaaaaacaaacagtagtatatataaacatagatgcaacaattatccatgtttgaagtttgcggctttttcactcacagtgaactgttctggacgcctacgctgtgaagctaaatactgcagacgcataatagcgacattattgtattctctgtagagcatgaaacatgcccagaacgtgaaaatgtactctactgcaatatgaaagaagaacctaaacacacacacacacatacacagaaatgttaaactttagccagtaaaactcattgattagtaaagcataattttagttcacaagtaagctcactttgaagatttgggctgaacattggatatagagagcttatcgatattgctgaccacaagttccttcttcaagaagaaaagtgttccacttgatacatttactggaacaagaacaacaagcgctaataccatcactggtgcaaagatcttcaagctgccaacaaaccaacaaattattcagattctcacataaatttttacagtaactttcccggggaaaaaagaaagatatctaaagagtgactttttctcaggaaacaaacacgaaacagtgaacagaaacgaaacttctattgcttttgtctttgtggaatacagagcagacaaatctgaaacttagctgtacattctttatattgttaaaataaagtacaatcattctcacgagtaaagattcttaaaaccgtgaaattcgggaatttgtcactcgtaaaaattcgttcttggagattacaatcaatcccacaaaaaacccacatgaacaagaaccaaaaaaacataaattttctcgaaagtaacaatttttctctcgagaaccattaatcaaatcttagtgaaataattatgtaggacaataaaaataaagggcaactggtataatcaacatttttctatcaatattgaaaaagtttcgatttttttgttctttcattctctcgagata

SEQ ID NO: 8100 - DNA, 1729 bp, Arabidopsis thaliana landsberg
gtaagagatcagcctcttcaagagtttggagcgaaccgtgatatgtatcatttaagcttggcagtcaaaatggttttgcctcaaactattccggaggatatgaacaatttgctactagacctggattatctccctacacgagtcctggttagtatatatcatagctccctataggcgtttttcgcaattaaaattggtttaaccaactagtatttcatcaaactgtcggttcctctgcttttcttaacttttcaccattgtcctcttgtagtggcgaggactcaagtttctgctcctcccggattttctgctcccaacaggttacctcctcccggtttctcttcacatcaaagaggcgacctgtcttctgatattgcatcaggtattatatgttacattcccaaaaaaaggatagtttcaactttccataagctgaaactcctgtaacacatactttgcaatttgcaggaactcgtttacttgactcagccaatttgttgaggaacgcatatcatgtaccacctccaagtggaaatttgaatgctgcaggagatattgagtttattgatcctgcaattttagctgttggaaggggaagacttcataatgggatggaaacagcagactttgatttgagatcagggttctcttctcaactgaattcatttgataatgatgcaagactccaattgttggcgcagaggtctctggctgcacaacaagtcaatggatttcacgatcccaggaacgtaaacaacttctcttcttcgttctctgacccatatgggattagctcgaggccaacggatcaaacacaaggaactggcttgtctcctttcacacagctgcctagacaagcttcagcaaatccattgttgtcaaatggacactgggataataagtggaatgaaccacaaagtggtaacaatcttgggattacccagcttctaaggaatgaacggatgggttttaatgacaacgtttacagcggttttgaagagcctaaattccggaggcccggtcctggagatccgtataacagaacatacgggatttgattctcggaattcttcttggttggattttcacttaagactgtctcaaaagaaggattttttggctgattccggtgttgggagattcatagtcgaaactgctctgcctatttgcccatatcaaaccagaccttagagtcaacaaccgcaaatatcggctcctccaaagcagtttaaactcaattggtatagacatcttgttctcgctacctcttatagacaatgatttactgataatataatgtacttaacgaagttgtttctctcattcgcaggaggataccttactctgttggctttgtatcagcaaaagtttgatgcttcagtgcctactcttgattcagaaggtgattttggtctacatttgcatactatataaggctgaactagtggaaaaaattggcgctatggtgcatttaccatttgtatagagcttacaagaactgtatcagtctatgcttttgtacaaaggaaagagtctctttccttgtgcaaactcctcatttcattactctatccaaattgaatgaaagaaattcacagcatgggtccatgaacttgtttggacgttttgttttttaaccttctgttttcctgcgtaaccaagatttgctttggtcgtcatgttggaagaagattagattactaatttctcgttcttattttcttttcct

SEQ ID NO: 8101 - DNA, 1884 bp, Arabidopsis thaliana landsberg
agttatggatcttgcattgggcttgattatataatttgggccttttcttatccataaattacacttttgggcctaatctgtaaagcacaaaaaaaaaacaccttttttttttcttttctttctggcttgtcgaacagttcacatctcagagctcataaatttgtggagagcaaagttctcagcaaaatcaaagaagaaccgaacgagagagagaaacgaattcttctcaggtattctcttaaatccaatgtctttcattctcctacttgttcctagaattttcagaatctgtgtatcttcctttcctgtttaattttgctggatctgtcttgagcgaagtgttttcttatgaaatcttcaaacttttgatagaattttataaaccctagctagattcgattctgggtgatgtttagtttttaggtgtttttatatgggcatcagtgattgttgaattatctttcgatttttctcttcgctcctgtgattgtgactttaggtttgtgttgatctcaaagtaacatagatttataaagctagttcatttcctttctattgaagaaacttgacctagttttagtctagtttttaatctgaatcaattgtgtttgttgatcgttgtgatgtcgaaaaccctagttttcgtgttttcggaacttgccctgtgtctaatggagtatgaattagttgtgtagaccaatgcatttgttgtggtgcaggtgttaaagaatgtctcggagatatgatagccgtaccacaatcttctcgccagaaggtcgtctttaccaggtagagtatgctatggaggccattggaaacgccggttctgcgattggaatcttatccaaagacggtgttgtgttgatcggtgagaagaaagtcacctcaaagcttcttcaaacctcaacctctgctgagaaaatgtacaagattgatgaccatgttgcctgtgctgttgctggtataatgtctgatgctaacatacttatcaacacggctcgagttcaagctcaacgttacaccttcatgtaccaagagcccatgccggttgagcagctggttcaatctctttgtgacacaaaacaaggatacacacagtttggtggtcttcgcccgtttggtgtctcctttctctttgcaggatgggacaagcaccatggtttccagctttatatgagtgacccgagtgggaactatggtggttggaaagctgcagctgttggagcaaacaatcaggcggctcagtctatcctgaaacaagactacaaggacgatgcaaccagggaagaagcagtcgagcttgccttgaaggttctgaccaagacaatggacagcactagcttaacatctgagaagctagagcttgctgaagtgtatctgactccatccaagactgttaagtaccatgttcactcacctgagtcgctcaccaaactgttggtcaagcacggtgtgactcaacccgctgctgaaacatcttaagcccaaaagtatctctagtcttattcgcctggtacggtgtctccgctttatgtttgtagttctctgttttacagctttccttttggtttgaactttgaagttacctttggcgatgaaactagatttgacaatgttatgaatttatcttcaatgcatcatctttttactaatgtcgatcaaaggaacagatatattttattcttatctctttagattagtctgaatttcttcaattcatgacttgaatactaagcattctacttgtcgcgcaaagttttacacgtaacggcctcgtcaaaagaactgttttatcttctaagtaaacgcaattacacgttgagaatcttggaatcacaaaagagtaacgtttaaggaagaatagaatcaaaattctaaaatttt

SEQ ID NO: 8102 - DNA, 1863 bp, Arabidopsis thaliana landsberg
aagtgtgatttgcaactctcaaactcatcacttgtccatcagagtcttaactttcaaacacatatcttaaaaataacaacttaccaagaatagccataaccgtccttgaatctggaaagaacatgacgtattattagattcacattttcgcagaaaatgatacttacgaaagaagattgaatcaagagagctttctccctggcaattaactagcaatcataaagtttaaagcaccaagggatttcaagttcaagaggggaggaacttatgaaactcacttggggcaatctgtgttcttccagcatcaatggtgatatgggtaggcagtttaagggatttagctctttcctgacaattttgtgaacagtcaatacaagatataagaaatgggaaaaatcaagataagctctatgatatctcaaattccccttaagtattcatgtatatggtcagaactcagaaattatcaagaaactaacatctggcaactcctgcaaagcccgtgaagatcaatttggcaacagcactaaagctgtgaatccaaaatatagttcaataaaaaaaatccactttacagtctactacaatttgttttagtaaactcacttgcaattctagcatctcgtcctcgtcctcgattttcacaacaacttttggctgtgcacattcctcccagctgcaatagcaacctatactgttaattcaatccatatattaagtaacaaatggaattgatcatgacttagaggcataccagtccaatgcttttggcgctcgacgaacaagcttcttgtataatcctaaagttgcatgactgcagaaatgcagaccaataaaacgaatcagaataagaacactcaaatgtaagaatgataaacatgaattaaacacttaaaatagtaaaagagagcatgattagtttatcacctgcattgagctgcaatctttcctttacccattttaagatcatttctcaccaccaaaacctgagtatacaaaactcaattcaacaattttgtgattccataacagtagagagaaaaatgtagctaactaccatcttgaaatcatcgagaatatcagcgagtttctcaatctcgagtggacttttggaggattgagttttgatatccttatcaacagcagcaacaacaggtttggaacggcgagtgccaatgcagtatccaagtgcagctccaacaattagggcacttaaccacgtcaaatccattggcaagattcaaatacttaaatcctacagacaacaaaatgattgaatttgagtatctaaaattgaattacctcaacgtaatctagctcaagtttctacagtagaaagggaacaattaagattctcatcaatggtctaaagaagagaatcgaagaaagcttacgagttcgagagagagaaacggctccgatgatgaagttttttttcctgaaaccggcgtgaagattttactggcaagaaaaaaaaaaaaaacatttaatgatcgattattttttggttcgttggatgaaattgcgtaacgtgattggttgatttgaaaaaaataaaaataaaaaagcatatctttttgaaaataatgtttagcgtaaaggaagggaaacatagtcaggataaagtaattcccacgaccaaacacttaaaaaaggaacgcagttttcttcttcttcaggatttgtacggcgtcaacgggcattgaccttgtcgcagattttcctctctagtctccgttttctattaccagatcgagctttgttcttcgagcttctcatctctttgttcaatctcaaggtagaaattcgcgttaatttacttgtgatttcgctgttttttggtactgtttcgcgttgatcgat

SEQ ID NO: 8103 - DNA, 893 bp, Arabidopsis thaliana landsberg
tttcaattttgacaacaacttttggctgagcacaatattcccatctgcaagagcaataagtaactgttaattccatccgtagcctgaaaagaaacatagaattgaagtagagtatgagatggtgtggcataccgcatacctacctgttcaaggcttttggcgcccgttgaaggagtttcttgtataaacctaaagttgcatgactacatataatatgcaaaacaagagaaaaggagttgttaattgaattcaagaaatgcaattgaaaactgaaagaggattgataatcacctgcattgagctgcaatcttccctttacccattttaagatcattcctcacaaccaaaacctacacagacaacaacaacaacaagaagaagcatttatatcagctactggtatcttggtgcaatacaaagacaaggaggcagagtgaggctaggtaccattttgaaatttttgcgaaaatcagcgagtttctctatctcgaggggttccttggacttggttttcttattcccgctggatcctgcatctatggcgacagatttggaggagagaaagattcggcgggtttgtcgtaaagtgctgatgtaatatccaagtgcagctccaacaagtaaaacacttaataaccacaccaaatccatacctcctacaagaattagcaaacaaaattcacaactatcattaactcaaacaatgttgaatcaatgtggtaactaaaatcagtgttctgataagaaaataacatagtaacaaattttgggaatctaaaagtgaattaagaaactagtgcattagtacttgtttctctcggaatcaagtaaaaacataagcttgttttaaacatacaaaagctgtgttggagctattgaatcgataaaaaagc

SEQ ID NO: 8104 - DNA, 440 bp, Arabidopsis thaliana landsberg
agggacaaggaaaagagagaacagttgacatatgggaaattcaatagcagctatgattctaaatgttaatggagagatgtgcatgataacaactctttattggccattcaatagctgaacagtctagctactatctctatcacatagatacgctagataccctgctaaagaatctattagaaatggcataaaaaatatttaatgcaatttttcacatggaaaatatattttatgcatttaaagaagaacaacagacatatgcagattctatatgccatctctcttttttgacaatacataccaagatatattccaaaagtgaagaaatttacctgcatgccagaatcaaatctgccctttgggcgcgaccaacatacttatattcagccagtgcatcacacacaacatcaacgaatatctctcgtgaaacaacaacaggt

SEQ ID NO: 8105 - DNA, 1234 bp, Arabidopsis thaliana landsberg
tacaagttgccatcccatccccatttgccaaagctgatttgcttccttacaattcatccaatgtcctataaatagtttataaccaagatgaaccagtttaaagaaaacatgatgagagattttgaaacctaaagaaaataaagtttttaccttcacatttaagaccatctcctttaaagcctggagggcagcgacatcctgatgtctccaagttctgaactcaacaattggagaaaatatgtaagtttcaaactttatggcattattactgaaaaggccataacaaagaagagtcactaaccgagcaagccgagaaagttaagccctttttggtttcagaccagcaacctccttgattaatcgagcatcttgcagggccataagctgttataacattcaagtcacaacacaaaatgtttataatgaagtgtttctacaagatatcaatgtagaagttgaagaacgtacgttcacatgatgtatatccatctcctttatactgtacaccattcacaacagggcattcacagactcttcctctaaatgtgtcctgatagaatccattttcaggtataaaactaaccaaatatctataaaaatgtagtcccttaagttcattggttctaatcaagtaccttgcaagctgttacattagacttcttatcctcccaacaccctccatttgcttcgagacattcatttgtttcaatatctgtttcaacagtgtaaacaaaacaagagttctttagtacattctattaccacacatgaatataagcttacaagggaatttctataacctccacttagacagatcccgggttcggttctttccttgaatccagaacatatagccttaagtactgcatttctctcaagtttacctgagcaataaaatcagataaagaacttaagaatcttaacttttcggtaactgatttacaatgaaaaggaatgaaacaaaccgcggtattgagcattgttgacgatcaatgttggtaagattgtgacatctccgcggtcaccttgtcctacctataagtaacaaagaagaaaaatctcagtgaatcggtttaaaaagacggtcaaatatagacgcatttaagaagagagccaagacctgaagtgcttgctcagcttttaaaacttcattctccacattagcatcaggatcaccaatacatttcctaatcttgtcaagtggcacacctgagaataagagaaaacttaagac

SEQ ID NO: 8106 - DNA, 1291 bp, Arabidopsis thaliana landsberg
ccatctttttatatatatgatatttgcagtttagccaaaaaaaaaaagtcgaattttaatcaacatttttaagcacgacggtttcaactagtagtaccatatcgcgggttttaccattaccggaatttattagagattttcaaaatttacctgattgaaaattagcggattgtagtgttggagccaaactggattagtgactgagtcatcgggtttaccgggccaatcgcggttccgctcgaatctgaatatattttcctcgtcaaaataaaaaaagtcagaggacgattggtcgatgagaaaaacatttaataaaggaaaaaaaaaatgaaaaaacaaatggggcctttggagcgatgtgatgacgtggcaacccccggagactttcaaatagcatattgagagttttacatgcatgtgaatatcaagggtaacatctagagtcgtatgaatcgcgcgtgttatgtcgttgttagtcgttcatgttagcaaataatctacgtataccgtttgtgacttttaaaactaagttcatgaacctattacacataaatcaaaatctggaccataattttattggtgtattgttagaaacttaaagttcatatcactttctctatgtttcgtggcctacttgcaattttttaggaatcttttgaccattagttttttaaacgagtttaggactttgatcactaaggtaaatcgtttaaacaatttgggatcacttaattattgacatgattgtatgttttgattgggcatgtcaaacagatctcaatatttatgtaattacaaattattgcatatttcaatacatcaatgtcatggtcttcacaacgtgcctgacaaatcctagttgtttggattccaaattgttaataattcacaagagctctcccataggaagtttcttcgataattctgaatattatataatacaaaatcacaatttggaggttaaagacttttcttctattaaacaaaatagagtcacgtttggagttcgttgatagtcacaacttaacaatgacacattaaaatattcaaagttttatctgtattgatcagtgattgacattaaaagttgtaatcaagttatataagagttgcaaactctttttgaatcatcttcacaaactaaaagtcaacatgtatcatatatttcagatctccggccaagttatcaagggtttgggattcaagacgaaaattttgataaccattgtctttagaaccaaactaattttgtctgttatgttactttcattctcaatcaacttcaacaaca

SEQ ID NO: 8107 - DNA, 556 bp, Arabidopsis thaliana landsberg
  unsure (1)..(556): unsure at all n locations
tttacacatattcccaagtcatggaattatacttcggagtaaattgagctttccactgattgctgagatgattctgcattattgttttgcattggcatatgcaaaagaggcttaggagggggatcaagagaatccaaacttccttccatcatctctacaannnnnnnnnnnnnnnnnnnnnnnnntggacggaactgaatacaccatagacccaccaagatcatctttttcgcatttttttcttcctctcgggttagtccatcgccaagaagccttgtgttatcaaaattttcaagatccttgtagatccaatccggaaagtaagccgagctattgctcggatcagcattttggactctttctttgttccttgctccgatcatctcaagaaccaacatcccatagctgtacacatctgacttgtgagacacgcttccgtacattcttgaaaacaactctggagcaatgtatcctattgctcctctggtatcaagcaatgataagatgctctcttgcttctcacagagcttagcgagtccaaaatcagcaactttgg

SEQ ID NO: 8108 - DNA, 1141 bp, Arabidopsis thaliana landsberg
atacggtaatacacgaaaatcaaagtctttccacatatctgataatgcttttaagaactcagacttctgcatgttgtctctctcctgcaataaataaaaaaatgccccaaaggttttatatgtttccaactatcaaaatcacgtctgtctgaaacgatgattaaaatttaatatacatacaagcatatgatcaaggaaacggagggcacgcaacctagtgtcgcttcggaaaaaactagatcctgcaggtgaaagttcaagttcaagatataagtgtaacaagcaaggaggtaaagtttgtcacaagaaataatcaaaccacatgaagctcagtattcctacctgtgaaatctaaagctgttggtctatatgactcgttcattgatagcatccgttgtaaatcagataccaagtccgagggtatagatgagaaagtttcatttgttaaatagttcaatgtgttcatgtactgcaaaaaaattgcaaggtaaccatcatcagtgacggcaagaacagatattataccactttctacaggacaatatgtaaagacatctaaaacagatactaatgagcttgggttttagcaataccatcttgacattgttatgacaatcaaacaatggtttccgtgccactaaatgataagtgaggcatccgaaactaaaaatatctgaagaaactccagccgaagaagttttgctccgcaccaattcaggtgcagtataatttaaagatggttggagtggcaggattgagtcctcaacatcatattcctgcatagatccatgcataggatattcatctagataccagagttgaatcaaaaaagttgtatgccaatctagtaatcgatcataattcataagtttaagtacccacagagtagtggaatgattgcaagttatccaaattcccatcctgtgcttgtgaaatagcaaagccaaatccggcaagcttccaggaaccagccgaagtaataaaaacgttctgcaaatgaagttgtacattaaccaaaacagcttcaaggaagatgaacaagtattgactataaatttcgaaaagcaacctccggagatacagcacgaagaataagatgggcgttattatgaagaaagttcaatgtctttgccatttggag

SEQ ID NO: 8109 - DNA, 857 bp, Arabidopsis thaliana landsberg
tgtttcactttgtttaaagttattcggttcttgaaagatcacagaagatatctttacctggtcgaatgcaccagcttgagtagaacaaatccacgcgtttttgtttgttgttaggcggtatagaaggaaccgatactccctgaaccaagaacgagatacaatcttagggtgttgttattgtaactggttctttgcaatgcaaagtaagagcacaaaaaatgaatctattcttcatctcttttctatataacctgttcaaatcccaaaccaactgatttagaggtaagctggcaattcaattgcaattctatgcagaaaaactagcctgacatcgaagctaactcgagcttctttttactctttatcacatcaatgtaaaagagtccatttttgttactagtacacatacctttgtaacacagtaataagagtttccacaattccatatcctgcgaccgattacatactctctatcactgcagaagaacgggaactgcaacaccggaacatacatgaaaggaaagatcaatctaagaaccactcatcaaaatgttacaaaacaagtaaagcaactagagaggcagagagtaactaaccttgcgtatccatctaacaatcatggttccagtactgggacactcttcaacagtagtggaattagaaagcattgtatcccaagttggtctaaactcatcatcccagaaaaagtctcttaacatcacaggagttgcatcttcaaacacagttctgcttctatactcagtaggaccattctaaaacaaaacacaaaagacccatcaagaacaaaaagaaacaaatctctctatctcaaacacacaagagcaagtaatatatta

SEQ ID NO: 8110 - DNA, 668 bp, Arabidopsis thaliana landsberg
taacgactaaagacgtgtcattgtcactcatgtcgtcccctgatgattcactctctcgcgcttcgattcctttctcatgggaagaagaacctggcaagcctaaacaccatgttcgtcatccttcttactccaagtgtcttgatttgccaccgaggatgctctttcctgacgaatttaccaaaatgcctcggacagcgaatcatggtcgttatctcgccgggtggaaacggtggttccggtggaagaaagagagagatggtgatgcttatgtggccggaagtggaagttatatttatccatcggaagatgaagatgataccaagaccacaagaacaaaaggtctccattgtttctcttacgtcactaggtgttacttctgggtaaattaaccttaaacttcattctatttctttaaaaaaaaaattctcttgtcttgtcagaaagaacatgtttgtatcttcttttgttttgcacgaagttccatggaagaacaagaagctgaaaatgaaagcttctgtgagagctttttaaaaaaattattccaaacaataccccgccgtttacttgtatggaccatacttactcaattatgggcttttcttaacctatatactggcccaacaccttaataattgctaaattatttttatgatgctcgagctggattt

SEQ ID NO: 8111 - DNA, 2388 bp, Arabidopsis thaliana landsberg
  unsure (1)..(2388): unsure at all n locations
atgtaaatgtattgaacttcgtgcagtccagagcatcattgttccatcaccagtcacagccacgacgtgtcccctcctcttcagcgattgcacaagaagaagtttgtcattgggtgatgatctacccattaccttcaagtttagcaacaatgtcaggtaccattaaataatgttcctcagtcacaaccaaaatcataaggctcttacagatatctcttcacaaatcctatctctttcttcttctgaataggatcgaaatacttttccttcaatcagattaggctcactagcatctgagtctgaagctaatataccacactccagtgcaattgatttggcagtctgaatgttatcaccagtcaccatacgaacctgaggccaatagtggaattagaagactataggcctatgaagaacagagaagtctctaaaaataaactaattattgagagaaatcctcaggggaagaagtaaatgagatatctgcggaccttgactccagcttgttgacacagtaaaactgaatttttgacacctgggcgacatggatcctacaatgtattggcagaaaagaacttcaatgaatggcccatctggtatgaagaaccatataaaggcagatcacaagattattcaaaatggcaaaagggaactaggaatatgcttaccttaataccaacgatagccaacaatataagatcatcctcaggtaattcccatctagagagttgctcttcatcagttggaatcttatccgcttcaaatgttcggaaggcaattgcaacacagcgcagactccttgcagccatatcatcgatagcatcttttaacccacccatctgaaacaacaagacttatactcagaataaaaaacaagtatttctatcaagactctcattaccaaatctggcactgatttggacttgcagtatgacatggtcttgagtcaagacacaatgataagttcaacattcagacaaactctatcatgataaagagaaacatagttactgaccttatcttcactcatatctacaaaactctcactctcatccatatagtgcgtgcaggatcccaaaacaatttcggcagcacctttccagtgaacatggacactcgaatctggctgaaaatgaattagaaagtcgttaggatgctgattgacaagtagaaacaaccataagagaaaaatcaaaaacaaagcaaaagatctacaaaaactatgggaggaaatgaaaagaaaaaacattactgatttcactgctacacctcctcgtttcttctctgagttgaatggaaaaaattgtacagcagaagactcagacttaagagcatcaaaatccatacctaactgcagtgtataagaaattaaaagattagttcttctcacggctatatatacgggaaccagaaaatgtagctaaagaataaacctttatcgcccaattgagaattgctctttctgtaggagatccagaaacctgaatctcaccactctgtcatcagtaaagacataggcattattacattaaatcagctgaagtagaaaccttacgggaaatcagtaaagttccaaagaattttaatcctacttcagatcgnnnnnnnnnnnnnnnnntattgtgagcaataccctcaacaagtatggatgtaaaagcagatggcaattttgagctgctgtcgggagaatccatcttttgtaacccagcataacactcaacaacggtcatctgagaaaaaagaaagtcgtaggggacccgcttgttgggtacacaattcaaaatagcaaaagctcataactaggaaagcacataccaaaactggtaagtgttaagtgtgttagcaaatacaaaaagaaggcagagcaccaagattcacctcgtttaaggtcaaagttccagtcttatcactgcaaattgttgttgcagaccccatggtttcacaggctgaaagcctacgcacctgaaattaaaattcgtttaagttgcaaaaaacattcacgtataagaattttgcatttatgttcattcaaacttattgagtcccaaaaattaaaatatacataccaaagctttatctgccatcatttttctcatggaatacgcaagactgccagtaagaagtagaaaagatcagtgacaaaaagactattcaattttacagcagatccatcattttctttaaagtttgactctgaccatgtaataactaaattctttccaactctaaaggccaaagcaattgctattaaaatatgtatatagaagacaatagacttacgtcaaggtaacagctaaaggaagcccttcaggcactgtcactacaacaattgtaacctattcgacaagttgagcagaacagccagagatgttaataagaagatgacaa

SEQ ID NO: 8112 - DNA, 1095 bp, Arabidopsis thaliana landsberg
gttttcttctagtatgaggtttggatttggatcccttaacatgatctactccttttcaaattcagtcttgattattgtgtgttcaagtccttttcatatgctttgacatctttctaatcatttgtacaccaaaaggcttgagttttcatgcgtatggattgtttggagactgaaatgagaggttagtgaaagatgtaggtaataagagtacacatggatagggttttgtcaagtgtaatgggtaagttacagagaggctcaggtcatatcctcagcaatgtaagacttgttagttattgaatatttgcatcgtagtacttgtctatgcttataactagtgattggcaatggttatctgatcagctggaaagtcctaaatggtgtaaagataccataatcaaaagatatgcagggttcctccagctaagctcccatgttgaacttggttagccttttgtgtatattgattacagaacataaaatatttgcttagcgaatcgcaagttagaggattcaaagaactactttgcacaaaagattttccttgaggatactgccaaagtattatcaacaagcaaaaaaatcaagcccaagaaggaaatgagaatttacaaactcaaaatcacgaatgtcaaatcataacttaagtcccaaaatgctcgattcttgtctctgatactgaatcagacaaacctgaattagcagctccttgggatctcaacttggcaacaagaccccacatattagcaagttcattctctagatacgcttccctttgtttcgactcttctactgttctttgtagctcggcttccctctgaattttttcaatgagagcagcttcgaatgaaacttcacgttccttgctcacagtcagttctctcttcagttccatcaacgagttttcttgctctttcctctttgaaacactctcccttcttccattcctcaggtttcctgtctttccccgtggtgttgtaacagagctcttctgcactgctgccagatcagctgctagtctctcgttgtgattcataagtcttgctatttcctcagacaatgccttgagctcaatagcagccgctgaagcaagcc

SEQ ID NO: 8113 - DNA, 1156 bp, Arabidopsis thaliana landsberg
aaagactttatcagagaagatggcacaacaatcaaggtcttttaaactgttgtcagaagaggctgccaaagcccctcaaaatgaagaaattaaagtaatctttgcgatctgtttatgatctttatcatattttggatcaaattctgcagatatttactttcctggttgtctttggttttatgcaggcagagattataaacctcaatggcgacatcaaggcaaagaacgaccagattgctacgttagggaaacaaatattggattttgttatagcatcacatgatgaattggataaatctgatatcgtgcaggtcgattatctttttcaaacatcacacagtagccttgtgcttcttgttctgacatttgtttgaggttggattttctctcatgtgagtcgctcttatcttcaggctgtttctgaaatgagggctcaactaaatgagaaatgttttgaactcgaggtgctgctgaaactctctctctttacacaatacttcagctcttaattgatactgcacctagatggctttgctatataacctacctgcaactatatatcttatttagctcgatatgatctgttaaggattaggactctttttactcagtattcatttaatttacaggttaaagctgcagataatcgtatcattcaggaacaactcaccgaaaaggttcagataatacaccgtctctttccgcagttccagcgtatttaggaacctttgaagctagtgcgcagacatttcagagaattatctaactgatcaactcttttctgcagacaagtttatgtgaagatttgcaagaagaggttgcaaacctaaagcagcagctctctgacgccctggaactgggagatatcaactcggtcacatgtcacatgcaacaatcttctcaatcgccaaacaaaaatgaagaaaaagtcatagaagcacaggtgaaaattcacatatacttcacaacatgttattgtgaagattttccccttatactttgattatatgagaatctgaacattttattcactacctgaatgagacataccaggcatttgagattgaagagcttaaactgaaagctgcagaactaagtgaactgaatgaacaactagaaatccgaaacaagaaactagctgaagagagttcatatg

SEQ ID NO: 8114 - DNA, 1226 bp, Arabidopsis thaliana landsberg
ccatagataacgtttgatataattccatgatcttatatttgcaatttaaaagtttggcaagatccaagtgcctatgatgagtttacgaatataaactttgataaagaaaaataatactttgcaacaaaagattgaacttaactttctacacactaatattttttcgtggttgattaatttcttctaacatgaatgaatcgctcttcatcaccttatgaattatgatgcactagttggtggaagatgacctcaacttttggagattctcaagagagtatcgtgtgatgattcgcaacaaatatcatccggtggtggcgtttcaggttgagcgttaagccgtaaaatcttactttggatacgtgagacatttgttggttctgtttttattagatcaaagcacaaattgttcttttaggtaaagattagaacactcgtatttcagtcttaaatctttgttgccaattgaaaacagattgttttatttttgcttatacttgtccttgctatcctctgatggtggctctttggattgaatgttaagctgtaaactcttacttttgaatttggggacctaagtaagacatctagttttttttttagatcgaaaagaaaagttttcatatacaacccataatggatatcaattctgggtgtttcgagttcatcatttgttgatgcacaacagactttagcaaatctttaaccataagattacaaattaccttgtttgatgttgaaaatatattgaaaataaaagttaaaaaccagagccacatcggttagttagaatgttagatttcacaaattatagttacgtttctaggtgtaataagtcaaatcaacctgaattattaaaaaagaaaaactatacaaaggttatgagcattcaagcttttatatttttgattaaccatatagtaacacaatctcttaatatttaaactaatttatctcatacataagatcatcacctaacttatactaatttattaactcatggttttattttttttagctctcgagttctcaggaggttcaccaatgaaaaccgtgtctccaggttcaaaaatcatatataagagctcaatgatttaataaatactggcaaatcaacaattcttaattttctttttttatcgttgggatttgcgttttatgttgaatttctattttaaattcttgctaactttttttttgggagctaggttagcctcttttattaattg

SEQ ID NO: 8115 - DNA, 991 bp, Arabidopsis thaliana landsberg
cagttttattgttgttgctgttctgttatgaatggagcacagaaaggggaaagaagggacatggagatcaaagagataagacatcttatatcggagaagcactgccttaccaatgagtcttgggataaacagaagttctgggacaattcagggttcaagattgttgtatcaatgtctatgttgatgttagtggtagtctccaagagatgatgaattttgtaatgtataaatttagttgcagatagttgatgaggataatctaactcatgtatgtgtcgtcttcaggtctaatataacagccatgtacttaacataccattagtatatgagttactctgttgacataacagccatgtactttaaatactctgtgacgttatatgtttcgtattcaattctagtataattacataaacggcggacgtatatcaaacagctcccgtagctcagttggttagagcgttggtcttatgatctgaaggtcgcgggttcgagccccgccggaagcatttttgttttgttttacacaaggcccattttgaagctcaattttaatttaacaaagcccattacgaagcccacctctaacatgtaaacgttttcttctcggtagatatgtttcgcattcttataaatggtcggcgaaaattttcaaaaggtttactttttttctttccttgcatctcgacacgtggccccggttcatcctgtaatctttttggaatattccgatatcatatatgtgtatgcatgtatgtatgtatatttgatttctctaattacaaaactacccctactttgtcgtgtttcttactgtccccacttcacagctttgtccaaatattcaaaatgacccatccttctttaattattaatattcggttctttctttcgattaatttaagaactaattataaactatatatatatatatatatatatatatttggctggaaatgtgattatatttatggctgttggttgttgaact

SEQ ID NO: 8116 - DNA, 1217 bp, Arabidopsis thaliana landsberg
ctggcgtatttactcggtctctttgttccatggagaattcttgcagttttgggtaactcgcataacattttgacttggattgagagaaactattcaggtttttattgaattttgatctatacagtctaatcactttcttgtttgtcttctttatgtttaggagtattgccatgtacattgttgataccgggtctttttttcattcctgaatctcctcggtggttggtatgcctctacaaccgtattgcttatattgttgagtttgttgcattattggttatcctaaattgttttggtgttgcaattgtaggcaaagatgggtttgacagatgatttcgaaacttcattgcaagttcttcgtggatttgagactgatattaccgttgaggttaatgaaatcaaggtagtgactaaactgaaaaaatgctttgatgtgatttcttgtcttatttaaaattttcattttatgcactctgcagagatctgtggcatcatctagcaaacgttctgcagttcggtttgtatacctcaagcgcaggagatactatttcccactgatggtgcaatttctcttacctctctggaactaattgtgtcaacacatgagagaaactcactcgtttcctgtaatctgtgttacaggttggtatagggctgcttgcacttcaacaacttggaggaatcaatggtgtcttgttctattcgagtacaatttttgaatctgcaggtagagtcatatgtttgttttgattattggaatggtcctaagatagaataaacagatttctaactatgcttctttgtttgcaattatcattcacttaggggtgacatcaagtaatgtggcgacatttggagttggcgttgttcaggtatatcatttcaatctaggagacattagattcgatttttctaaccgttgttcattctataccaggtagtggcgactgggatagcgacatggttggtggataaagcaggtcgtcggcttctactcatggtgaagaatatttgagattcatcacaaagtctgaagaatttatgtatgcataacataatattagcattttcttctgaaatgcagatctcttctatcggaatgacgataagcctcgtgattgtagcagttgcattttaccttaaggtaacattttaacttttgacatctatacttgtacaaatgtagagtattactctaattatgaaatattgaggtt

SEQ ID NO: 8117 - DNA, 1416 bp, Arabidopsis thaliana landsberg
aattctgttgtttccttctgaagttcctggaaaaaatttttcggttaaaggcgttgttcagagtcaaagtctactcagaaagtaaaagggaatgatacttccagcaaagacgaggagaagcagaaggaaaagctagaagatgatagctgcatggaatcagagccaatcatcacatggttggctcggtctagacatcgggacaaatcctccactcttaaggctgtacaaaaacggaaaaaaactgacgtaatgacatctaatgaatctgttaaaatgaatggggatgtcacagatagatcggctagttctcttgcatcatgtggattacctggaccaagtaaaaacgagttggaaagctctggttttcggaatggtagcatatttcctattgtctattgtaggagaagacttcatacagcaaagaaggatatctacaaagagtcaggttacaatagtgttgagtttttgaagcagtttcttgtatcaaaaagtccggatcctggtgtagagtttttgcctattgaagattctggggatctggagctttgttgcccgtggaatgaatcagagcaatttgagttgtccctcagcctacagggtgtttccttgatgagctactttcttatggccgatgttgactggctttcacgtgctgttcttttgcttcgtcatggtacacttgtgactttgtggccaagagttcgtttggaaatgattttcctgaataaccaagatgggttaaggtatctaatttttgaaggctgcttaatggaagttgttcaattgattttccgtatcttgatggtagtagatcattctaataagcaaggagcacaaggagcggatgctgacttgcagttgccagttttctcaattggtctccaagtttcttgcatcccaggtttccaaaggcagcttggatttcaaatctacagtttccatgaggtgaaacattcaaagtggtcatacttggaacagaatgtcaggagacattctttgctggttaagcaagtatcaattgcagagtgtactcacaataacatgaaggtcctgcagaaggtacagtgattctttaatgaatgttctggtacattgcttcgttggttatacttttatttctattatctcataccaattcgtttttttttttaatcttgcacatcaggttatgcagaagagatctaggcatggaatcagctcaggccttgtttctagaggatcatcatctgctgaagcgtggcccacatctgtttgctacaagaagcaaaatacgtctccatttgcacttctttttactgctcggccacctacacttttactcagtttacacttgaacatgataagggagctgggtcatgattcagcagacttcctaggaatagaacgcgatttggtaacacatagaggttgtgatat

SEQ ID NO: 8118 - DNA, 1788 bp, Arabidopsis thaliana landsberg
ctaggttctgagttatgcgcacattacgattatgctcttggccatattgagaaggcttttgagcttttgaaatctattagagatcgtggattcttgattgaagaaagagtttatggtcctcttcttggttatttgattggtatggatatggtagaggagttccatagtttcaaggatgtgattagggaggccagtcccggttccgttgagagacttggttattatgaaatgcttctttggatccatcttggtgatggagagaagattgaggaactttgcagtacaattgatggggataacggtgaaagcttatcagtcttacaaggtaagcaatattcagttttgtgcactctgttgttttgtggctgtctcttactctgaaagatttaacctttttgttccttaaaaaatacagaaaattatctgattgcactatgtaaaaaagaccaaaagtaccatcttgagaggctcttagagattgtagacataacaaaagttcgttcgtcggacctattggcaaacatatttgaataccttgggaggttttcattggattctgttgcgagtagattcctttgggagctaagagaaagtggtaaggttgcattgtacaataacatgtttatgcctgtagaacatcattgttatagcatgtatttatatgtttttcattaacatgcgtagatgaagaagtgaagaacgtttctgatctcatctctatctattctacttgcaccccaaatccgacggtaaggacttttcacgaatattagtgtttttaaagtctttggttaggtaatcaatgcctcctaactgtccatgttttactggttttctacaattaaaggttgaggataccatcttgaaatttaacaacatgcatgaagaacttgatgttatgccttcatctacatcatacgaaaagcttgttaagtatagctgtgactcaaatgaggtattcctattatgcttgttttataataaatttggctgtatttcgtgtgctatatctaatgagtattctctctgtgccgtaggtagtcactgctcttgatgtagttgaaaaaatgggtgaagcaggtttgataatatccgcagatatcctacattcattgttacatgccattgatgaagttcttgagtttgatttggtgtgcatcctcatttagcttgaatctatatccagacaatatacaatgaactctgctcatatatgaaacggagtttccttatacatttactgtttcaggtccgaagagtccattcaattatgtgcacaaagagtgtgaaacctaatactgagaacttccggagcattatacgtttgtgcacaagaattaaagatgtaacttcctttctacttatttcagcttcagtatatcctaaaaccctatattatagatgaggacatgtctgtgctgtttcttacagatgctgcttcgcttgtctctcgaaacacaaaattttgctctaaatcttttggttttatgtgcagtttgaaggtgcatataatatgcttagtaatttaaagaacttcaatttggaaccgaactctagcatgttcaattgtatattggctggatattttagggaggtaatatcttaagctgccatttcatgtttgcaaatcctgactcgagagatagtccatatttctgtgagctcccaacgtctcttagatcgttttcagctgatggctattgtatgtgtcgaagagaaatgtgagtagtgcgttaatggtcgcaagcatatgaacgaagctggcgttaaacctgattccataacttt

SEQ ID NO: 8119 - DNA, 1419 bp, Arabidopsis thaliana landsberg
agttatgccactctagaaatgttttcatgagatgaccattcaatatttataattaaactggctacatgtatatctatgagacatccagatggaaggtaacaagaggtcaaataaatggttaagatagaccaacaaataattgggccatttatgacgtaccattgctctgcagagcaaaaataagctcattaagcacagcattctgctctagatccttatgcacaagaagggtttcctgaaagagacgagagaagatgaaatgagtcagttgaactttagaatctcccactgtattaattaaatctcgatggaaggtaaaaagttctcttaccatcgcattacaggctgctggatagtccaactttgcatcagaaactatgcgctttgccatatccgtatcacaagccttgtcgacatatacatgacagattccatctgcaagtacacaattaagccatcgtcacactctagcacaatccaagtaaagaatcttctggaaaaaacaaacttgcaaccataccagcatgacctagcacagggatttttgtagtattttttatctgagtaacaagcttgttgcttcctcttgggatcacaagatcgataacgtcatcaagctgtaacacaaatgcaaatggtgggttccagtttaacaaaagatacaaaagaactgttgcagctcctagcttgtaaatctgttcttaccttaagcaaatcaggaatctcttctcttgaagtcacaagtccaatgagtttacccccaacagtctctggaattgcatcagtgatcacctagaaatttaccatgaacttaaaagagctgtagtgataaattttgaggcaaataatgatatgaaatctgaggcaatggtaccttgtgtaagatagcatttgatcgccgggcctcctttccacccttcagcagaagaccatttccactacggatggcaagtgaagctatctgtttggtttgtggataaagcacagctttaggaaattcacatattaagaagggaaatgaattttgactattaacatacctgtacaagtgcatcaggtcgggattcaaaaacaatcagaagtacgcctaatggtgatgaggtcttctctaagacaagaccatctaccacctgtaaaaggaattgccacaaagagcaaatagcataaacaactattgtatgtcaactaggaggatagtcatatcccttatttaactcaagagtatgtaaattaactatatggtaacaattgtcctctgatcacctctgttttctttaaaacacggccgattggatcttccatatcagctagcttacgaactgaagctgcaaggctcgagatctatatagcacaaaataagaaacataataaggagaggttacattggcacaatatgtttgcccaagccatacaacaaaa

SEQ ID NO: 8120 - DNA, 1073 bp, Arabidopsis thaliana landsberg
tctctctcgagtaaaaatgaaaaactatacaaaaacatcacatataagtcagtctttacgaatggtaatatcgatatttaatttctacccaaataaaaaaaaaaaactagtttgatatgtaccacgtttctcaatgtggttagtgtttttctgattcattagctgaagtttgagctttgcgtaagtggtagaagctaccgcatttggcaaatattccatggcttgaacatagactgaaagtgctcttacctttttgtctccctttggactaatttttattctccttgaaaatatcataatagcatagaataaacattttcaagtaatcagtatcaaaagctagtgattaagcattatattaatgaatcaatactcaccattttctatctccgaccacaaattcatccgagtaatgatatttcttgtctcctagttttgagaaatcagagattttccatgtgaatttgttcgttggtgggttttgtgtgaagacaaccctctccaccttctcaatcggctttataacgaatatctccaccccaacgatacaagcatctccatcggtgtacccattttttgggtcgttaaacttcgaacgaagaagcatttgtgcaaatccgcactcttttttctccttactataatgtttcacagttccatctacatacatatatacacacatcataaacatatataattctgtcccaagtaagatatcttctttggtttaagagacttgactaaaaccagcaaaattgatcacaataaatcgctatatctttaaaaaaaaaagtgtgtttataaatatgttcataccttggaaaacagagtatttcttggcgttgtgattgtagatgaagaacttgagttctacatcaatctgcatctcagaagcaccatcattttcgatcctcgcataaatcgaaatatggtcttttccaccatcttctacctttccagccgggtaaaatatcaatctcctgattagatttatcattgttttatgataaatcacacataaaaaaatcatacataagagttatcaaatatatattagatcctagatctttgtt

SEQ ID NO: 8121 - DNA, 1276 bp, Arabidopsis thaliana landsberg
acgaccttagtctcagagacccaaagaagagtagtttcaagaacaatggagtctttcacaaggtacccttttgattcatcatttagatcctccacagatattaactcagatatccctgatccgtctccattctctctcgagtaaaaatgaaaaactacacagaaacatcactcataagtcagtctttaagaatgatcatatcgaattttctacactaaaaaaaaatatagttggatatgtaccgcgtttctcaatgtggttagagtttttctgatttagtagccgaagtctgagctttgcataagtgctagaagctaccgcatttggcagatatgccatggcttgaacatagactgaaagtgctcttacctttttgtctccctttggactaatcttcaatctccttgaaaatatcataatagcacattgaataaatattttcaagtaatcagtatcgaaaactggtgattaagcgttacattaatgaataaaaactcaccattttctatctccgaccacaaattcatctgaataatagtatctcttgtctcctatatatgagaaatgagagattttccacgtgaatttgttttctggtgggttttgtgtgaatacaaccctctccaccttctctatcggctttataacgaatatctccaccccaacgatacaagcatttccatcgatgtacccattctttgggtcgttgaacttcgaaaaaagaagcatttgcgcaaatccccactcttttttctccttattgtaatgcttcatagttccatctacatatataaacacaccaataagcataattctaaccaaggaatatcttctttggtttgacagatttgactaaaaccgacaaaatcgatcacaccatgtataaattgctatatcatcttaataaaaagtgtgtttataaatatgttcataccttggaaaacagagtattgcttgttgttatgattgtagataaagaacttgagttctgcatcaatctgcatagaagcaccaacattttcgatcctcgcataaatggaaacgtggtcttttccaccttcgtctacctttccagccgggtaaaatatcaatctcctgataaaatttatcattgataaatcacacataacaaatcttacataagagttatgaaatatatattagatcttagatttggttgactataccatttatgtcccccaacgtcgaaatcagcagattcataaggctgatgactgaatttaacctcagagaaaccaaccagcttcatcaagta

SEQ ID NO: 8122 - DNA, 2184 bp, Arabidopsis thaliana landsberg
agctttgtcacaataatatatagcccacattacgtattgtggatgccgtcgtagctgatcacgtactctcactattttcgttttcttttttgatttttttcttctaaaattatgtctaacgtaattaattttttttttggtaagtctaacataattactttgataaaaataaaatgttattctatgcatataattcttcatattatgggtaagatcactgttatttacatcaatttttaacccaaatgacttaaccaccaacttgatatatgagacttgatacatcatgggcctctgttttttttgggtcaaaatatcattgggcctcatggcttaaaaatgcgtatgaaaacttcaactgaaacccaaatcaactcaaattattgaatgtcgtgatctcattgttatcttgagattgaagcaggggcggagggagtgaagggggaagggggtccattgaccccataacttttatgatttttaaggtaagtctcataatatttgatctcacatagctttactgagaacctccaaaaaaattgcacttattacttataatctgcaaggcattgtatagtttaggaattgaaatcttatgcatgacgtgaaacgatgaaagtataaacatcaattttcactattaacatcaatttttgtagatattttcctgatttaagaataattacaggggcattgttttaccagtttcattaaaatctagttgactttttgatgtattttatcttatcctgatctaagaataattttataggcatcgttttgctgatttcatcaaattggaaaaccaaataaatagaaacagaagtgtggatattaattgaactttaaatgtgttgtaatgtgtagaagccgcaccaggcgcatcttgttgccattgcccatgttaaggaccacaaaacatggaacatgaatgaaaactcatgcactaatactatatcccagatatttgcattgaaagttacactgtaaattacatatagtccaataaaatttgtaaaattatatctgttcttttttttactaactctcattaaattcacaaactataagaaattcacatatacatgactataatttctcataaaactctcaaatcataacattaatttgttgaatattaacatatatatgactaaacactgtgatgcattcgttaattattatctttttatcagaaaatgaaacttcaggtaggttgattgacagatatgaagctcgtttgatttcttctattatttattctattaaaaaagaaacgggaagtgactgtactacaaattaatatcgagtttcttgcttcaagtattaaaacctgttaggagatctaaatctaaatctttaacgggactacatcgatcggaaacttctcgccagttgtgtacatgtgctgagtatgcctctacatctctagtatctatatgaattatacaaaattgtagcccgatatctcctataaatacacccaagtcacatcaacccaaagtcacacacacaaagaaaaacaaaagaacaaagatgggaatcattggtaagagtgtttctctaactctctttgcacttttgtgcttcacttcctctgttttcaccttaggagtgaatcaacctggttcatcagatcccttccatagccttccccaacaccttcccctacctccgattacattaccatcactcccaccggccaaagctccgatcaaactaccaacactcccaccgaccaaagctccaatcaaactaccagcctacccaccagccaaagctccgatcaagctaccaactctcccaccagccaaagctccgattaagttaccaactctcccaccgatcaaacctccagttctcccaccagtttaccctcctaagtacaacaagaccctagtggcagttagaggtgtggtctactgcaaagcttgcaagtacgcgggcgtcaacaacgtccaaggcgctaaacccgttaaaggtactaacttatatacattcatgatatatattatcctaaaactcactcgaacccttaatatacgcacatgtggtatgtccgtatgtgaaaagttcttcaatccgatgcatgcatactttttttttgctaaaggtatgctgcatgcatacttcattctttacatttattttaggcatatgttaaaaagtatccataatctcatt

SEQ ID NO: 8123 - DNA, 1414 bp, Arabidopsis thaliana landsberg
taccgtgtagtccaccatcgatgagaacatatccatgttgttgttgtggttgtggttgttgttgtggatcaagtctacggtggaatcttgtgtatggttgacggaatacgtgctgctgtaggtgcttgagtttgaagttggctccatcatagtttcgattcgaatgaatgaggagagtttagtcagcagtttgttctcgaaatcatcgtctttcttgtgtagatctttgtaaccatatctattaaaaaaagtttgagatatttcaagggtcttaaaactccttattgattttgtaaaccctactaaagaacagagaagaataaaggacagtacctggctacgcagcggaacattcggaatgtttttggtccgattctcttcacaagaaacctctcttcttcagggacagtgtaaaccggaaggtacttgacgcagacaaagactacaaccgaatgaatggcggggaggttggtgatgaaatgagagaaaatgtgaggaacaccacttgctaattccgtgtagactaacccgatccccgggacacggacaagcccgaggctgggaccaaggccgagtatccagctcatggacactttactgtgcatttcaaactcatatttcttgactgttgcgtaatgccagactgacattactagaagagagatcgctgctatgatgagcggcacccatcccccttcatcgatcttaaagatcacggccgagaagtacgataattccacaaagaaggagagaaaggtgaatataaggacaaggatccagtggcaatgccacacgagaagcatgatcagcaccattagtaatgtggtcacaagcatcacgagaacaaccgcagtccctaatttgaccaagataacaaaactgtcacggttaaatattatctttatcataaaccaaaattcttttagtctagattatctaaaaattcttatgataactaacttaaaacgattatctaacatcttaccgtatgcatttcctatttggctctgctttttgaaactagcagtaaccgcgatgcagccgagcatgagtatccagttaatatcagggcaatagatctgaccgaggaacttcttggaagtatgaacaattttaactcgaggaaaacatccatgagccacggcctgcttgacgatcgaataagtcccagagatcgtagcttggctcccaacaatagcagctcctgtcgcgactataaacattggccaatagacactatctgtggagtcaaagcaaatgagagattcaatgttttataaaggcactaagcatgacttcaagaccagtaatgtttttaaaagatttagggcaaacccgggatagatgcatagaacgcgtcttgataatgttccttatgattcacaagatgagcagcctgaccacagtatgcgac

SEQ ID NO: 8124 - DNA, 445 bp, Arabidopsis thaliana landsberg
accctggtgacatttctatgatctcaatgtagcttcaatagagctgctgtcgtttaataacttatagactagcatattgtggtaataagcatccttattttgtgaatgtgacttttctcatttactgattgattctacacacttataacacatacaggctagctttgaatttgttgtgtttgcattcattttctactttcttttggaatcatgtctttacattcatcttatatcacttttctctactatgccaaaattgaatgcccacaagaaagactgacagctgttgtttaaacctttttgcagccaccagattacgagccacctttcttcagaggctgtacagaagacgaagctcagtatgtatggacacagaatcctctgagaatggaaattgcgaatgttaacagcaaacatcttcgtgttaacgcttaaggtaatgtga

SEQ ID NO: 8125 - DNA, 1288 bp, Arabidopsis thaliana landsberg
  unsure (1)..(1288): unsure at all n locations
tatcgaaaataatcgaagcggtggttatttagttaggaaacaaatttgctcaaaaaaaaaaaaaaaaaaaaaagttaagcaacaaatatgaaactcttgtgtccaaaattagcaattgccttaacacacattcttaaatgtctctccgcgtgaccaccaaattaaaccagaggctcatattaagacatcttcttttccaaccatcttcgtttctttgcattaaacttttggattttgatacttttttacagatttttcacattaaaccttattcgttgatcaatcttcgtctttgtttaaaaggcttggttgattcctagtttttttttctctctcgctgccttgcggttccagtaatcacaaggcggtggggaagaagaaaaagattgataacgatgagggctattgacgttaaaacggggatgaagataccttgggacgtacgctattcattaagtctatttattttcttatcatcaattatttttctttccaacggccaagattatggaatgccgggcgaggatggaggaggaggagctgagccaccgccggagatggcacaatgtaacggtattttcatgagctacaactttggtagccgtgaaagagagtacccgcacgtgaagaatgtaaccgcccaatcatgggcgtttaaatcgactgcgatgattgtaaacgcgggtagggaagagcttaagggatggcaaatgttcatagggttccgtcacaaagaactgatcgtttccgcgactggtgcgactcctatggacggagattatcctctagacgcgagcaatggaaccacgttcgttggatcgccaaacatggatttaaaannnnnnnnnnnnnnnnnnnnnnnnnnnnctcagatatctgcgaatatcgagatcacaggaactctttttggggtttcaaaagcggtcacgcccatgccaagaactattaagctcaccaacgatggttgggaatgtcccgccgctaaaagaaaaggttagatcaatactcaaatcgtttcaaacgcaactaatttatattttttatcatcaaaatattatttatagggaaattatgaacgcaatgcaaaacgtaaaaaaaaaatcgcgtttgcatttgcagtttatgaatcaatgttggttaaatcattaaatatttacactccctaatataattgtcaaacaaaaataaaaaagatgtggtgaatgtgatattcaaaacggtgtgttttgttatcttgcgcaggaggtagtatgcacgtgtgttgcaagagaaaccctaagatcaagaa

SEQ ID NO: 8126 - DNA, 1733 bp, Arabidopsis thaliana landsberg
tgatttatatttttcgcttctttactcgattaggtactatcaattaaaattagagatcattcttttgttttcgttgtattacggtgagctgatcggtgtaatgttgaaccaagagatcaccgaactgttgggagttgtattggttacgggtagggaaattgggcatcaagtaattgttgagatagtcgttgcttcccattccgatgaagaacaagcttcgagtcaccgaatccgcaatggccactgcaccaccggacttgctcgccacctgatctagtgttgtctcgaagttatgaatctgctggtcgaaaggtatgcgtcccacctgaccaccagaacataaactccacgttacattattaattatcgcatttagcaggagcacccacaaccatttttcttggtacaatatgaaaccacaatgttgctcttgaacatagctcatgtgatgtgaccaccattgaaaatatattttctttctcaagaaaaaacgaaaaaattgaaagtattttgattgattttgaataaaaaagatttgtcacaatttttctttatgatcactaatttttttaaaatcaaattagtaacgatttcattaagattttaaaatattaattaattttttgatgtttactcttgtttattcacaagctcataacagaaaatagatacacttcagaattatgtaagttatttatagtacatttattagaatccatttagaattatttaatacaaactaaaatattggtcggctgattagtagatacaagtatatctatgcttaaaaaaaaaaaaagtatatcaatgctcttcggataacttacatttcttacaacaaatagtaaaaagagagtgtatatgtaactatgtaagtatgtaacatatatgcaaccttttcttgttaaggatataacatgcaacttacgaattgatttacttttttgcataaaagctacttacaaagtttcctccggtgtcaggaagaatccccgcggctgcggaagcatagttgacaccacgaagtacttgatctccggtagcttccgagtaggccggaatcagtggcagccccaatagttgagctatacgatcaatgcatgcatgcatcatatataatacttatatcagcctcgttccagttttaggaggaaggaaaacttattataatgcatagagtgaaaacttaccaatcccatcgaccatcgttaagccattgcagaatcgaccggtcggaccgccattgaaatcaatgccataaggaaaataattggctttggcaaaggaaggaatgttattgttattcccattgtctattagagagtcaccgaagacaaacagcgccggcacaatgccatcaccggtgtttaggtcgaccagcggaggcggaggagcagaaataggttcctcaaccacaactagttggccagagacgccatgaaggagttggagaaccacggcaagaagagctgagaagaagcaaagtcgccggaagtggaaagccattatgaagttgtttgtgtttagtaaggtgtaacttttaacttttgtaggttgattttggggtgaagagacaaatagatttggacagatttatagatagagtgagaagggtttggtgaagagtaataaatgtatttatccgtcttctaccacaccgtaataacacaatcagtggtaggtgagttgtctacaatattacttaacattattgtaaacatgtcattttccat

SEQ ID NO: 8127 - DNA, 2254 bp, Arabidopsis thaliana landsberg
aaagcacatgttcatctttaagatcccagactgtctccctgtagtgaagcaaactacattagcaaccaccaagagatcggtacgggagtatagttcagggataagcaacccttttgaaggtttaccagagggattcatgggcaaaatgctggtttacaagagcggtgctgtcaagttgaaagttggagatgccctctttgatgtaagtcattttcgtctcatcattattatatgtgaacccacatatctgaaactgtgttggaattcacctccgcttgtagcttttcttcatctcttttaactctcggtcctatgcatatatgcaggtctcgccaggtccaggtacaaaaatccctaatgatgtggtagcaatagacatcaaagggaggaactgcagtcgcattggttcttcagcgaagtttgttactgttactcccgatgttgagtctcttttgaaccctgcttcagacatggaaacacagaagtgaaggttgctctggaaatagccggtcctgttcatacaaggatgtgaaaaagcgtagtattgaccacttagattctgtatctacaaactaatcttcaactatgatcgtaaaaaaactcttcttgcctccttggtgtcttcttttgtaataagagattcagtagttgttgggataaaagaaaatgcttaacattttgacacattcagagtgttcttattatcgaaatctactaaaatgtcaacaatggagtacagaaccaaagtagtatcaaacaaaccacaatatgacctgaaacaaaagctaaacaagcagcatgatgaagaccaaatgtattgtcggctaatttgaaacgatcaagactagttgcaggctcgggataccatcacgaccagcataacgatgatggatagcaggaccgaagtggtcagcttttcctcgagccaattgttgaatttggcatctttccccttgttgttaacaccatcaccattgtaacaattgaagagctcggtcacgacctttgttattttcacaaacacttccgtggccttaaccattgtgttgtcaaatacccactttatgaaatccgttgctgcgttattctccctaggggtgtcttctgaattttcctcatctgttatacaaaaactgagtccctgagaagtctgtcaaatgaaatgtttagattgatcaattcattatctctttataccttgacttatgccattgttgtacaagtccctaatctctcgcaccacatcgttgttcatcaccgcctcccaaactgctttgtcagacgacaatgatactaccattttctgcattaaaatgtgaaaaagccctttcttcatgtaccaaaaagtaaacatgagcttagtgtaatcaagaaaacaaaagaaagtatcacctggacagatggttcggttcgtagtaggtcaaaagcattgtaaacctgatcataagcatgaggctttaacgttcttgaatggcataaatgcattgatggctccatccagtccgaatccgacccgaatgaaggaacttgatgaaccatccctgtggctatagggctctggtttccaccaccattttccggatagcactcgtatttgtctctaaccagctgggaatatgaactagcatcgaaaacccttcaagaaaataaaacaaaaccgttactccaacacgtaaacagaacacaaatatttcgaaatccataagataacaaagaccaattactattatgaataaaccagcaaacaacttttgaaagtattttaagtacaaaacaactgtgtggggtcacggagacacagctgaaagagtttcaaacttcttcaagatcatcaaatcaagacaattccatccatatcaggaaagaaaacaattaaactttgagacactatagcagtccataacaattctcgtgtctctctctattacttagacaactcgtgggaactaatacctaccactcaaaagtgatcaatttatgagattttatgacaataatttccacaagactcaaactcaaatagtcacatccaaagaatcacacattttcaagtgaaatgagaaaagagaagaaattagattactgctggagagcagaaacagcatcttggacttcatcaacagaaggaacagagccaaacagagaatcatcttcttcctcagaaacccactcaaaatcatcataacctccagaattaacaaaggaaaaaggaccaccgccgctccatccggaggttgcagccaccggaaaattc

SEQ ID NO: 8128 - DNA, 1177 bp, Arabidopsis thaliana landsberg
ttgttccatctccctatacatctagcaagagagacacatttgggtgggcctgtacactttagatagatgtatccatttgaaaggtacaactttttggattaatatatgttgatttgatattttctcttagttatctaacaaagttgttatctgatacttaggtacatgaaaacactaaagtcgtatattaagaactatgcaaggccagaagcatgtatggcagaaaggtacttggcagctgaatgtatttgcttggagtttctcaagacatctgtaccagttcttgattctgcaaaccgaaatgaagatgttgacttagatgagaagatacttgaaggtcgtcctattcataaggctaaagaagttacactatcttataaagagcgtgacattgctcacaaatatgtgctaatgaacactgcagtaataaatccatattttgagtaagttgtgcttagtaattagtattttacttatcatttttgcttagtaagacctcctgatggtgtactattctgatatgataatcaggatgcatcttgaaaaactgaaagctcatgatgttcattgtagaagaaatcaaactctcttatggaagttacatggggaacggttttcccattggttaaaagaaaaggtaagtaaatcaagttcatcatctttggtcaataagtttgtgtttttttatcgttccattatcttttttgttataatcaggtccctagtaattcaaaggagcactcggccaagctgagatggttagcctttggtccaagacatatttctcaatcctataagggttttatcattaatggacatcgatttcacacaaacgacttaaagcggaagactcagaatagtggagtagcatatgaagctttcagtatgtgtagatcaattgcaaaggatacaaatcaagtggcagacatagtttcttactttggagtgattcaagagataatattgctggattactacatgttccaggttccgttattgaagtataaatgggccaacaaagggaatggcctgaaggaagaagatggctttacgcttgtgaagttcagctcaaaccaagccacatatctccaagatccattcattatgtcttcttaagcaaaacaagtgttttattctagagaagatgacttatcaccttggtttggtggtatgagag

SEQ ID NO: 8129 - DNA, 758 bp, Arabidopsis thaliana landsberg
aagaggattcggtagcttcttgttaatcctgacatatcttttttcaaaaggactcacctcaagggggtgtggacgcttactgcgacgtggttcggtgatagcttgactaggcatcattctgggtcccctacaacaagatcaatttttaaaaagcgattaaaaatgacaagtcaacaactattctaatactaagagcccttcacaatcatctctagcagaaaaactttcatcatctgaagattgatttcccatgtcttctattggatggactaacaactgactaacactctcctcttctgtctctaattcatgataccctcttggtggcgccttcataacaacataccactgactcaagtcactttctctagaatagaaaacttattttgcttgtgatgccaggatgtaaggatcttgcagaaacgcaacttgactcaaatgaagattcacaagtgtaaatccatcttcttctttcacaccattccctttgttggcccaactacaattgaaaatgggaatctggaacatgtggtagtccaacattatgatatccttaatcactccgtaaaatgctactatgtctgcttggtgtccagtatctttggcacttgatctacacatactgaaagcttcatatgttacaccactgttttgagtctttcgccttacatcctctgtgtggaaccgattaccaattataatatagcccttataggtctgagcaacaagtcttggaccaaatgcaagccatctcagct

SEQ ID NO: 8130 - DNA, 463 bp, Arabidopsis thaliana landsberg
ggggaaacacctcacgttccaaagtatggaatgcaccaattttcgatacaatttatcagcacaggaaaatctagggaataaaagggggccttgcatctacctttacgtgctcattctccaggatatttttgccacgtatgcgcaaaacagatccgtctttgtcatagtccacctcctaattgaacaaataaagagaactgaagacaatcagattcattccatgaaattagactaagatatcttccaatgtcaagagtagcaagattaacgggcagaggaaaaccataaaaagaaacatatgtcagaaatatcgagttttattacgcacatgactgtggagcaatatagtgcatttatgggcattggtaataggatactacaatgcaaaggtataaacaaattggcataccaagcccttagaatcgtacctcaacttgtacttgcagctttagattaacacgtt

SEQ ID NO: 8131 - DNA, 4077 bp, Arabidopsis thaliana landsberg
tacccgcatacccgcagcccgcatcgggcttgtccgctataatccgcagtccgtaatgggcctgcccgcgaggcccgctaatttgtggacaaaaaaatcaacgtccaagcccactccgccatgggctacttggacaaagcccgcgggctagcggcccgcttgacaactctacctgataggctcagggttccattggcaaatatgaagaggaagatgagaagtggcgggagaaaggcaagagctctggagaagtatctcaggaaagtcctgaacaaaagtggctaaggaagaagagactctggatggttcagaagctttgcttctactcaataagtctaaggacaaagcgcaccgttttgtggtgctaaggatttatttgttttaagggttttgggggtctttagtatttaaggaaaattttcccctttagggttgtttatcaaaaacataatcatttcaatatcatttctatttctctctcttaactctccaccgcataagccgcatatctttcactctactcttatttcctgttccgataagtcacaggcttatcattggtgcttttcatcgagagtttgcaatggctcccatcgatccaaaagccgttgtcatcgagtttaatcctgacccgtcagaactcagccctcctcccagcgaaactcctccgccacccccaccactggaaaacagagtcgatactatggagaaggaaatggcgtacatcagagaaggcattcaacaactcttacgctttcagatctatggccctcctcgtgaaggaagagagtctactccgttggcctttttcaaacccattctatccccgcagttttagagtacacctgcttcgagctcagagaggcagaacagagacgcaatcttaccctgtccgacgcctgagactcagctgcgacctccagaggtccgtttccacatcccacctgttgagcaaggtctcgtaccacctcctgcaacattatcggcgccgagaggcttagacttacccgattatgaaggaggtaaccgagatgactggctatttaggggtggaacaaatgcttcacgttacacaacattgcggaggaagctaagcttgaaaaggtaattccttgtctaactggtgcttctgtaacatggtggagatgttcaaaggatagggagaaaatttatacttggaaggattttcaggataagtttaagataaggtttaagcctagtagaggtagttcagctatggaccatttgcttaatattaggcagaccagtactatggacgagtatagaggtcgttttgaagaactcatagtggagttgccatatgtgacttctgatttaccggaatctgctttcctgaagtgtttgagaaagagtttaagggatcaaatggtgaggtgtagacccacagatttgaatgatattgtggagattgctaggctgattgaatctcaagaaagagataaccatagctatcaggtgagacaacaacctcgtcctcctgctacaagcaacttgtcacctgttgctgcgagggttttcgacagagttcagtctaagagaccgcaggaatccattaacaacagcaaccgcgcctcaggtagtggttcaagaaatactggggatggctggaatcacaaccggtgtcgccactgtggcgataggtggttcacaagacaccgctgcaagcaacaaaggttgaaaagtcttgaaatcactgaagaagaagaagagagcccgttaatagaggaattagctgaacctttggatgatgaagaagctgaagcagaggaaggcttgcagatactgtcactaggcacaatgtcagaaaactccaggggtaaatccatgaagatgcgtggatacattgggagcacaagcgtggtaatactgattgattcaggagcgacgtgttgcttcattcacgaaggcttagtaagacacaagggctggcgagtcacagaaaccagagggtttggagtcaaggttggtggaggcagagtgataagaggcagcgggaaatgtgcagacatagcactggaagttcaaggcatcgaatttatagaggacttcctgctctttgatttgggttatttagatgtggtgctgggattctcttggctggccaggttaggagacaccagagcaaactggggacaactcagaatgagctggcagattggtaacgcatgggttacccttcatggtgatcctgaattatgcatagaacaagtttctctgaggtccatggagagagttattaaatacactagagcagcttacttgctggagttatctgctttatttgatcatcatgagccacatgataaaaaggaaattgtgcaagacattaagagagtcttggataattatgaatcagtgtttcagatgccaaagggacttcctcctgcccgtaatagagagcatgcgatcaccttgcaggatggtacctctccaattaatctgcgtccttacaggcactcttttggtcagaaaaacgagattgaaaagttggtcagagagatgctggactctcaaatcatacgcccgagtataagcccttactctagtcctatcctattagtcaagaagaaagatggcagttggaggttctgcgtggattatagagcactcaacaaggctactataccagatcggtatcctatacctgttatcgaagagctactagatgagctcaaaggtgctgcggtgttctctaagctggatttaaaatcaggatactttcaaataagaatgaaggcggaggatgtcgagaaaacggcgtttaagacccatcaaggccattacgaattcctagtaatgccctttggattgtctaacgcaccctcaacttttcagagcgtgatgaatgatcttttccgtccctatctcaagaaatttgttttggtgttctttgacgacatcttagtctatagcccgggcatgaagactcacgtgaaacacttggagactgtacttcagctgctgaaactccatcaattatctaggtcacaatatatcctcacaaggagtggctgcggatcctgaaaaggtagaagcaatgttaagctggcctcaaccaaaatcagttacggaattgagagggtttctaggcttaaccggttactaccgcagatttgtcaagaactatggcctcatcgcaagacctttgacagatcttttgaagaaagatgggttcttgtggaatgaagcttctactagttcgtttcaggcattgaagaaagctgtcactcaactccctgtcttgatccctaccagattttcagaaggagtttactgtgaaagcatatgcatctggcacaggaattggtgctgtgctctcccaggaaaaaagaccaattgcatttctcagtcaaggtttttcaagccaagaaaggattaaatcagtttacgaaagagagttgttggcgatagtaatggctgttaccaagtggaaacattacctagcaggaaaggagtttgtgataaagactgatcagcggagcttgaaacatctcctagatcaaaaagttgtctcaacaatacagcaaagatgggcttcgaagttgatagggctgaagtataagattgaatacaagccgggtgtggacaacaaggtggctgacgcattgtccaggaaaccccaaactgaattgctcacgcagctaacattacatgctccacacaccatcgatatagcagcacttaaagaagcagtgaaggcagataaagaactgtgtaagctattgctggatatagaacaaggctgtcagaaaaatggagattttactgtggaagatggtgtgctttacaggaaaggttgtcttgtgatacctgcatgaactcccttcattccaaacctactggaaacgttccctacaatcgctgttgggggccatgaaggagctctgaaaacatttaaacgtttgactaaggaggtgtattggacaggcatgagaagtgatgttgttaagttcatcaagggttgccaagtatgtcaggagaacaagtattccacactctcttcagctggattattagctcctttgcctatcccgcaacagacttgggaagacatca

SEQ ID NO: 8132 - DNA, 2223 bp, Arabidopsis thaliana landsberg
aaagttataatgttttttaataattctttattggattttaaagaagttgcatcttttaagtttttcttgtgttgtatagtgtatactgtatacaacctttaaatcatttatatctttcactaatgactttattttttattagaattctttcagtaatgaatttgtacgatagacgtatttatgagcatatgcgagtcatgagtgattgagtgtagataatttcaaatgtatgcgtctacgactctacggtgatatatgagtatagccggaaaactagggggaatttgttttttgtttaactatttgttaaaaagttaaatgtatttttgttagtttccaaattgaaaattttaaaagtgtgtgtttaccatgtaacatttgtccgtatatataacttctccacacaaacaaagtcaaacaaaattgtgttatataaacgtcaaaatcttcacaatcttccaaaattgggtccctagttaatatgatatcgcatatcaaataattggtcactaaattttatttcttatatttttgtaggttccggcttatgtgatatcacaagtgatcggatcaacgctagcggcggcgactttacggctcttgttcggacttgatcaagatgtttgtagtgggaaacacgatgtgttcgtcggaacattaccatctggatcgaatttgcagtcgtttgtgatcgagtttatcattactttctacctaatgttcgttatttctggcgttgccaccgataatagagcggttagtattcgaaatcttcttatgttgcacgaaatgatataataatcaaatttgatggatatatgttagggattctaactattgtaagcaatgttcgttttaacttcagctaatgtgttatcctttttatactctagatcggagaacttgctggactagcagtaggatcaacagtgctacttaacgtgataattgccgggtaatatactattattaattactatcattttcttttttatatagttttctttatcgacagaaaatttgaaaatgatatatggttatgtttatctttatattaggccggtatcgggagcatcgatgaatccaggacgaagtttaggacctgcaatggtctacagttgctacagaggactttggatctacatagtttctccaattgttggtgcagtttcgggtgcgtgggtttataacatggttcgatatactgataagccattacgagaaataactaaaagcggttcttttttaaagaccgtgcgaaacggtagctctcgttaagaaaaagaaaaacatgactatgttgtactagtcatcggaggttaagttgtatcactaaagaagtaactggaatattttgtattaaagtgtttttaaatctggattaccgcaaatgaataaacatatatggtatgtgacgaatatgtaactgatctataacgagtttggccatatctaattacgtgctatatggttgtattaactgctatattatatctttctctttttatgcgaaagataatgtcgtcatatttatggtgctactgtatcgttacacctttgaaatcattaatgcaattttggatagaaagatccttagtttacgcaaaaattgtcaaaagttgcaatttagaactcgtcaaacaaagcacaaaagcccgtgtcgcaaacattgccaagtgtgcaatactttgtccaagagcttaaaatccggccacgtgtcattttgtcgccattgttcgccacatcatcaatccgaatgacgtgtcacgcatggaatcattcacgtcatgctttcctcatgcaaacatcactcctctcttataagaccaaaagcaaaacactcgaaccaaactaaagaacaagaaaaaagggtgttgttacgatggcatcgagtgataaggttccggtggcgtgtccggcaagcagtggagatggaaaggagccaatgggaaatccgacgaaaaccactacggcgatgctagagaaaggaacggctatgatgcaatcgatgaaaccgatcaggcaaatgagcctccacgtgtgttcattcgcttgctatagccatgatcccggtcgtcagatcgaagttcatatttacggccaccgtgtaaaccaggatttcctccaatgtgctgtctacgattccaattcctctaaggctcatctcataggtaaatatacttcgacttcgatagtttgtttacatttttttgagttaagttt

SEQ ID NO: 8133 - DNA, 2419 bp, Arabidopsis thaliana landsberg
aaagactcaagaccagaagtggttcagaaacataatgatataagtttttttttcccttatcttctgcagttttttcatgttgttgttccagaaaagggaggccatgataattaaaggtacagtatccggatttgatcgttttttttcttcttccttcttttctgataaagattttcactcttcctttaagcttatccagcaacttttgtcccttttgtcttatgttgtaagagggggtaatgtatcattcttattttagatgaaaatcttgtgattactcaacaaaagagtgaccaaatgaccccccaaaactttgtacttaaaatggtttcttgaatcaaaaatcaaaaggtgtttctttaaagcttcttgtctgcttcttagagtctttttgaatggagtttaattcaaatattcaagcaaagacagcaaacaaaaacagagaggtcaatagtgttgagttcttgcaacagttactctcgtgtagattcagtttttcccttatttgagtttgtacaaatggtgtgacctgtttaaatacaacagtctaaagaaagttaataacactattgttttccccactctcttacatgagctgtttcagatcaaaagacctgcagattctcccatgaattttgcagagaattttgacaaagtatgtgcttttgttagcgatgacaaaccactactgaatcacagaatcataaaccttgttttagtccatgcatggatagatagatagatacatgtactaaaatgtggagaaagcaaaagtagatggagtggtgtcaaatcgtaaagcactgatgaaaggcctgagagatcgagaaagcattacgtggattacataaaaacaatttacaaaaattgtcagatgtttaagggaagtagctagaaatttggattatggtgttgaccggttttaaagtcttgtaaccaatcaagtgagttttatggccgttggatttttaattttggtgtagggcatgcttgagctagatccgtacggtaaatagtaggttctgaatttacctcttcagactcacagtccaggcttaagattagatccttgactacatataatacacaccagaccatatacatcacaatacattgtacattgtcttacaaaacatctgctgcatattgccaagtgtagtacaatttcttaacgttcaaattttaacctctttttttacttcttacaaaatgatgttttctctgttttaaataaccgttatgtcgtaagatattcataacattctaaggtacaacaacaaaaataatcctaggacagaaacaagtttctttgagttttttttgtttgcaaaagtcttgatggggttgtcaaatgtatttcaattcttctgtatttaagttacaaataactatgattttgtctggatcaattcaaactatgaatagtaaaacttcagagaaattttgaaaaaaagacatgaataattgaagacagtaaatagagagacatactatgcccaccacttttcaagagtttttccttattagtagtttttattgataacaaatatctatagagaaaagatgatttgaaataatagaaaaagaatgaaactattttgtcaacagtgaagaaactattttgggtgatttttgaaacagtttgtaccaactatacattttgattgtcatgtggtgtgttctcttttgaaccaacaaccagatggtcatcttacatcaaatcttgattacgaattggttttcttaaactagttttcttcaaagttaatgtataagttctaacatgtcacattgagatgatgactaattattcatccagaaagaatctcattctaggatcaatatcggattggatcaatcataacaatttcatatcggtttgaagtagtgtgtattcagattccaaaatttaacaccaattaataaatagatccatgcgtttactatttaagatcgttagtctcatcttatttcatacatgtgtgaggactatcttcctttgcaatagacttggatcatacaaaatcacattctttattgtacattttaatatagagtatgcaaaaatagtacatggttagaaactaatacatatatatatatagagagagagagacataaaacaggaaagccgctccacagaacctgagagattcgaggagctaacgtattcacgagactacctcccaacaaagacaagtccttcaaaatttggttcgaagaaaagtgttttgaataaagaagaaacatgtgtgtatggccttacaaaacccatcaagtactctttttaattttgtgtcttctctttctcttcccaatctcatgacttgagtccctacctctttgtctctcactaccccacacgtgtcactttcagtcacttccatatataaatgcatctcacacacttaaaacctat

SEQ ID NO: 8134 - DNA, 662 bp, Arabidopsis thaliana landsberg
gaacgaagaagcaacgaaaggaaaaaccttttgtttttgtggcggactcagctgttgtgattttcgcattggaagcgacaggagtttgggttggcgcgtccagaacatccagcttctcagattcttcagactcctttgtaggcacttcaggcatctcatcaacaataagctttaagcaaaacacacatcaacattagtctctttatctagtaaagataataatacacaaatttattttgtaaacccatacctgactttctaggttgtcaaattctgctaatatatcttcctcatcctctgctgatagtttctctcccaatatagcgttcagctcctgacattcggaaatgtaaatagagtcatcaaacacaaaagctcgacaaaaaagattatagaggttttcacactagacgagctcagaacaaaatgtgccacacaaaagcagtgatcaaataagaagatatttacattctgacaaagcggataacgtaataatgaatcataaacaaatgatacgaaacccgaaagtattttgactcacatcttgataagctttagcatcagcagtatcatccattagtttttgaacatcatcaaggtccaattcgctttgaatggccttaatagcactattaccctgctttaagctcgcaaacgctgcc

SEQ ID NO: 8135 - DNA, 1667 bp, Arabidopsis thaliana landsberg
cctttacacaaaacttccaacatttcccatctttatcggcactatcatcaatgcttggaagacaccttttaagacttggatgttctctacaacatatcgatttttcttcagatatccacggtgcaatgtgtttttgtccatttatttgaatggatcctacatttaataaaaaaaatatcatgtgaattgattttccaacatcaaaactacatgacaaaacattaacgctttagtactaaatacaaaaaaaaaacatacctatacatagcacaatagcagcaaataaaacaaaagagacaacatttgttttaaccatctttctcttttttctttgttaaatcaaaagattacgaatttttgatatttttgtatttgaatgagaatgaagaaagagttgtttcgtatttataattagaactgtaactctattcaagcgatccttcaaattaacattagtaaggaatacaatatatttggtcaaccaaattaaaaacatgtttccaaaaagattagattccaactttgactacattattacaagatatacatgacttatttagataaacgtatttggtaatttgcaaggtaaagcaaacaattattttctaagggtttattctgtcaagagatatgattagatactcattcatttctcaatattccaattcactagtttaggaaattatacttattgcataatcttgaggctcacgcgcctactacttgtatataaacaagctcaatatctctttgtgaaatatatcaaacatacatcttctacaaattccaaaatcaatgggcaataaatagatttgtctaattaaaaaaaaacaaatactgatatgggattctaatagaaaaaaatgaaaaatatacattctatttacgcgcatttaatccaaggaaaatgttgatcttcactatatataatgtctatcaaattaattctcttgcgaaggactctttgtttgctttcaacctagactttgtctaagggagtgaatatcagtagttgcaaaaaaaaaaaaaaaaaatcatgattgaaatattgttcaagttgtatctaagtaactacgaaaatatgcttaaactgatttttcttttataaattattttatagaaattttaatatgtgtttgtatacttatcaacatattttcacatgtttttagaaactaattgtaataacaactcgattctagcatctctttattaattaactttatcgatttaactagactttatatcctatggatttaaatggttcagataattaagaaatccaccccaaaacacttggatgcgattctatcgcaaaagatcggatcaactgataagaacatctaaataaaaattaaagtttattagctagttttttttttttttttttcactgatgaacaaaaaccgtggaaccaatgaaattcgtataaatgggcttcataagtggcccaagccttgttccttgaaagggcagttctgccatagctaattttttttaatcaagcccaaatatggtttgtccgtaaatgagggatctccttttacccaaatccaccggaaaagtattagagacaaatacatcatatcgtaagtaatgtttcatttgatagaataataacttgcgggaatttttctttaagaaacacatggcttgggccaattcat

SEQ ID NO: 8136 - DNA, 745 bp, Arabidopsis thaliana landsberg
atctatttgaatggatcctacatttaatcaaaaataatatcataggaattatttttccaacataaaaacttccgaaaaaaggttaccgctttagtgctaaatacaaaaaaacatacctatacatagtacaatagcagcaaataaaacaaaagagacaacatttgttctaccattcttctcttttttctttgttaaatcaaaatattaagaattttttgatatttttgtatttgaatgagaatgaagaaggagttgtttcgtatttataattagaattctaactatattcaagggatccttcgaattaacattatctcacataataaatttgtaaggaagacaatatatttggtcaaccaaattaaaaacatgtttccaaaaagattggatattccaactttgactacattattacaagacatacatgacttatttagataaacgtttttggtagtttgcaaggtaatgcagactaatattttctgtgggtttattctgtcaagagatatgattagagactcattcatttctcaatattccaattcactagtttaggaaattaatacttattgcataatcttgaggctcacgcctattacttgtatataaacaagctctgtatctctttgtgaaatacatcaaacatacatcttctacatatccgttgtcgtaatattcttgtttgaactctaaaccaaaacttagatcggtttggtttactcgccggttgttgcgctctatgaca

SEQ ID NO: 8137 - DNA, 1565 bp, Arabidopsis thaliana landsberg
ctaacacaataaatatttgtgtctggtgagttctttacatatgcaaaagagcaaaagagtaaaagaaaaccacaccaaagattgatatgtgtgacactgttgttttatttccatgagatcctaagcagaaactcgacttttaatctggtttcctctgattttccactttctaatcatggacaaagtcttctccatctcaatcatatgtgcctcaagcttcagttccatctcctttattgcaagctttctctctttcaacctttcatcaatttcttcttgctttttaacttcactgcacattttctcattgcatctatgcttttcgctatttttatggaccaaaaactctgctttcttgctcccattgcttccaatgcttttcatagtcgatccattatgttgctgctcatcatcgatcatactcttcttccctgcagtatttccaatcacgtcaacctcaaaatcattgaaaatctcccttgtcttgtgtgatttgcttgtagtttcatcatcctcttcactcctttgctctatttttgtcgaagcaagcttttgacaaggctctgagtcgtcatcgctatccaccgtcatatatcttctagccctttttccaagtgtttcagaagcatctcctagagtattctccgcattactgctatacttctccttagatctgatcctttgagcaatagtcatgttatccttttcttcacccgtagaaataccatcattacccccatgagctcgcttcagcaccactggcttgtaaatgcttctattgtttgtaaaatcctcacttgtgttgttcatcttccaacctgatgatacacgactgttcacacacccacctatcttatcttgctttaccaatctatgtatcacagaccttctgcgttttgcgggaaaaccttcttccaatttctgaaacacctgactcaaaggcagtaccttgggagatgcatcaatatcatcatcataatcttcgtcataatgatcaaatgtcttccttgcgttaaaagtttcagttgattcttccttcatctcttcaggactcagaaactttgaaactgatttcagccaccagactcggtatctcgcagtgacagaaccttgatcgaggcgagaaggcatgtagaggtttaaaccaataagagacttattgtaatcattccaagcttccttttctgtggagtttctttgacaagtagccaaaccaggaagatcttgatccaaaccgaactgtctcgccactctatttgggaagtaatcctctacaaaaccatctccaacaatctgagaaactgtcacacaccgagcaaaagaagcaaactcatcatcaatactttcatcaacagtcacccaaatagcttcctcaaggtaaaaccgaaatgggttccaattgttcaatgctttagtataaggacgccactcaaaatcatcaaaacagaaccacccattcttagatcttcgatgcaaaccatgccactgagcttttctaggttcacctttgggaatgtaactggcttttggacttatgttcctgaatttttcccatggtcaaactt

SEQ ID NO: 8138 - DNA, 2158 bp, Arabidopsis thaliana landsberg
tacttgaggaatgaacatatatgtggtcgtcctttaggtcttcgtttcgataagagaaccggagatttgtatatagctgatgcttatatgggacttttgaaagttggtcctgaaggtggtttagcaacgcccgcttgtaactgaagctgaaggtgtgccgttggggtttactaatgatcttgacattgctgatgatggaactgtttactttacagatagcagcattagttaccagaggaggtctgtgatctcttgattttgaatgtgtggatgttgctactgattattttatgtccacaagttctgaaatttaactgtgattctctttcaggaacttcttgcagctcgttttctctggagacaatactgggagggttctaaagtatgatccagtagctaagaaagctgttgttttggtctcaaatcttcagtttccgaatggtgtctctatcagcagagacggttctttctttgtattctgcgaaggagatattggaaggtgagtgtagtgacctagtgatggggttatcttgaactgtatatagatagaccttgaatcaattgcctcactagtagaaagaggaattagggaagtcctaataactgattgttttaggagaattgaaaacatctgtctgtgtgtatgcatcacaggattcatttctttgtagtattgaagggtctttttgtttggatgcagcctacgaagatactggttgaaaggcgagaaagctggaacgacagatgtgtttgcgtatttaccagggcatcctgataacgtaagaaccaaccaaaagggtgaattttgggtagcgcttcattgcagacgcaactactactcatacttaatggcaagatatcctaagctgaggatgttcatactgagactgccaatcactgcgagaactcactactcgttccagatagggttacggccgcacgggttggtggttaagtatagtcctgaagggaagcttatgcatgttttggaagatagtgaagggaaagttgtgagatcagtaagtgaagtggaagaaaaagatgggaagctttggatgggaagtgtgttgatgaactttgttgctgtctatgacctctgattacttgacctatacgtaaaccacttcactcagtttctagatttagcaaattcccaaaactgttaggtgtgtactgaaaaaatcaaacacttagcacaaacaaattcaatgttattattatatcacacaaattttcaaactcatctgattttttcagctaatccgaaattatgacgttttcctactcagcaactgcgatttctaaatcgtgaataccaaatttactgaccaaaaattaaccaagaaaatcgactttcaaaccttcaggttaaacgacaaaaacgtgaatgtttttttgagtgactggtagataaatcggaccggtattaaggtcgcaattttaccggtcgaaggctcgcaaagctctgaactttaatcattgggttaaatattaattttctgaactttaaagactttatcataagctttcgaaaaaatgagggattcaattcaattcaattaataaaagcttctcctgaaaacttctctttttaccattggaggtgtgtgccattagtagtagacacggcgaccgtttcttcttcttcttcttcgcctaaatctcgcttgtagccggaaaattcgccggaggagaatcaagggttcggtttcgtttcccttttcgtcttttcgattttgtaaaattgacataaccctaaatttagaagcctctgcgtcgagtaaatatatttctggattctgttgatctctactgttactagggtttatgcatgcttccagtttttccgatcaagagtcttcgtttattccaaattctaatttctggtttgctgcagcattgtgctctttggtttgtagtcgaattctcgagacgggcaaatggtaagttattcgtccttccattaactttgcttgattatccagaatgatatattctcatcgagaaagagagaaagagagaaagagggtgtattagaggtatgaagtatattgtgctgataaagatatcatctattgtacttgaattgcagtcggatattacgaagtggtttatgaaagctcatgaaaaagggaatggaagtgctccgaaatcgacg

SEQ ID NO: 8139 - DNA, 1061 bp, Arabidopsis thaliana landsberg
gctacttttttttagacggatttcattgattggatgcgtttgagttatatatagccgaaaaggaaaaaatcctttcggagataaagtcggcgggtacatagaaaccccagagacatgaggccaaaaaaggtgaacaaacaaaacaagccttagaagaaaagatacaaagataacagctacagaattaatagctaaagcctccaaagctacaacactgaaaactcttcccaacaagccgccgactaacacttccatagaacagtttggcgctgaggagaggcaactgacaggagtctcgaaaagagatttaatacgagctcacacaaccatctccacaataaaaacgaagacgacaaaacaagaagatcagaacacagaacctaaccatcacaaccgctttagcgccaatgaatatgagaaggcgaaggatcaaggaagaccttgagatccgagaggggaaacgctaaaaaggaccactcatccttacacacggaccttcgtagacccagccaaagccacctacagactaaagactggttacgccacgcaaagagaaggacaagagatcgacccaccacaacgtccagaactcagccgggaaaccaaaagaggttccaacagagagctagtagatgccattataggaggctagcatccgattgaagaacccacaaaacagaaccttccaccaagccaccacaccgaaaaccaagaggaggacagagagataggcagagctaggagtcaaacaagcctacccaaaagctgaacctcgaggcttcaaaccataaccagtcgaaaaacacagcaaaacacaaaccctagaagtcactcgaactcaaagacggaagaggaatccgcatacaaagaggccgttgctgcagtactaaagggataaacagaactaactcatggagacgaaaagccgactaaatacacgacccaaacgagacagcaccatcgcaaagccaacaaaatccaagaacataactcaatagatccgatcagaaccaccggaacatcaacagtcaagtcaattctaaactgcaagacaagccgag

SEQ ID NO: 8140 - DNA, 503 bp, Arabidopsis thaliana landsberg
gtctcccactgcagctagctgttgatttatgttgcctcctatgataacatctactatgctctctgttggaacctcgtttggtttttcggttgagttatggacgttatggtggggcgatctcttgtccttctctttgtgttgcgtaatttgtctttagtctgtaggtggctttggctgggtttacgaatgtccatgtgtaaggatgggtggtcctaattggcgtttctcctctcggatctcaaggactttccttgatccttcgtcttttcatgttcattgactctaaagtggctgcggtggttaggttctatgctctcatcttcttgttatatcgtcttcgtttctgccgtggagatggtttttgtgaactcagtttaattctctcttctagacacctgtcaattgcctctccttagcgacaaactgatatatggaagtactagtcggctgcttatagaaaagagttttcagagctgcggtgctggagggtttagcttttacct

SEQ ID NO: 8141 - DNA, 731 bp, Arabidopsis thaliana landsberg
caaggattatattgattaaatgcgtttgagttatacagagccaaagatgaaataataatttcggatacaaagccagcgggtacatagaaacccccagagacatgaggccaaaaaaggcgaacaaacaaaacaagccttaaaagaaaatatacaaagataacagctacaagtaataggtaaagcctccaaagcaacaacactgaaaactcttcccaacaagcagccgactaacactttcatagaacaggtaacaactaccgaaataatagctaaattctccattttcttctgttttatagaaaatttaggtaatatttcatatatatatatatatatatatatcactcagaaattacacaaatattcaaaaaaaatctgaacattgggagcaaactttttgaagcaaatcagatcataaaattagataacccgtagttacaaaaaaaatacttattgttctacaatataaactcagctctaatcagattccatttgctaatttaaccgtataaagatatttctaatttacaagattttaaaatacgagaatgacagtaggaattagaaaaaactaatataaagcagaagaatataatcgtcaacacgtgataaaataataacccaatggataatttaatactattacagaaccaaaacaatcaataagcaaaaaaaaaggcaaagtcccggaacttgcgtcagaagaattttgacttgaaagaaaaaaaatc

SEQ ID NO: 8142 - DNA, 482 bp, Arabidopsis thaliana landsberg
cgtctagaccagatggctccaaagactaccaattactcatcatggggtctccttctacaccactgtcggactttgaccaaaccatcgagaaggctggcatcgccaactctgtcctcgtccaaaaattctagctcttttctaagcacattagagaccaattctatggttacaaaatagcatcataaactttttattgacttttcgctagtcttatgtttgactagcgaaattattattggtcaaacgctgtgtagtcgtctttgatcatgaaaaaagtacagtttacgtacttgttgagttttatactttttattctcacacaagtttctctccttaactatagaagttaattgatcaaattaggacgttgatggcgtcataatgaaatgggattggtgaaattaaacgaaaattgacgacttactatttgacgaccatgtaaaacgtttacctttcagggttggtttgacttttttgactca

SEQ ID NO: 8143 - DNA, 1811 bp, Arabidopsis thaliana landsberg
gtttgaacgctatgcacattttcactacaaaaaactaccaccaccacttccggaactgacgactccttctccgacgtagcctttccggtttcaacatcctcctcatcagcttcgtcgattttcggcattatcgttagaccattattgccactacaacacttaacggctacaacgttatcttcatggcgtgtttcttcgccgtcatcatctacatgtttgccccataacacggcgtagactcctaccatcaaaacaaccactccaataaccctgaaaaaagaaaacaaatttcggtttgattaattaacaagacagagccaagactaaaccgggaatatatcataattaaccggttgttgttaacgtaccctccaaggtagattccttgaccgagaacgaagaagctcatgatggagacaatgacaacgataagagggttaaaagcagtgacaaagaccggtccttttcgctgcatcataagtccttgaacgtagtaagctatgctcgacgacattattccctgtaaccgttaccaatcacaatgttagtatcaatatttttgtaaactgatctttttgttatttgtgaaagtggcatgatgaaataaaggacgaaccgcgtaggcagaagcgagaaggttcatgtcaaaaccgatgttcaaagcagaaggattgtgttccattacgaaggctagggctaaagactgtaacgttcccatgaaacacaccattgttgacattgagagatgggctgagtatttcttcaaagtcgcagcctatttaacaaaatataaaagcctaattcgttaaatctatatttttatatattacgaaaacagtgaaaaaaaattccaatcatattattattttagatatagttaacccaattatttttttaaaaattatataacattaaaaattagaaacaacatcccagtaacattattaatactatatctaaaatttcaaattttttatattacttttacgtatcccctacatggtttggtgcataaactatattttcctatgttgatggaaatttaaaactaatcctaaaaactatattatacgttttttagtgatgtaagaagtgagttatattatagacaggatcaatatataattgatacatacctgaagaacaaagaacgacgcccatgagagggaagcgaggagtaggaagacggcagccttaagatagtcagccgtcggcggcgaagaggcggccgtgaggtgagaccggaagaaattaatgaaaggacctttgtagaatatcatcaatatggatccaaccactgtcactaacgtccccatcacttttaccaggcatcttacttttctcatctccactttctccatcctttaaaacaaacatttacataaaacacacacatcaatattcataatttatgacatcgatcgtcatacactaattgtactactatacatctacttttgaattggtgcatatccacgtaccaaaatataataaaacgtatctttttctttggttaaatgaataaatgtaaataataacaaagttgctttttgtatgttacctgaaaagtgtggcaaggataatggtaattgcaggcacgatgttgctaacggcggaggaaaacgttggtgatgtgagttttagaccgatatagtataagttctgatcaatcaccggcctgttcaaattaaaccttccatgttagccttaatcataattattacaaaatcttcttgatatcaacggttctgttagaagactaacccgagaagagcaagaagaaatattcgcatgaatattggaaacgtcat

SEQ ID NO: 8144 - DNA, 1145 bp, Arabidopsis thaliana landsberg
tgaaagttattattagtgttttgtcttcaatgcctgcaaagagtgtaagaaatcattattcttctgggtataactctctctctcctctttcttgttctttatttttgagtttcttttttaagcttagtgggaaagtgggagtcaagaacgcaccatgcacaaatgtttttttgtatggttcgggcattgacttctgtttgtttgttttttacttctttttgtctaattacaatgaccaagttactatttcttcttggttttatttattccatagtttctctatctatggccattaatctcaatattgctattgcattatagtttagaatctgttcattagcataacctgagacattgtgattgattaaagttgatagtatagttggagatctaaggacaagtaatggaactgagaagttgtttttgaggatcataaccacacaatatatcaattgagttacaaacaaacaaacttagcaagccttaacaaaagacatcaaatgtatttgaccatcaaattactgtgtacattacctcacactgatcgtgcagtctccgtgcttccagaatagcctctaaataacttcgtggttacatcttcttcatcaatttgaatttgcacctgaaaatcctctggagctgaacaaatcctctccaaagctgtagaaacttctctcatatctggccgtgtcttccctgtctttttcagacacctcaatgctagatttgccactgcaatcacctgttccagcttgcaatcgtttcttattcgagcatcgatgatctcaaagagtcggttctctctcattgcaagtctgaaataatctgccaaccctgttatttcttgagtctctgaaagggttataacaggcttctctccagtaataagctctactaggacaaccccaaaactataaacatcacttttctcagtaaagtggctagaaccgtagtattctggatccacatacccgactgtacccgatattaccgttgtccaatgagtatgatctatggaaactgatcttgaagttccaaaatcagatactttggctcggtatttctcatctagtaatatgtttgttgacttgataactctgtgataaattggagaacatgcagcagtatgtagatcgaaaaagctc

SEQ ID NO: 8145 - DNA, 526 bp, Arabidopsis thaliana landsberg
caacatttagatcaaaggacaagaagatttaagaaccagttaaaacataaacagattcattaattaagagatgaacaaagtttaaagctttcaaaagaactttgcaatagaagtcaatgcccgaaccatacaaacaaagtcaaagttgcatggtgcgttcttgacttccagtttcttctagtaataaaaacccaataaaaataccctaaaaaaatactcataaccaaccaaaaaaaaaaaaaaaaaacccaaaaaaaatgaagagagaagaatccagctgtttttttcttttcttacagaagttgtttaatgaggtttgtccaagaacagaacagcaccaacagaagcagcagaacaattggagttaatgagcttctcttctctctctctggcattgaaggcaaaaggagttaattcccttctctgttccatcattgaagagaaagagacacccagaagaaagagggaagagagcttttaatggtgtgtgtcaagctgtagttgaagctgtaggaccgctcaggcg

SEQ ID NO: 8146 - DNA, 1554 bp, Arabidopsis thaliana landsberg
tcatggtccatctccgccgccacctccaccgttgaaaaagacggcggctttgtcatcatcggcttcaaaaaaaccaccaccggctcctagaggatcatcttcaggggaaagttcaaatggtcaggtaaagcttaagcctttacattgggataaagtcaatcctgattctgatcattccatggtttgggacaaaatcgatcgtggctctttcaggtaagatccataagaaccctaatcgtttctttcaatttgaagggtttagtcagataaaaatgccaactttacaaatttggtttcttcttcttcttcctacagtttcgatggcgatctaatggaggctctgttcggctacgtggcggtcggaaagaaatctccagacgacggcggtgataaaaagcctagctcagcctcaccggcccagattttcatacttgacccgagaaagtcacagaacacagcaattgtgctcaaatccttaggaatgactcgtgacgagcttgtggaatcgttaatggaaggtcatgattttcatccagatacactagagagactctctagaatagctccaacgaaagaagaacaatcagcgattctccaattcgacggtgatacgaaaatgctcgcagacgctgaatcgtttctgtttcatcttctaaaggcggtgccttgtgcgtttactcgtcttaatgcgttactctttagagctaattactatccagagatctcaaaccataacaaaaatcttcagacgttagatttggcttgtacagagcttaggtcacgtggcttgttcgtgaagctattggaagcgattctgaaatctggaaacagaatgaatgcaggaacagctagaggagatgctcaagcttttaatctcaccgcgcttttgaaactttctgatgttaagagtgttgatgggaagacgactttgcttaactttgttgtggaagaagtggttaggtctgaagggaagcgatgcgtgcttaaccgaaggactaaccgtagctttagccgtagcagcagcagttcgatttccgaggttatatcgaaggaagaacaagagaaagagtatcttagactcggtttacctgttgttggagggttaagttctgagttcactaatgttaagaaagctgcagctatagactatgacactgttgctgcaacgtgcttggctcttacgtctagagcgaaagatgctagacgagtgttagcgcagagtgaaggggataacaaagaaggagtgaggtttgtgaagaagatgaatgagtttcttgattcggttgaggaagaagtgaagttagcgaaagaagaagagaagaaagtgttggagcttgtgaagagaacaacagagtattatcaagcaggagctgtgaaaggaaagaatccacttcatttgtttgttattgttagagattttcttgcaatggttgataaagtttgcgtagagatcgcaaggaatttgcagaggaggtcatcaatggggagtactcagcagaggaatgcggttaagtttccgcctttgcctccgaatttcatgtcggatagatcaaa

SEQ ID NO: 8147 - DNA, 581 bp, Arabidopsis thaliana landsberg
gagcttgttgaatcactcatagaaggaaacgatttcgtgccttacattcttgagaggttagctagaatagctccaacgaaagaagaacaatcagccattcttgaattcgacggtgacacggcaaagcttgctgatgcggagacgtttctgtttcatcttcttaaatccgtgccaaccgcgtttacgagactaaacgcgtttctctttagggctaattattatccagagatggctcatcatagcaaatgtttacaaacgttggatttagcttgtaaagagctgagatctcgtggcttgtttgtgaagcttttggaggcaatacttaaagctggaaacagaatgaacgcgggtaccgcgagaggaaacgctcaagcgtttaatctaaccgcgcttttgaagctttcggatgttaaaagcgttgatgggaagacttctttgcttaactttgtagtgaggaagttgttagatcggaaggaaaacgttgtgttatgaatagaagaagccatagcttaacacgaagcgggagtagtaatactcctcaggttatgtccgaagaagagcaagagaaagagtacttggag

SEQ ID NO: 8148 - DNA, 2762 bp, Arabidopsis thaliana landsberg
tctctctcgaacaagtatccggaacttgatttctgaagatctacgcatctggagaatctctctgttgcaaacaatctcttctcaggcaaaatcccggaacaaattgtgtcgttccacaatctccggttctttgatttctccggaaaccggtatttggaaggtccggctccggttatgagcagtatcaagcttcagacatctccacatcaaacaagacacattcttgctgaaactccaacttcaagtcccacgaacaaacccaacaacagcactacatcaaaagctccaaagggagctccaaaaccagggaagttgaagaagaagaagaagaagagcaagaagaagaaagtagcggcatggatcttagggtttgtcgttggagccataggaggaacaatctctgggtttgtcttctcggtgttgttcaaattgattattcaagcaataagaggatcagaaaaaccaccaggtccttccatattcagcccattgatcaagaaagctgaagatttagctttcttggagaatgaagaagcgttagcttctctggagatcataggaagaggaggttgtggagaagttttcaaagctgaactaccaggaagcaatgggaagatcatagctgtgaagaaagtgatccaaccgcctaaagacgccgatgaactagcagatgaagattccaagtttctgaacaagaaaatgaggcaaattagatccgagatcaacacagtcggccatatccggcaccggaatcttctcccattgttagcacacgtgtcaagacccgagtgccactacctcgtttacgagtacatggaaaaggggagtttgcaagatatattgactgacgtacaagctggaaatcaagaactaatgtggccagcgaggcacaagattgctttaggtatagctgcagggcttgagtaccttcacatggatcataacccacgaatcattcacagagacttaaagccagccaatgttcttcttgatgatgacatggaagccagaatttcagatttcggactggcaaaggcaatgccagatgcagtcacacatattacaacctcgcatgttgcaggtactgtgggatacatagcaccagagttttatcaaacccacatgttcacagataaatgtgatatctatagttctggagtgattcttgggattctggtgattgggaagcttccttcagatgagttttttcagcatactgacgagatgagtctgataaagtggatgaggaacataataacatcggaaaatcctagccttgcgattgatccgaagttgatggatcaaggattcgatgaacagatgcttctggttctgaagatcgcctgttactgtactttggatgatccaaaacagaggccgaacagtaaagatgtcaggaccatgttgtcccagatcaagcactagtgtttcaatatgtattgtttgcttctatctatatttcctagattcctgttgcatacgaaataactatgaacacaatcttggcagaaatttgtaatggcgactgtaaaatttaaatggatttcaattatgattattgctctaaacataaatcatcaatctactataagaatcttagctatatacataacggaaaagaacacttgattaacaaccttaaaatgacaacacattacatgtttggttacttgtcttctctatatgcagccggtgagaatctccctcaaatattctagctgttcatgactgccttcatgttcttcccactaaaaataataaaaacaaagtcaacacatgttcagtatgtactcctgattgagatgggaaaacatatcaattatgcaagagcatgtgagatctttttactattgaacagaacaagtattctaaaaatggagacaatttcttatcctagcaactcaattttatatcagtttccatttttcaacgttatagacccacctcttgaagagacagagataccactttccatccagcagcagcaacatatcgccgcttcagcattgtatgccctaatggtagtcctgtagaacacaagagtcgaaatgatcattaagtttgggttggctccaccagacaccaatatatattaagaaacagagtgatgtcacttaccagagtttcttgaaaaatgagttggcccgtcgatttctaaagcaactttcttctcgaccagagcaacatccacggtgtagccatccacatcatgttctttagcccaatcaagccctgtacttataagaaggcgtccaacttctttctgaaacgatgaggttattttctgattgaatcttttggtttttcctgcacggcttattttttcttcgagttcttgacaaagtgacaactgaaggtgggggcactcaagcttcaagcactgattcacaagatacacctgagaagcaaacatgacatcttccctatactgttctgaaagcctttgctcctccaaggtggttaaagtattccatatattggcaaagaaaggtcgctccacttgcccaagaacagcataagaccatgctatgtttccaagctggtccctgttaaagctaagtgctggagatcttgaaacatcatcgcttacttcagcatccactacttcatcagagtttgttatttctttcgtcaagtaacacttgaactggtcactgcttttgaatgcactatccaaagattcaagcaaaggatcagctggctcataaagtgaggcaaatgaccacaatagttgagcaatctcttacccttaaggtattaga

SEQ ID NO: 8149 - DNA, 1909 bp, Arabidopsis thaliana landsberg
  unsure (1)..(1909): unsure at all n locations
tgatgatgattttctctggggttgatttatcagatcctcccgtatggtccggctggtatcatgagaaagttagttgttgatcctgcacagatgtggtggcctacgagtgttcttcaagtctctctgtttcggtatgctgattgatgcattttagagcatactatatataccacttgttttactaatgtttacttagtgtcccctgacactgtctttgatctttatacagtgctcttcatgagaaggacaatgcaagaatgtcacgaggaaagttctttgtgattgcgtttgtttgtagcttcgcgtggtacatattcccagcttatttgttcttgaccttatcatcaatatcttgggtttgttgggcattccctaagtctatcacagctcagcagttaggatctggaatgtcaggacttgggattggtgcatttgctcttgattggtctgttatagcttcttaccttggaagccctctcgtgactcctttctttgcaattgtcaatgtccttgttggttacgttttggtcatgtatatggttataccaatatcatattggggcatgaatgtgtatgaagcaaacaagtttccaattttctcctctgatctgtttgataagcaagggcaactttacaatatctccaccattgtcaacaacaagtttgaattggacatggagaattatcaacaagaaggtcgggtttatcttagtacgttcttcgctatcagttacgggattggtttcgcagcaatcgtttctacactgactcatgttgctctcttcaatggaaagtaagtcaggaatatccataatggactaacttatgcaccaatgtttgaaaatatcactaatcttcttgtttgacttaggggaatttggcaacaagtacgagcttcaactaaagctaaaatggacatacacacaaggttgatgaagaagtacaaagacataccaggttggtggttttacagtctgcttgcgatctcattggtgctatctcttgtcctctgcattttcatgaaagacgagatccaaatgccttggtggggactccttctagcatcattcatggcccttaccttcactgtaccagtcagcattatcacagctactactaatcaggtaccacatataacttccactacagattcctcaaaataacatgatttggatattttctcactttgaaaatgttgtgatgcagactccaggtctgaacattatcacagaatatctcatgggtgtgttgttaccggggagaccaatagctaacgtctgcttcaaaacttatgggtacataagcatgtcacaagctatatcattccttaacgacttcaagctaggccattacatgaagataccaccaagatcgatgttcttagtccagttcataggaacggtgatagcaggaacagtgaatatatcagtggcatggtacttgctgacatcagtagaaaacatctgccagaaggagttgcttcctccaaacagtccatggacatgtccaagtgacagagttttcttcgacgcatcagtgatttggggattagtaggacctaagagaatctttggtcggctaggaaactaccctgcactaaactggttcttcttaggtggactaataggaccggtcctcgtgtggcttctccaaaaagccttcccaacgaaaacatggatctcgcagatcaatctcccagttcttttaggagcaacagcagcaatgccgccagcgacaagcgtgaacttcaactgctggatcatagtaggagtgatattcaattactttgtgttcaagtactgcaaaaagtggtggcagaggtatanctncgtgctatcgactgctaaggatgcgggattggcgttcatgggagtgttgttatacttgagtttgncgatgaatggaatat

SEQ ID NO: 8150 - DNA, 640 bp, Arabidopsis thaliana landsberg
cgtatctcacaaatagaatcatattttttaattagttttacgaattggtttatcgtttttctggtgaagaaaatatattaaaaaaataaacacaaaaaaataatgtcttttaaatacattttaaagctgaaattagtataaaaaatataaagttgatcataaatataagatcatgtgtataggtgatacatttagaatatcaagagtcataaataaacttttaatagatcagataatatattttgtctgatactgtatcagtgcagtgattcttttgatacctagtatcaagtgatctagagactcatgattcgtctttgaaacgcgttcattcccgaaagcagaaaaataataaaaaaattcattcttctatctgatagtgtttctactgttttagctaactaactatattttctgcgagtgagtaattttacagtttctttgtaattatacgatataattttgcagtaattttgtaatcttatgttattctatatttatttttgcatttagcaaataattttatttttaatgatatcaatatcgatctcgccactgaaaacatatttattatcaatattattaaaaaattaaacaatgaataaatattaacaataaattcttggaaaaattataaaat

SEQ ID NO: 8151 - DNA, 1989 bp, Arabidopsis thaliana landsberg
cgctcatgtttagcatctatatgatatttatttgcattcgtttattttctcatgttttttatgaccttacattatatttatataatgttttcggtaattttgacaacttaatgcccattagatcccattaactatctatcaatgacttgtaaaagaaggtaactcacctggccaagagcctccgttgtggtagctccaccttgtgttcttagggtcacagccagtgacaatcccccactcgtgactctccatcgccggataacatatcttcaacggcatctctcccacaagttcttcccaccgggcctcaatcaggtccatgatcgccatggactgctctggtgtggccaatgaggaaagaattgcgatacaatttcctaacgcaaaccacctgaagtccatgcgggcgggactgacatttccaacgaagtagccacctcggagaggcatgaagtcaaagatccaatcagggatggagtcagggattacgttgaacttgtttaccgcggtgtgagagtactcctccgtcttgtaacggtaaatgtcattgagctgctggaaatcgagccaaaagtagcttctcatatggaagcttaatgcgtgcagccgcttcactatcttttccatgaactctttaccctcagaatcatgtttcagcattgagagtgcggatcgaagagccatgaaaaagagggcttggatctcaatcggatagccgtaaatgccctgcacagtacatttcaaaaagagaacgttcaagaggttcattttcacttaggatatatatgtatatgaattgaggcctatatgttctttgagacggtcatattcaaaagtcaaaagttcgatgccaaaaaaaagtattggtttcttgatttatggaattttatagtcaagaggatgagagcaagcttaccattctacgatcgaccatcgagcaaccatctgcgcaaagcaaagtcggaaaagtatcaaaaccctctgagagacacaaagaaagtatgagtctcattcccttttggcactctggtctctctgctagagaatgatctcctgtagacttagtgtaagctcggaggagaatgatccaccagaagccagagtcgactggagccactctcccgatggcgctttctccaaagtcagcgataatcgtatccgtcttcttgataggattatgtagaactttaaagcttgctggcattgcgccgtcaccaagcttgaacttgtcgatcattttgtcttgtccctgaatatgaagtgtcttcaggagaaagttcttcacaatttcaggctctccattcatcagaaatgctagagcactcggtacaaaatcacgtacgaacaccttaaaagttacaatagacaagaaaaattgtaatgaggcagaacaatcatagtttgtaatttgcttaaatgttctagttgacgtgcgattcactctaattttgttcttctcttttatgtcttaagagttcatcaaattcaccaaaaccaaaacagcaaaaacaaactagaaagaaacaaaacacaaccatacctgatcatagttcaagacctcttctgaagcatggtcgtaggcggcgatggttcctaccggttttccccggaagtagacctgagactggcagagagcctcccaagcttctgtgaccatcgggttacgatccattgagtctttcatggagaaaaccggagtatcccaaccagacttaccgtctagtgaatgtgcactgtcgtaaaggcttaaagacatttcctcgtatgatattttccgttcaagtttgagtcttggacggtcaagcagccgagacagtaggtcttcatccgtcagtttggatatcgagcacatcgagtttactgctcgaattccttcctttttttttgccattctcacatagagagctcatcgattcaccgctcgtagtacgtcccgtttctttggtcgggccatggagatagctaatttggtcaacaaagctttttttt

SEQ ID NO: 8152 - DNA, 1219 bp, Arabidopsis thaliana landsberg
atcgaaatacgttttagcttcagggttcttgcagaggtttttgcgactctgttatgttgaaaatggacagaggacggcgcatagtaggtcactcgtgggctctagttgcttacgttagcaaatgagagaaaccgtgggaagacattgggcctattgggtttgttgataacggcccaaagtgtgggtgaagatacattttgtctgttgtgttgaaaatggacagaggacggcgcatggtagtctagttgcttacgttagcgaataggaaaaaccgtagaaatacattgggcctattgggcttttgaatggtagcccaaagtcagtttgtgcgatagcctctctccctcaaggcctcaacacagtattttctttgctttcggtacaagtttgggtgcaaagccctaaaaacaacaatctttccgcaaaatgttctctaaagaaccgaaagatcttctgtgttttctcaataaacccatacaagaacattgttctacagaccaaatcaatagagattaaagaaaggttttgtaaggaagaacacattttgtctgaattttgaacatgttcaagagtttgtgttcacctcaatatcaaagagaccttttttgtatgacttttgcaattctttaatcaacaactacaattttgttaatttccaaatgaccaaatgcagagatttatcattaagaaacaaaacctcagaatttgttttattagatgactaaaaatgaaatgaaatgttctaacacaaaagttgtcaaagggctcataaggctcacagctaaattctcttaggattaaaacttactcaacaaacaaaaaaaaaaagattaagcaaaagtgaaacagagccatttcttgaccgctggtttatcaccatcttgtttcctctgtgaattcgtcttcgtcgaactccgtcccgtctttttatcttcaccggctttgctaaatatcaccgtgaatccatccgccgtcgctggatcattcacatcccattccccgaatttcggcaatgcccttccagcttcattcgatgccattatcgatcaagaaagtaacaatcttcttcctcttgttgttgttgataagtcagatggttttgtttaaagattctaacacaggatgcagatttatttataatggagagaagagagaaaacagataagtaagattgtgctttgaaatcttcctacgaaatggactcgtttcagacgcggcg

SEQ ID NO: 8153 - DNA, 1502 bp, Arabidopsis thaliana landsberg
catttacctttacacagattatatttgttttcacaagaattaataattttcatttttaatggagttcgcgttttgacaaaaaaaatattgaaccaaaaaagaaaaatgttttccaataaaaacgagtcgttgtcatttcttgtccgtttccccggaagaaaatatcttttaatcttcaagcagatattttcgaatccagcgcgcgaagttaaagccactcatttgtttcatcaatcctacttcctcctgtgtcactgcaatcactcgctcgtccttttctctatttcttcaccgatcgaatcaatcagagatggagcatgaatctatcaccgctcgacgcaggctcgctgccttcgccgctcacttcccggcaaccagttacgattccgcctccaccgcatctctcgtccccttggtattccccttctctttttgtctctcgtttccttatctggaagcctagaccccaaggatccgacggttttcgaattagactttctgtatttcgttctcctatggtttcttaacttggttagatagtttttctgatcccttgaccgatctcgaatctcgatgtggatttacttgcaaaattggagcagatcgaccaagtacaagaacagttagtctgattcattttgacttaaaccttgatttcgtttaagggtgttgcaatggaaagctcaaactgttcaattattgaaagtcatatcatgcttatggatgtgtttttttatacttgactctgcctcaaataggttggttcactgattcctttattttggtctaatggatctcttattcgtgttatgcctcagaactgcagcagcaatttgaacactgtcatccaaaggtgtgacaacaaaatctcttttgcccggcaagcatcatctgaacaaggcttttttatgaggccagcttcacccgatgatgtccttgaggtaccataagttctttattatgttttgaagtccctcctccttcttctctggtcacttactgtctaactacacttagttaacaaagtcatatctgtactgtaatgtaaatatgcccacaccattaacctcttctgtcacttgtgatgatgattcagaacttaggtatgaatttgaagaacactgtcgttagaaggggtgacaacaggctgtattttgctcggcaagcatcttctgcacaaggtttttttatgagacaggcttcgactaatgaggtaccattaatttcttattattatttttcaaagtttctcttctcatctatacttctgtaaaagagaattgattcaaaatgttttttgcagaggaccataccacaggatgctgctgcatctaccaagttttctgctaccaaaacaactggcttcgattcttctttacctgcgtacgctgcaccacacttttttaagcctgcaaaagaggacatctttttttcttctttatcaccaaatctgcaaaaggaaagggcctagctttgatcttcctaagttagccaatttaggt

SEQ ID NO: 8154 - DNA, 1962 bp, Arabidopsis thaliana landsberg
  unsure (1)..(1962): unsure at all n locations
tgatacagtataattagacaaaagccaatgtaaaaatgagttaggtccattacaatttcagctctcagctgttttgctttcgcctgcatcgtagaaatgtgcttcagaagaccctgtttgatgcaaacggaatacagatcagctaatgagtttcaaataagatagcaaatgatgattttatatcaatgaacctcgcgtctttggagctcaatggaacgcgctaaagccttcctctttgtcaaaagatttttcggtctcaacatggtaggacgcttatagtcttgtcctctgtacacgataatggcatatcctttggtaaccttgtcaatagaaaccaggataccaccactctcggcttcaagggctaatgccactttctttacaccgtcaaaagttttagccttcacaataattttgaccaactctctgtatttccaatgcaagtgcatgttctccactgtaccatcaaacactcctcgcctacctgaagcaacattttcaggtttgttttaagagtctgagcatttatagaacacactccactacactcatctgttattgataattttacctagaagtaagaaagctttcattttcaagccaagcttgcggaacataaatctctcttcatcagttatgctttctggatcttctctctgctctgcgggcttaagacacacttccaccttagccaaaccacgttcggctttcaacagctttctctcagcctaaagcagaagaactaatcccattaatttaaagaacaactcattaacacatgatatgtgaatctaactcacaggtagaagaaaagaaacaagaggaaagtccagaactcacaaaagcaagtttcctttccagtttcctgacaagattctcatgtctcaatatctcaacctcttgtttcacttcgtctgaatgatcatcatcgtccagattctttccccacttaccagtcgcatcaagagtttcaccaagagtaccagcagaaacaagtttattagcaggttcagtacttgggacaatcagagccgatgaacctcttaaacgtgcctgctcttcttcgtcttgcaaagtccttacaaacctctcctgctccaccaatgcgtcagctacttctcttgataaaaaattctttcctctgtagaaaaccaagaagtctttattcctagagagcattatacctcctgtcaatttctgcaattacttaccaaaaacatgatatcaaatatacagctacaaccccagataaaagacaaaaggagcataaatgtatacacaggacagaacaagagatgcttaaagactaaaagttgagaaaatagtatagatagacattctataaccgttccatgacatgatcaaattaacagaaatcgaggataatagaattttctctccaatcaggaagacaacataaaattgcctataaggattacaaggatacacaaaaggtatttcaacattaaccaatcaagagtccttattaccttgagatcttcagccattctctcactggtagttgattgcacgccacgtttaatagcaatctttgcaagcatactcttttcccataacctgaccattgctgtcgccaagccttggagctgcctacttcgacctggaaatcaaaagaaacttctgctcttcaaagactctttcagactcccaaagagttacaaaaaaaagttagaaatctcatacctaaagcaaagtgtggaggaatagatctggcaagtcttctcaaagctgttgcctcctttggtcccagagatgatcttactccataaggaagtaccctgaaaggcggttcataatcaggaatggcgcctggaagcaaatcagcattctacaggtaatggattatctcccggccagtccatgaacctaggaccaggatcatctaacagttcatcaagttcatcttcatattctactactngttgagatgtctggtctttc

SEQ ID NO: 8155 - DNA, 571 bp, Arabidopsis thaliana landsberg
ttttctggtttgtgcaaacaagttagaattcgaagatctgagtttcgttctagatgcaatatgttccttttctggtaattaacgtactttcttcttggatcgtacatcctccttaagacagtagggacaatcccggcatttagtagcgaatataagattaagaacgagtaagtggcttgcgatatgtactgcaaaaccaaaccataaaaaaatgtttagattaatggcaaatgataccaataatcgactatttgcgagttaggaggttaccgtgtcgtctaatacagcttcatagagaacaaaatcagcaaaacttttgtagctcaagatgaaggaaacagccaaggattcactgagaggtaacttgtagtacaagcaaggtgcaaggcatgcgacgagttttatgacaagtataagaaatgttaggaagatgttgaagaagatgtcattgaactggctaagtatccttgctccatcacatctcatcgcgctgaatgtgattgagattggtaagaacacgttcattgtgagcctctcaaacttagcctctagagccgatcctaatggtgga

SEQ ID NO: 8156 - DNA, 1081 bp, Arabidopsis thaliana landsberg
gtttatacatctacgaacttgattgctttatattccttccaacaatgacataaagtatttttgttttttatatggtttcaagactcaccacctaacgatactaaaaatatactaaagaaatttgatatattgggccgcaacaaatagacccacatgttcgttgtactttcctctgtttacacaactttttacgtgttgaaatacatgtgcacatttaatcatagatgtggttttattaagaaggatggtttgactaaaattatagcttttatctacttttctttcatatgaaaactccaggtttatgaaccaatttcttatgatttgtaagaaattgaatactactacatttaaaatgtttataataattaattgacattagaatttagtaaaaacactaattgttcatacaaatgtttcatttattgttcatacaaactattataacaagattacacaaacatatagttaacatctactgatcgaagagtatcattgttgtctcttaggctgatttgattctttctacaactttcttcatatgctctatttgttcctctctaggaggaatacattctctcacgatctcaatttctttcaaatttttgatccatctgtttagctctggaaacttttcctctggaatcatatcaattcccataccttcccaacctcgagcaagacaaaacgggatcatacttcctgcgaccaagtccaaaaatccaattgttttgccaccgaagaaatcttttccagtgacttccttctcaagaaacataaagagttcttgagcctccttgattgcaacctctactcccttctctgcttttgccacagacataaaagctactggtccaacctacaagatagtaaccatttcagcagaaaattaaccgcaattaatttttgttttgcatagacatttttatggaaccagaatcattttagaattctgcctttcctagcttaccaatcgatcagaatcagaatcttgattttactattcaaaatgtatgaaattacatacagtcatcggtggttctaggtgtagtcatatttagaaatccctatgcaatagttg

SEQ ID NO: 8157 - DNA, 929 bp, Arabidopsis thaliana landsberg
gaggtctacagttccctcacgatctcaacttcattcaagttcttgatccatctgcttaattctggaaacgtgggctctggggtcatatcaatccccaaacattcccaagcccgagcaagacaaaacgggatcatacttcccgcaaccatgtccaagaatccgatcgtcttgccaccaaagaaatcttttccagtgacttccttctcaagaaacataagcatttctcgaatctcctcaatagcaacatctattcccttctctgcttttactaggggcatgaagccaactggtaggatctgcaagttattataccaatctataaaaaaaagtacttagaaaattactttatcctacaaataatcctgatataaatgcttgaaatgtaatgaacttctaataactctcaagtgtttctcatttattttgcaatcaatattataaatcaatttaattagttagactagagtacctgctcatcaacgaacttggcccagaaccgaaccatggccttctcgtagggatcgtgaggtagaactggattgctattccaagtttggtcgatgtatttgaggatcacaagtgactcggataataatttatcattgtgaacaagaaccggaaccttcttgtgaaccggatttagttcaagaagtaaagtgctctttttgggtaagtcttcttccaagtactcgtatggtacgcctttaagtttgagagccatctcgactctacgactaaaagggcttatccaaaaccctagaagcttcacactctcttctttcttcgccattagatctctttctctgactctctctgtcactttaaaaacaatattgtgctttttttttgtagtctcaactctaaagcatatcttgaagataaaaccaaaaaaaaagacatcattaaggtaaccaagtcactgcgaggtc

SEQ ID NO: 8158 - DNA, 786 bp, Arabidopsis thaliana landsberg
atattacggtcattctatttttcgaaaaactttaaaaaataaaaataaaaataataaacaatgcaagcatataaatcaaatattttcggaggcaagaagtatctttaatttaggcagacttaattgtttctgcaattttggtcatgcgctcaatttgtttctctcttggaggaatacattctctcacgatctcaacttcttccaaattcttgatccatctatttaattccggaaacttctcctctggaatcatatcaattcctataccttcccaaagtctagctagacaaaatgggataatacttcctgcgatcatgtccaagaatccgattgtcttgccaccgaagaaatcttttccagtcacttctttctcaagaaacgtaagcagttcccgagtctcttcaatagcaacctctcttcctttctctgcttttacaagggacctaaaccctagtgttaggatctgcaagtaaagaacaatataagcaaacgaatcatgtattgttctgcatagaatcctaatataaatgtttatcaattaatctgaaatcaatattagtatacctggtcatcgatgaactttgcccaaaatcgagccatggccttctcgtaaggatcttgaggaagaattggattgttcttccacgtctgatcgatgtattcgagaatcagatgtgactcgagtaatattttgtcattgtggacaagacccgcaactttcttgtgaagcgggtttagaaccaaaagcaaaggggtcttgttgggcacatcttcttccaagtgttc

SEQ ID NO: 8159 - DNA, 560 bp, Arabidopsis thaliana landsberg
  unsure (1)..(560): unsure at all n locations
aagcacaaccattggctatttcagcttggtttagnnnnnnnnnnnnnnnnnnnnnnctgatttttcccttgagttcgatcacttcattgtataatcgtttcctctctgatgactcttccaagtactgtttttcaagagctccaagcttagtagcttccattaaaacacgttgaggcatattagttaaccaaatcaaacaagttttgtatttagagaatctttgtcgaagaaatcagattcaaagtactcactgagaagctggagagcccttgaaatttctggttctactaaggaacaattcttgatctcttgcacttggtttgataccaacgcatgttcatccttcaagatctaagacatgatatagaacataaaacactagcagagactgaaagcaaatctgttgaaaattcatatttaagttcatcttgaaataacctcaacttactattgcaactgagaactcagaaggaactattgtaactgtgtttattcaagaggatgacaaagaaagtagtagtaccttaattttgtcactgcagtcgataattttctgcaaa

SEQ ID NO: 8160 - DNA, 784 bp, Arabidopsis thaliana landsberg
  unsure (1)..(784): unsure at all n locations
atgtgaaagcctcatagtggtaaaatatgacccgagtcgcaactgatccttgaatacatcgaccaaacatggacaaacaatcctattctaccgcaaagtccatatgacaaagccatggctcgattctgggccaaatttgtcgatgaacaagtaattcttaagacaaattcgtttattaactcattgcagatgttatttatagaaattatgagaaacacttataactaccggtcacattgaatatatatgcacataattctagtcatgaaacgtttgctatatatcgctaccgtgtaggtcacaatgatagggctcaggtcactggtgaaatcagagaagagaattgacgttgcaatcgaagaagttcaagaactaattatgttgcttgagaatcaaatcacgggaaaaaaattattcggcggagagacgataggattcttggacatggtcgtgggaactatgatcccgttttgtctagctcgggcttgggaaggtatgggaattgatatgattccagaagaaaagtttccagagctaaacagatggatcaagaatttgaaagaaattgagatcgtgagggaatgcattcctgatagagagaaacatattgagcacatgatgaanattgtaggacgaatcanagcggtctaagagacaacatgatactctntgatccagttgatgtaagttgttaactaaatttgtattgtcttgttattaaaagttttatgaacaatctactaaataaagatgagtgtgatacatgtatccacagtggtagtat

SEQ ID NO: 8161 - DNA, 1339 bp, Arabidopsis thaliana landsberg
gcgctcaaatgagaatgtcatggaaactcgaagcctttgcccacgagctgtctggaatatcaacatcaactctatagccctctttaaatccaagagattctaactcaccacccttagcattggctgaccatctaaaccgtcagcaagagaaaacgtcttaaaaccatataaaaccatgctattcctacactatgcataaccacacagttgagaaaatgacaaataagcatgctaacaagaaacttactgatggagaatactatttaaagatcaaacgaggagcaagatataaaagccagagaagcaactacaaatacgaatctctgatacaagaacaccaaagagaactcagcttacctaccataacgagccaatagatttgttcgatgatacgcgatagtcaaattatactgcgaaaacgtgaatccgcgatctgcaccggcaggtcgccacttcttcaattcacccgtcacactctttaacatacagaataaagatacaaacatgttcctattcaatgaatcacccacaaatcctgcactgttcaacaaaactcttaagatgtacaaaactaacacctatcaacaaaatcacactccatgaatatcacatctaattctaaacaacaagaactagtaattgcttcaaggaggcaatgattttgagagctaaaggcgtaccgatgttggtattgcgatgagactgaagaaatttgagtggatcaaacgaaggaagatcacagtgtttaggtttccatcgccaattagatatctcgaaaccattggttttgttgttacgaatacaattccatcctttgaagatttctttacaactactggtgtacctggtggatctggggttggggtcgtagatccaggagccttcggagaagtcgcaagtggcggagagaggtgagagggaaccgtcgggttttggagggaagacggtggcggagcggtgagttttgggagaggagagggaagcgcgtttggatagagagaggaggaggaaaatggagatgaaacagagaagggagagtagagggaagagtgagggtttgttgtgtgaagttgtagccatggctgtgtctctctcagaagctctcagaagctctcagccatggcggagattttggattttggctacttgagttatttgattaactgatttaattttattatatatttccggaaaatgtcaaaaagaagtcctcaacttttaaaaatgttttgaataaaaaaaacactagctttccaatagaccagtgttttcatgctcgatccagattgttcggtctgaccggttaacccgtgatctatttttagtttgagtttagtac

SEQ ID NO: 8162 - DNA, 922 bp, Arabidopsis thaliana landsberg
aagatcgatcaatgaaaacaattatataatgttttagtgctattctaaggtaattcatatttaattatggtgggaaatttgatcatatttgttgacaaaagttataaaatatttctctttatcttactcttattcataacaactctagacactgaatctagttataaatatggtcagagactaaagacagtcaagatttaactatgaaagaagatttttttcccaatttccacttgatttttgagcctgtgacttaaaccaaacaccaatctttttacacaccaactccctctttaactttttccaacagagtacagcacacaaataacttccaacttttctattattgtcagaaaacattttttgctaatttctcacaaactcatttctcaaataaataaaaaactttcttcttaaattcttattgacaagagagatctctcaccgttcaacttcaaacagtactctcttgtggtacaagtacgaaaaatctctctgcaacataacacatgcttctctttttttcaacacacacatattcatcattcatcagaaactttctctttctctctttctcttctgaatcttttatctttcaaacactatgacttgtatactaagctgttctcatggcgtcgtgatcgcaaccgccatggttttctcaagcactgctctgtttcttgcgatttcccgccaattctctggaaatcagacatcagatcaacaaatcctccgttcttgtctttcttcaggtacccttttccgatctttcttctccgatcatcctccggctaagaataatttttgatgcagaggaaaagaagaaacagaggaaggataagaagaagaaagtgaaatttgcagagaatgtgaaaaagacgaaaggtaacggtgaagagtatcgtaagaagagggaattacg

SEQ ID NO: 8163 - DNA, 872 bp, Arabidopsis thaliana landsberg
agaccacctcaaagttacagtatctgacatttccagaaaaaatctaatattaccgaaaaacaaaagaatgatgacaaaacctaaaatctattgactaatcaagaagaaaaagtcaataagaatattgaactctgtgatcacggtctctaagaatcccattgtacagagccatccggttcgctggcatggtagagattctacacatagaaccggtctttcccggtttagtcactggcttcggtacgcttttccggttcaattccctcctccggtactcttccccgttacctttcgtatctttcacattatccgcgaaccgcactttctttatcttcttcccctgtttcttcgtttcctctgcatcccaagaaaacctttaaattttcccgggaaaatttatcaaaaacatccgagccatagagataaagatcgtacctgaagatagacaagaacggagaatgggtcgtagagtctgatcaagaaccttaggattttgatgatttccatggaattgacgagccatggcgagaaacagagcggtgcttgagcaaaccatggcggttgcgatcacgacggtaccattagaacagctcaacattgaagatacgtgcgtgaagtttccttaccgacgagtttgatgataccaagaaagaaaaattctcaagaaaaccaacggaacaataaagaaaaatcgagctgtgatcgatgattggctgtaaagagagacgtgtgtgtgtgtttttgaagagacttgtaacttaacaactgttgaaatttttatggttggaactcttttcataactctctcatatatttatacaaatttttttatttaatgaaaagctatatattaaaatttaaaaaaaaaatcc

SEQ ID NO: 8164 - DNA, 1347 bp, Arabidopsis thaliana landsberg
ccatggaaatggttcctgcacatttacaaatgcagtaatctctcatcaaaaacagctaattgaaagggaaataggttctctcattaggaccaactatgaacctaatttatgtgtgtcacgctatagtgaatacataactaccagatgatatgattacttgcaacagaaagaggttatagtttgaataaggatatcaattgagcccttgtcttccttacctgatcaccagcatttggaccagcagtgtggaagagaataggcctgcaacgtttgtcttcgttcatcaaacttgagttctggaaatgggcaataagagctgatttcccctgaatccgaccatatgcaagcgatgccaccttctcgctgttgaacttttcccatttcttaccgttgaatgcctgttaaggttttaaacttgtaaccaaacgcttttttcctttttttctaaagaacaatgatacatcatctacacaaattgatcataaaaaggtacaaagcttataccttataaaacggaacaatattttcaggttcgataaggttgatgaaagcatatccgacattgcatttattctgcaaatagaaggaaggttcatttatatcgatgtagaaaataccctaagctataaggctgcattagactccattagatgaaaaaacaggtaagaggcctgcataccttgaagtcaattggcaaataaagaaaatcatatgttcctttacagtactcatcaatagcagctaggagcatcttagaagtatacctaaaccattaccagaacaaagacaaataggaacaaatgagcaacatataatgttataaaacagggaataatagggagaaaaggtgaattcacttacttattaggaatgttctttatcatcaacgttgttctactgtcttccccacgtaatatgcgatctacatcaagctcatacagtttcttttcagcattactagagttagattcacttcttcggtgagagagattcctgtatcgttcattaggcaagtcaaatgagcctgacactgaaagcattgggctccttccagtaaagaggtgaggcatctgtcgcgatgatcgtaatacagcattttttgaattggcctccatgcgattcccaccgacatgagaaaaaaccttatgagaaccaaaatccattggatgtgagggagacgagccaggaaatcccatgctaccgggagaacctaagtgaaatccctgaagattctggagattcagctacatatgcctgtcttctatcccaaaaaggtgagtttcctaccccggcagatccaatgtggtggtgcacaaacgataatgccatgttcaccattaaaggaga

SEQ ID NO: 8165 - DNA, 2174 bp, Arabidopsis thaliana landsberg
cccacatgcaaacgcgtattctattgagcattcatatccttatttattaaagatatatatataccttattaattgtgcaaaggacatatttggatttgttctattacagtttgtgttgcatttagtttagatgattttatgtgttgctcaagtcattaacaaaaaaataatatacttaattagtccaaagcaacttcctctattcctccattccttgaaaactgagctgagttcctaaatgtttgttgaagagtcttggaactcgagtcgtcgtattcctctacgggttatagttttgccttcttgtccaaagaacattatttgaaacgatgttccaggtatttctcagttgcagtgatgcattcgccttgttggtgagctaaaacatcggttactacaaagatggtttcctgagtctgaccagagtcctcggtagtagcttgaaacgcaagcaaccacgttcaattggaagttttgtttaagtaagtagaaataatgatttttgaaaagatacagaatgaaaaaagttagaaccgaacgacatcatattatacatattgcttgaatatatgaaaatttaaacaagtagaagaatggtgaaacccagctttcagatggttagaaaacaatggggaaccagatttcacatggagcaacgacttaaagcaaaacgagtcaagaaaaatagtttttggacattatcttacgaaagccgttttcacacgcattagcagagaattgttatacacattcaattactacggggatagtaagttttagacagtagccgctaaacaaaatatagttcgtggtcgaagcctcaatgccaccaaatcaaacaaagtgtcccgttcagcaattaaactcgagaaaaagtaaacagaaactctatgggtggtcttttaagatgattggaatatgcttgcactttgacttatcgagttctttcttgagtgccttgagatcttcatgatagaccggacaccgatccactccaccgccgcatgagcagtttttgaggtttggcgatttcttgaggcgtcgattttccatgtcttcgagaattagcccacgacgttccgcaagaaggtccggtaatatgccgacgatgagacaaaacaaaaacaaaccgatggctgcaatggcaaataccaaatccgctgtatccactgtcaatgccattactccccctgattcacaacaaataaacttctagctaaggagatatctaagaaacttggacaagatatgtattaatatatataactaagatttggatgacttcgaatttcttccgatgtggttcagttttggatttagtttcctgaatttaatatacaaatacaatcctatccccactctaattaaacctaaacccttatcaaatattgcaagaaataaaataacaactgaccccgaaaaaacatcactcatgaatttatttataatttatcatcaaaggtttaattattggggatggacttgcacgtaattcaattgcgtacaattaaattaataatgttctactgctctatataagcctagctagctatgcgtgggacaataactaaaattatgatacttgtgaaaatctattaagaaaagtaaaaaaaaacaaatcattaaccaagaaacgtaggaaaaagtaattatcaatttacgatttatttgcgtacatataaattaaattatgtagattaaatagctatagaaacgaaaaaagaaagaaaaatcttgacacgcaagaacttggatgacttcgaatttcttctgatataatactgtttggactcattaaacgtaacccttttcaaattgcatacacaagataaatttaggtaaaaagtatattccaaaaaacttaagttagctagtaaaaaaaaaaaaaaaattacaatctcagttcataaccaaaagcaaaagaaaaacataaaaaatgatgtttcctacaatattgaaagctaaattatttggttaatcttttaagttgagagaacatggaacgaatactgtcgcacttcgaaagacgtataatattggagaaagctcttatatcttcatgacagatgcggcaacaatgatcaatgtctccaagttcaatgtcttcatcatcatcttcttcttctcttctttccataatacactgaaaagtatcgaaaagatgtagatataga

SEQ ID NO: 8166 - DNA, 656 bp, Arabidopsis thaliana landsberg
cattgcttagtttatcctttgggatgtctagatactgcgcttatgaagggtataggatagatactccttctttaaagtatttcaaacttccagatttaagtaaaactttctccggcttgattgagaatatgccgaagctggaggaggcaaatatcactgctcgtcacaatttcaagaagcttcttgaactggtcacatctgtcaagcgtctttcattgaacatagaaaacaacgatgcagaggtgatttgaaatccgttgataatcttcaatctcactatatctcttagattactaaaaccttcctttgtacaggccctaactgctatatatggagatgatattgtctttaatgagcttgagcatctgaattttcatattcataatgcatattggtccgagttactatactggttgctcaaagcttctcctaaactacaaaacttggagttcgatgtaagtttcttccatagactattatttttgttcaatttcagtacaccttgccctttcatctaacttttcttgtttattccaaggaacaatgttcacgtgatggtactatgggtacactggcggttttctggaaccaaccgaatagtgttcctcaatgtttgttgtcgactcttcagactttcgagtggtcaggttaccctg

SEQ ID NO: 8167 - DNA, 1224 bp, Arabidopsis thaliana landsberg
tcagaccgtcctcaacaaaacccatcaccatggctgacagttattcaggcgctttttgtcctctgccgactcctccagtactccaatctcaccctcattcatcatcttctccaagagtctcccctaccgcttcacctcctcctgcttcttccccaaggctcaacgagcttcacgagcttccaagacccccaggccactttgcaccacctccaagacgagccaagtcccctggtctggttggtcactcagcgcctctaaccgcatggaaccaagaaagaagcactgtcactgttgctgttccgtccgccaccaacattgtggcctcgccgcttccggttcctccgttggttgtccctagaagctactctataccttcaagaaaccagagagctgtttctcaacggctggtcgaaaggagagatgatatagtagcatccccaccgttaacaccaatgagcctgtctaggccacttcctcaagccacaggagttgctcagaccagtcaaatcagaggtataatcgattctttcaaactcattttatgcgtttacttaaaaataatcttacagaaaaagaatgacatttttgaaacataaaagcatgttcagttttccataaaacacaaatgaaatgttcttgtttaacttttgtttgcgtttggcgtttagaatgacactttcaatctacacgcaaacgcaagcgactcgaaaatgtaactgcatgaagtatttttaaaaagtaattgcatgattcataaatggaatttgtttgctgtggatttattgaaacctccatagggttattaatcatgcaggagtaggaaagctgatcgaacgatgaggctgccgcgtctgcgtcacgtttgaccaaaacgctgattgtacaaattcagagatcttcacaagtgaatatagaagtcagtatatgtattattctttagttggttaatctcctttttttttttcccattgtaaatctgaagcctctgctctttattcccttttcattttcaatcccctcaatttttcttctttcatccccttctatatccgaaacctcaatataaaattttcaaaaatgcaaaagtatataacgtatgaaactaagtctatgtctgtccatttccgttgtcgggatgggaaggcccccaaagtgcagtttaagatagcgtaaaaccgtctaatacaaaatgcatagttacaacgcgtaaaaaggtaacttcta

SEQ ID NO: 8168 - DNA, 1265 bp, Arabidopsis thaliana landsberg
tatatcttggaactataagtgcagcaagagcaaacaatcgaaaacatacctcagacattgctttttttttaatcacgtaggcctaattcaacctcgagttcatcatcttcctcaaacagtttcaatagccgagcatactgctcatctcttttcttcttttgccacagtttgtacaagaagaacgaaagtcccgctacagcaccaaacccgagcagtataaagatcactttcgtgcctgttttgctggaagaagtatgagattcagcctttgctccagtacttgaactattgggatcaccagatatacctgaaagtatcataagcaatagaatcaacacaaagctgctaaggatttcaagaagcctagaagatgacgctatgttagcatgaaacaaaatcagcttaatcgtaaattttgttgcagcgaatatcaatagtcctgaagaagctacacgatctatcctcgaaagagtatagaatctgttgcctatcgcaagggaatatgatcaattgctacaagcatatgctcaataaaacatagaagagaaagcaaatgtacaactccaaaagcaaggaatcgaaagaacagtttcattagtcatacatacactgatacacagaatcaagatacaacattgctggtgattcatacaagtatatcataatgctagtaagaaatcagtataccaaattgttatcatttaccatttaatctacagataatcaagagatcaaaaagtgactcaaaaagacaaacttttgaccaaagcccagaaaacacaactgaatttgcactaagacgacatgtttaacttgaaattacttgtctagattgacaaatcaaattgtgatgcttttgaaatcgtaggaacagagaatcaaacaatgttttcttgggaaatcgagaaagagccaagtcaagctaaatctagcggaatcactaccaaatcttacaaaacctaatgattctacctaagagaatcaggtttgtgaaattgaaatcacagatctgaagaagacgaacctaagaagaagtggagacaaatcgaagcgcagagtagaagatgcgaccatgaaagagtaatcgtcgagatcgagatctctctcatatctcgatgtctcttggatttttgcttgtgcgcaaagaaggaccgattcctgtttggcagaagaagaataggaagaagaagcttccaatgttctttttttttagttgtgcgagaaaagaaaacaaaatgaggaaacgcaaagagttttgcaggttt

SEQ ID NO: 8169 - DNA, 122 bp, Arabidopsis thaliana landsberg
  unsure (1)..(122): unsure at all n locations
atcaggaagttagagactatatttaactgaacggggttctagacctcattcaaaccgacgngaagagaacccgactgtgaaacacaaggggaggaccccggcaacggaccagaagaccaaaa

SEQ ID NO: 8170 - DNA, 525 bp, Arabidopsis thaliana landsberg
  unsure (1)..(525): unsure at all n locations
gaaaccattcagatctcctatatgaactagtaaacaacacgcacaaaattgtttttgattccattaataccttctcgtgctgtttcattcgccagcttagaggaacatcatccgctttagcgaaccctcccaaaggatgaagcaaaaggatacggtttttataacccatctcaagaagtctcctacgagtatcagtcataagaagagcatgtccattatgaaccgggttcctaagctgaaacgcaaagaccgcatccgcaccacgtttctctagcttcttacgtaattcaaacggtgaaagcctgaaccggtcaagcccatcattgtacttaacaggttccaaaacctcaagatcacccccaatgagccagtctccagcattgggtatcgactgttctacataaggcagacccggtgcagtcgtaccccaagttctcgctattcgctcttttttcggatgtgtataaatctcaatactgaaaacanacacacaaacattactctattcagngatctctctatgca

SEQ ID NO: 8171 - DNA, 955 bp, Arabidopsis thaliana landsberg
gctgggaagttaccaggagataccacctctgttctaaagcttggtggcaatctcattccaaatggccttaccctactgtgagttcactcatctaacatctctttataacttcttcaagttcattcattgagccataaccaaatattggtttgtaggaggaagataaggcgaggttggtgcaagagacaggtttgcagctaaaacagataaacaattggttcatcaatcagagaaagaggaactggcatagcaatccatcttcttccactgtattgaagaacaaacgcaaaaggtattattatactttaatatagtcttgtaacataaccgaaaaacttatggatcggactcaaagaagactgaaacttttgtttgtctgatgaaagcaatgcaggtgacaatagcggaagagagcggttcgcgtagaaacaacaaacatatgatgtgaattggggaggtggaagatgggatttgaaagcagggttttagggatttaaagttgagaattttatggaggagtttgggttatacagagagaggggacagtattagaaagtaactttttgtgcaattacatagtaacgtagtttggttatgtgattatgcccatatattttattaagtagcacacaaaccaaaaagaaaatatgaaaactgaagatgcaggcttttgtttaatgttttttgtttgtttgtctgcatgagttttttttttatgaaccatcagataatcatcatcatcatccataatatatcttgtgaataaagatagtgagagaggagaacattgggatgcacaagttttcttaatctactagtatatgttacgcattgaccaggtgcatatgttaatttgtatcgcaccacttggttagcttaatctatgtgactattatacagtatatgtttcgcattaaccgtacttaacccatcttatgattctgatccgcttagt

SEQ ID NO: 8172 - DNA, 1456 bp, Arabidopsis thaliana landsberg
gagaggcgccggttttgataaactttataatcccttccaataattttgacaacggcggagataatctctttctttcgtttgctggcgaccttcgcatagtttaaattttggcattagggttaacaattccacataaaaagtggttccactcacaaaacaaaacaaaaaaattgaaaccattaattgagaaaatatattcaagctaaattaatatgtatatttgtgtagattacggccaatgattgcacaaattaaatgcataacgagaaatttccatgttattcacaagatataatgatggattgatggtggagaatggagatggcattgaagactgaccatcctatcataaagtccatctaaaacctcatattacaaatcatgctttggggtttaattttgtgtggccctaatcattaccaaatatgaaagccataccatgtactggcacaaaattacgtcctacgtttgttgtgtaaaaattctttgtcttcatgcctccacctttctataaagcttttggatctctacatgcaagcttgatctcaacggtctcttccgctgttttcacctgcattgcttcataaagaaaaccctccaaatttaatgactccatatatcttgaaaatgtaactaaacattaatctaaccatacataaacaagctaaactttgtcacacctaacatatatatatttcagagattgtatcttatcgtgtgatcatattttgtcctatcttggatactcttcctataaagttatgttggtgcaaagtaccttcggcgtttattctttgagacggtagaagaagatggattgctatgccaattcctctttctatgattgatgaaccaattgcttatctttttgagctgcaaacccgtctcctgcaccaacctagccttatcttcctcctgtcaaaatttacatgattcatttaaaacttaggagattgagaaagcatatgaagttgctaaaatgatgtagtcaaagattttcgggacagaactaggtaaagacccactaggcgtgttcatgccagtgactgaagaagtagaaagagggaactcacagtagggtaaggccacttacaatgagattgccaccatgatttgagaacagaggtggtgtctcctggtaattttccagctcttctcttcctcagtatctcctctcttatgtccacaattttctccttgtaacccttttcacaaaaacatgggtcaatatcattagttaagctaactatatatagtgtgtaccacaattttcatgcatataagtgcgtgtaagtactatgtagatgttgcaaactgacaactgatcatacaagctctagactattaaaaatcataaatgcatttgagtctttttgtagatcaaaaataaagttttgacaagttcttggttgattggactaaatagaagcatatttactttagctactacgatgta

SEQ ID NO: 8173 - DNA, 1588 bp, Arabidopsis thaliana landsberg
cttgtcttggtgtgcttgacacgtccggcgtcatgtatccgacaactctctgatccatttgatgcgtctgtttggtcttttctcactatctgaccagctcctgtaatattgaatcatgaagttggttccgtttctatgcggaaatgggatctcagattcagggattttatccatctttccaccgtaaggagtccaaattactaacgctgcgtcttcttcaagcaacttcttgaacatcccttcgagccctaaaacaggaataggttttttagcgaaatccgatttccctttgaagtaaacttttccgattggagactttgcttgaagcagaatctcaataggaggaggagggtttgttgggaatccagagttgtaaataatggaatcgatccaactcatttctatacaatccttctgagttagcccaagttctggaaaatccttcttcattacctccatcaaggtgcctttctcgccaagaaactgacctatgtaggccatcgtcactgtcttgtttgctttgtttccagatacagtgaagaacactcgtaagaagagctcatcaacaagattgtccgcaatttcttgccactttgaaagaatcttgaaacttctatcttgctcgaatgttttggtgaccgcgaagacggttagggtttcaggaacaggaacaagcttgattttccatgacaaaattatcccaaaactccctccactgcctcctctaattgcccaaaacagatcctcgcccatcgaggctctatcgagtaatttaccgttagcatcaacgatctttgcgtctagaacattatctgcagcaagaccatacttcctcatcaaggaaccgtatgcaccgcctgttatatgcccaccgatgcctaagctcgggtaaacacctgcagggaatccatgaaacttgctcttctctgcaattctgaagtcaacaaaccaaatattcaatactgaaatatagttcacttttgttggtaatggtctgttgcatttagtataaatggtttcaaatgatccacaacccttaacgttttaaacaaagcaaatattcgtttggcgtttgtggaaaactgaaaagcttatagattgtgttacgatttgtgtagtccaagtgattaagaaatttacacaagaccggtccaatataattgaaaaccttagtacgaacaaacttttttggactttttaatgtgcgaaatatataaagtttgaacggttggacctatttttagaattttaaaagtagttacctcaaaatacgtatctgaaaaatgaaaatattgaaacttttcgccacataaactcttttgtaagagttttattttttttaaattgccataggctagagaccactgaactcttgctctactagtttcagttgggcttgaatctttgttaaattcattgactttgaaacatgtggatctaattcatgcggaccacaaagtttgctctacatgtggatctaatttaattagtctctagataacttttcaaaataatatagttcacccttaaatgtaaggttttgtataatttaactcaatttttttcttctaaatgtgtaaaatcaaat

SEQ ID NO: 8174 - DNA, 568 bp, Arabidopsis thaliana landsberg
  unsure (1)..(568): unsure at all n locations
nnnnnnnnnnnnnnnnnnnnnnnnnnnnnnnnnnnnnnnnnnnnnnnnnnnnnnnnnnnnnnnnnnnnnnnnnnnnnnnnnnnnnnnnnnnnnnnnnnnnnnnnnnnnnnnnnnnnnnnnnnnnnnnnnnnnnnnnnnnnnnnnnnnnnnnnnnnnnnnnnnnnnnnnnnnnnnnnnnnnnnnnnnnnnnnnnnnnnnnnnnnnnnnnnnnnnnnnnnnnnnnnnnnnnnnnnnnnnnnnnnnnnnnnnnnnnnnnnnnnnnnnnnnnnnnnnnnnnnnnnnnnnnnnnnnnnnnnnnnnnnnnnnnnnnnnnnnnnnnnnnnnnnnnnnnnnnnnnnnnnnnnnnnnnnnnnnnnnnnnnnnnnnnnnnnnntttttccccctctcctgggggcctttttttttttgccccaaaagaaatttttttttgggggggggtcttttttacaccaaatttttaccccctccccacaaaaaagaaaaatatttgttttctcttcttataaaaaccacaccgggggggggggggggcatcccccccccttcttaaaaaaaaaaattatttttt

SEQ ID NO: 8175 - DNA, 727 bp, Arabidopsis thaliana landsberg
gtcagtttcttggcgagaaaggcaccttgctgaaagtaatggagaaggctttttcagaactagggttaactcaaaaggattgtactaaaatgagttggattgaagccgcctttttccatggtggatttccaacaggttctcctattaaaattttgcttcagctcaagtcgcttttaggaaaagattacttcaaagcaacgtcggatttcgttaaagaacctattcctgtgatagggctcaaaggaatattcaaaagattgattgaaggaaacacaacatttctgaactggactccttacggtggtatgatgtcgaaaatccctgaatctgcgatcccatttccgcatagaaacggaaccctcttcaagattctctattacgcgaactggctagagaatgacaagacatcgagtagaaaaatcaactggatcaaagagatatacaattacatggcgccttatgtctcaagcaatccaagacaagcatatgtgaactacagagatctagacttcggacagaacaagaacaacgcaaaggttaacttcattgaagctaaaatctggggacctaagtacttcaaaggcaattttgacagattggtgaagattaaaaccaaggttgatccagagaacttcttcaggcacgagcagagtatcccacctatgccctactagaagctaggttcatgaaaccaataacattatcaaaaataagaataaatggataa

SEQ ID NO: 8176 - DNA, 1617 bp, Arabidopsis thaliana landsberg
aagagtcccacgagaatatatctcccaccaaaactcaaacggtttttaaaggcttggaagtatcattaagaaggcttgctgaccttaacaaaccggagatttcggttttgttgctcggttcattggctgcagtgattcacggtattgtgtttcctgttcaaggtttgcttttgtctcgcacaatcaggatattctttgagccttcaaataaactaaagaatgattctcttttctgggctctcattttcgtcgcccttggcttaaccgacctgattgtgattccgttacaaaactacttattcgctatcgctggaggaaaactaatcaaacgtatcagatcgttgtcgtttgaaaaagtcttgcaccaagacataagttggttcgacgatactaaaaattctaggtaatgtaatcaacctttttcttttagggtaacaagaagttatgggcttcaaaatattgagttttttgttgttgtctagcggtgtgattggagggaggttgtccactgatgcttctacagtgcagagtattgtaggagatgcgttagggttgatcatgcaaaatatggcgactataattggagcatttattatagcgtttacggctaattggttattagctttaatggcccttttggtggcaccagtaatgttcattcaaggatactaccagatcaagtttataaccggttttggagcaaaagcaagagttagtagttagtattcaacaaccttggttaaattctggttctatatagtctaacatggttttttacttcgatttagggaaaatatgaagaggctagccaggttgcgagtgacgcggtgagcagcataagaacagttgcatcgttctgcgcagaggataaagtgatggatttataccaagagaaatgtgacgaaccaaagcaacaaggtttcaaattaggactcgtgagtggtttgtgctatggtggctcatacttggctctctatgtcatcgagtccttatgctttctcggcggttcctggttgattcagaacaggagggcaacgttcggagaattctttcaggtataaaagagtagaatcaggttcgattatgatccggtttggttcgggtttgtgatgtttgagtggtttttttaacatttcaggttttcttcgcgttaactttgacagccgtaggagtgactcaaactagtactatggcacctgacataaacaaagcaaaagactctgctgcttcgatattcgatatcctcgatagtaaaccgaaaatcgattcgagttccgagaaggggacaatattaccaatcgtccacggcgatatcgagttgcaacatgttagtttccggtatcctatgcgaccggatatacagatttttagtgacttgtgcttaactatctcatctggacaggtaacaaacatgtgaataaaagaatacaaaacagagattttccggtttaatgtaattaaatggttaacgattttgttttttttcagaccgttgcattggttggagaaagcgggagcggaaaatcgacggtgataagcttactagagagattctacgatccggattcaagcaagatttttttagatcaagttgaaaatcaatcgttaaaacagaga

SEQ ID NO: 8177 - DNA, 2337 bp, Arabidopsis thaliana landsberg
tcctaataagcaattaacaaaaagtttgcttgaaagagaagctgatcaatgtcaaaggtttttacagcagaaagttggaaataaattggacaaacaaagaaagatccaaccgaagaaggaaataacaactctctctgggtgtgtagagcaaaaaacgagtctaacatgttttaaaatctttcataaaaacttataaaagatgagcaatcttcaaaagaagaagagacaggtttgggctaaagaagagtgctgtgatgttgaaaatccagagataacctttttcattcattcccatggagattgagaccaaaaaaattattattactcaacgctgtgttggcctgggcctggagcttccaaatgtggatcggcgatcatcactggctctaggaccagaaccccaacggtctcctccttcagctggaggtccagatctttccctattactagtccaccggtcagtattctgagcggctcctctgttgcttccccagtggtcatctccgggaggcggcccacggttggaccgacggtcactttctgatgatgttggtgctgatgggcctgagacctcagtagtctggcgcttccacttcggaacataaggtgctgctggtgctcctgctgctgctgctgctgctgctggtgcggtagttccaacaggagtaacagtaggctctgcaaggcgagcaggtggtgcattagttcctctcaacagctcttctcgttcccgcctacttttctcttccagctctatctctctctgcctttgcttctcaaaagctttatccaagtttgctttgcgttcagcttctaccttcttgagcctctcagcttctacattagaggaaaacccaaaaaataaacagaaacaaggggttattaaaaaatcttcaatatcaaagtcaaaatgatgtggatttatggaagcaagtccacaccttcctgcttgcgagcttcctcttcttcctgcagcttcctaatcctttcttcttcaattttcaaataatatatctgcttcctcttgatatccctttcttgcttcttctctcggattattttactgatacgctcctctctctccgtcctgattctgtcaaactctgcttgtcgacgactaatcacttgtgcttggaatatttcctgggcacagaaagattcgattataagtacattggaaggaaaagttacaggaaaaatgtaagaaactagagagctttaaaattaattcaataacgaaaagagattcagatcaaagatgaacattaagagaaacaacatgacatgtcaaagactgaccttattatccaacattctggacaacctgttcttctccttcaagtcactctcatgacgctctttactgagttcaacttcacgctgcataggagaagagcttttaagacctcatatacttccaacacagaaccaagttgtaagaaaagaaaaactactgaaacagtaagtacctgttgttcacgctcataaaactctctttcctctaccagtcttcgctgatatgcagcttcaatcaatggagcagcctcttctctctttgctctttccaaataatccatcgttttggcaagcttttgaagcttcttctccatttcttgcctttccttgagctgctcagttaaggccctttccttcacagattgctttgtcaccttctcctatatttagtttaacccaaccgacattagtaataagttaatcagtgaactatataatagctaacatattggtaaacttactccgtctaaaagtggcttcttctttccctttttcatgcgcttctctgtctcttccagtaaagcttgggcttcttcaagctccttctcctctatctctctaaggattctttgttttcttctctctgcaagctctgctgcaagtctcttttgttctgcctcttcagttagcttctgaagcttaagccgtttctgctcctcttcacgttccttcaaaagtaaacatcaaataaaggaattttcataaacaggtacagcgtaaaaggagagctgtgcaaataaccatggaaaagtaaactaccatttctagttgctgacgctcttgatcctccttcctcttttcaatgattgatttacgagcaagcagtcttttgtgctctttctcaacagtatctgctaaatttggtataacgccagctagttttgatgctttacttgggacaggatacagcatagctcttactttgctcaaagactcggcaaaaacagccagatgatccctcagtccatcagactcaccgccctgatattcgagcagttgatcgaataagatagaaattagtcgataagttattaattatat

SEQ ID NO: 8178 - DNA, 1885 bp, Arabidopsis thaliana landsberg
tatgccgaaaatttcaaagctcgtttgttatttcatctatattcaagtttctctcatatttttctccctatacagaacaatgtgatcgtttcttctattccaataatcctcctgatgcagttaatcatttggattacttgggagtgcaggttgcatggatctctggcccatggttcctatctatttttgtcaacattattccttgggaatgcggtgagttcttatgttatgtcaaaggaaggacataggaagtctttattttccttttcttagctgaagttgtattttcaatcttgttgtttttgagtccagttctgcggatgtgggatgtgcttctctttgaaggaaaccgtgtagtgttgttcagaacagcatttgctataatggaactatatggtattttgctgatagaacttttgtatgtatcaagtgtgtgatgattgaattagctttgtggttcaaaggaaacaaaattttcagtcactctttgtatttccttaggtcctgcaattgttgcaacaaaagatgcaggagatgctattacttcactacaaagtcttgctagttcaacatttgatagtagtcaacttgttttgactgcatgcatgggttatatatcgacaaatgaagctagactagaggagctgaggaaaatacatagacccgcggtactagagattgtcgaggaacgaatacaaaagggtcgagtatggaaggacaaaaagggattggcttctaagttatatagctttaaacatgaaggttctatcttagatcatgaacaaaagtctactcaaaggaatgatggtgagaatcaagatgatgatgatgaatcttgttcgccttttctgaatcttgatggtgcaaatgttgattccgaagtagattctttaccagatcttcaagaacaggtgacttactcttttgattatgttttgagggatgaaaataacagagaaccatatgcttctatcaacaaatttcttgagtagtttattaagtatgaggaatatgcaactctctttaagtttcatcgataacagttattgtgcaggtggtatggatgaaggttgaactatgcagactgttggaggagaaaagatcagcggtgatgaggttattgttactctacttcaccttccatttctcaagtcctgagaaacttaaataactgatcctaatatgtgttattactctctacagagctgaggagctggagatagctttgatggagatggtcaaagaagataacagactggaattaagtgcacgggtatatttaaacttccttcaaacagtgttattagctcatcgaggaaggctcatagattgtttttttgggtgcatattgactaagaatgtatagttttgattaaactaaaaagtgaaccttaaattttacagattgaacaactggaaagggatgtaagagaactaaagcaagtcctttctgacaagaaagaacaagaaacagcaatgcttcaggtgttgatgaaagttgagcaagaccaaaagctaacagaagatgcccggataaatgcagagcaggatgcagctgcacaaagatatgcagtacatgtgcttcaggtactgatttggtcatcttcttactttgtatcttctaagatatttacttcttaagtaaagataaaacatccaagcagagatcagcatctttgattttagcttgatgatcctttgtggaaacacttaattaaacaggaaaagaatgagaagcttgtgactcaactcgctcaaatggagaagaaactagttacagcagaaacaacactcgaagctactttgcaatataaatccggtaaaaataaagcactatcatcatctccaaggtacatacatcaaaactcatctccatatctttttt

SEQ ID NO: 8179 - DNA, 553 bp, Arabidopsis thaliana landsberg
atgaatttgacactattgtaaccgaattaccaagtgtcaattgctcaactggcatagaggttgctttttcgagtggcacttgcgacgaattaggaatgttgaagcaaattgttacagaactaattttgattatgtgttgttgaacagatgattgagatacgatctggattaccattaccaacaattacagagatgctgtcacagttagtagtctactttttgatagaagactacactaactactgggtacatagattctttcatagtaaatggggatacgataagattcatcgagttcatcacgagtacacagctcctataggatatgctgctccttatgcacattgggctgaagttttgcttctcggaatcccgacgtttatgggaccagctattgctcctggtcatatgataaccttttggttgtggattgctttaaggcaaatggaagcttttgagactcacagtgggtaaggtggcgtggtttaagaatcatattacaaattctttgctttttactttacagagcttttttcttctatttatatagatg

SEQ ID NO: 8180 - DNA, 1715 bp, Arabidopsis thaliana landsberg
gttgaccaactgaaatcaaaacaaagacaactggaaatgaacctagaagaaaaaaaaaactgaaaaaatctaataaaagaaatcaatggctcagactttggtttggtttttgctactcattttcggtttgtttgttaagaaattaaagaaaagaaggaaacaaatcaaaattagtctaaaccaaaccctaatttgccaataggtgttatcgatttggggattcgaaacgccgagtttattctcttttttggtattattcatataatcgcactctcctctcgttcctcatcctcatcgccttgaagctctctcaccttcttcttcttcttcttcttcttctccggatctcgcttctccgtcaacgactccgatcaacctaccaggttcatctttctctctcccgtcccgtcagtgatctattacttcgatttggtttcttcttccaaatctcgcatttcctttttcgccttttaggtttccttgattcgttcgaatttcgtccctctatagctcaaatatggtttcttcttcttgttatggatttgatttcaactgctaatgctttctttgtcgccgcgaatttgcgttttcaccttattcgattcagaattgatctccggagattgttgtatcgtctttgattttctgattcgttcttgcaatggatccattacgtttgtgatatcaacgatgtagtagtaataatagtcgtctctgtggaaatctatgttgaagaatctccatctttgacattggagctcaaatcaccattgatattagatatagatgttaagagaagattattgtgtttacttatctcatttttttgtgaaaactgtaggataactttgtgttgagaagatgtctagtgcatccaagatgaaatcgagagacaagaaggtcatgaatgattcacagaagacacctagtaaagcgtctggatccatgggtggaagtagtgttgtggttggtggttataatccacttttggggacatttcaaaccattgagtcgctttcagcaactggctcatcatctcttcacaataatggccggttcagacacattgatgagtcggattcaactggagctgactgtgattctgtctctaataatggtagctggtcaggtgaatctgaagatcacaaagagaaagtacctagtactagtattgctgcaaaacaagaaatcattcctggagctgacaatgacaagcgagataagatgcgtctgaagaatgaaagaaagcatcagcgtcaaaaggaaaagcgagctcaggagttgcatgagcgatgctgtcagtatctcatgtcgagaaaacttgaagttcatgctcagctgattatatctatggggattcctcatgagcgggcaacttatgctcttatgttgaatgaagggaaaatagaggaatctattaattggctgcttgatgatggtggggcaaaagtagcagataagaaactagatccgacctctgggaacttaaagcttgacatatcacaagagttgggtagaatcttagagttggaaacaaaatataagtgcaccaagcaggatgtagaacgagctgtggttacagcagagggggacattgagaaagcagaagaagcattaagaagacagaagcaagaccaatctactgcgtctagaaaaccagaggatattagtgatagtacttctgttacaatagcaaagaccctttgtgctcacag

SEQ ID NO: 8181 - DNA, 987 bp, Arabidopsis thaliana landsberg
cgctctgtagtagtgcaaacttcagatgagcacaatagcctatgctcattcttccagtaaatatctgaataaaccattaccaaaacaaaaaaaaggtaccaaaattaatcccaactcgaaaccttaattataatcgatccagacgaagaaaaagagtgggaaattagacgatctaagaaatagagagagagagatagagaggcgattaccgaggagttgaaatccagcgaaggcgacgatggaagcggcaggattgagtatgagcgagataagtgatacgatgcgtttcttcaggagcattgggtaagggagagtcaagatgacggcgatcgctacctcggcggcaaccacatacgacagaatcagccattgcaatgccattattcccccttcttcttcttcttcttcttcttcttcttcttctagatctctcttccgatccaaaaacaatatattctgatttgtgattatgcgcgcgtcgaccacgtatctacgccgtgagcgtctgccggccggttttgacttttttaaaaataaaataattgatgggcctttttacggccaattgttgaccatgtattgacttcattgccagacccactaattaacttccgtttcataatggttcgtcaaaggtgataatggaacttaaaaaagtagctatgactcctaattacaactatgttaggaacttataccattcatgtataactcatactgtatagctaataaccaaactttatatagtataggttgtagaattaagaccgaatgcagaagagaaaacattattaggataacttttgaaataccaaaatatgatattttaagaaatgaatcgacatgtgaagcaaatcaagacattcaacgaagtctaaagttgatttcaaactttgaacaaaacaacttatagaacatataaatttgaaaaaagtatattaaaatgttaaaaactatatatacaaggaactctttggggaataaaat

SEQ ID NO: 8182 - DNA, 2101 bp, Arabidopsis thaliana landsberg
gttcttgaactgaaacaaggtccaatttctgaggaaaaaccttcttttttgtaggagctatacgtgaacatcgggtggccattgtataagaagcatggacatgcttttgaggtaatagttccaaagattttattatgtaatagttggcccattgtcgtttgtacgaactatttgtgatggtgtgtaccttggactgtgtgtttcaggctttcaaaattgttgtcactgatcctgattcagttttcgatgctcttacccgagaagttaaagaaactggacctgatggtgtggaggtaacaacactctttgccttgagcagccttctctatcattgttttaatttgatcatgaagacttataacatatcttctgtacaggtgaccaaagttgtcccggctgtgtctgaagaattgaaagatgcatttttgaaggacattaggaggagaatgacaccacagccaatgaagattcgtgctgatattgaattgaagtgttttcagtttgatggagttctccacatcaaggtcagtcttttcctttttcttatctgtttttttttttttgttttctctgtttgttttctacttctagctaaagatgtttggctattattatgaatttacaggaagccatgaagaaggcagaggctgtaggtactgatgattgtccagtcaaaatcaagctcgttgctccaccactttatgtactcacaactcacacccattacaaggtatgtttatggttgttgggtgtgctcctatttataagcggaaaccgttttgagatacattgaggattacatagtaacattgacactttcttgttctgactgagtaggaaaaaggaatagtgactctgaataaagcaattgaagcatgcattactgcaattgaggaacacaagggtaaacttgtcgttaaagaaggtgctcgtgcggtaagtcttgtagcctttttctatgactagttgactgaatttgctacttcagtcactccttttcttcggttccgtgactttaatgtgctacaacatttttaggtgagtgagcgtgatgacaaattgcttgctgagcacatggctaagcttagaatggataatgaagaaatgagtggtgatgagggaagcgaagatgaagaagaagacactggaatgggagaagtcgatatcgatggaggtagcgggataattgaatgaacaaaagcaaaagcattgtaactgctgtttctgctttagatcctacaattttgtttccctttgagcaaaaacagtattttttgtttgaccccaaacatggttagtagtacaagcatctcttattcacgacaagtgtttcatcttgatttcacattggttatgataagctgctcaatagtgttgagctctgagaatgaagacgaagtgcaagaatcagatgaactgtcctgggcaatctccccattagccgcaacgatggtgcgggaataacagctgaattcatcgatatagctaagactctgttttgtgctcgcttcaccagccaagacattgtgatcttcaacctccatccaaccctctgagtcttgtctgctataaacttggatcaaagcctctccatctgaatgtgtctcattcaaggcgtgtgaaacattcgtcacgagcatatacgtatccttgtcgttggttaaccctctaagagtagaagtgatcactgtaagaggatatgtccgctggtgcacgactcgattcaccggtttacccgattcagaagtcacctccacgatccgttcggtcttcactctctgctcaaccctcttgtatgttccgtttttctcgaacctcaccaagctgtcaaccttgaacatgctcttgaccatggtggtcagattacctttacttgatctaacccagccatcatattcactacttacctctgcttcaaccttaaacgacccatcaagctgttcaagctgttcttgtctcatcatatgccgactcgggctatcataaagtctagacccagcttcaacattcgaagacccgtgatctaaccagagatgcaaaatagcgtccacaagccagtatgatatcccatcgttgaccccaaacgcaaactcatgagaca

SEQ ID NO: 8183 - DNA, 1725 bp, Arabidopsis thaliana landsberg
gcttgtttataccatccatccatgctccatacacaaagctatacagatagatccgtttatatattaggaaactgataacacggcagatgaaagcagtggcaagatctttttttataacataattggagggggaatatattacagccaatgcaaatgcagcatataagcatacctgagaatcagcaccagaggaaacaagaacatttagcacgtttgagaatgctaaaccagtcactctcttctgatgacctttcaatttacttttaacctgcatgattcattaccatccaaaagctgtttagaatatttgtttctatgacaaactaaaaaatccttttaacactttcagttgagtcaggatacctcatcaactctgacattgtagatttgaatagaagagtcatccattccgatagcaattatattattgtcttgaggatggaaggcaagggaagtcgctgctggaggaggagccatgaatgtcgtcatcgtctgcaaaaaagaaagataaataagtgagcaaacacagagcttgagaagccaactagccaagcagatgaatagacgtgagtaggacatagagggaccttaaaagtcatcatgttgaataaggaaatttttcctccagaggctgacatgacataagaatcattttttgagagtgcaaagcatggaactacatcctctttgtttccctcacgtgtatcatttgtcattaatactccactagatggctgccaaagctgtggtgggacattgctgtttgcctaaacaaacaaaaaccatacaagaagctataactattgagtttcaaaaacaccattatatgtggtattaacggttatggtatacctttcccaaaagattccgctcactcttttgccatttccatagtttatgtgcagcattttctgctaatgccaatatagcacctccagaatttgtatatatcaacttaacaacctgcatcgagaaataagatgacatcatgaccaagataagaagagagaatcagacaaaggactccagaaataagttttatgcaaaggaaactttaagataattttcatttgaactactagtaatgaaaattgtctatttaatcatagaattccaaatataataaaaggaagtattttagctctaatagtgggaaatgattgctatatcattcttttaaagtaaggtctgcaacgcatcctagttggaacaaaatgacaacatgtttcaaatagattggatacatactcttgctggtagcagggtgtcaggaagccgcagagtacgaagctgggaacgttcactgatctcagtcagcttccaagtctttgatttctctgcatcatcagcgattcgtggtttgacatctggcagactgcgattatctccattctaaaaccaaaaaattatgaataaacttagcaggaattcagtaaagcgttttgaatgaaaatatctaaccgaacaaaatatcttaaaacatttcacaggtaggattaccaatccagtaacagatgccactggtccacttctttcacccattgatagactcattccagtgcttgaatttggagtgccaaatgtgccaacaataggaccctaaaacaaaaatcatgcattcaaattttttgttttctgcaatagcaaccagccagaacagaataagaaagaatatgatgacaagtgtttaccttagcaactgacccaggaggagctctagagctg

SEQ ID NO: 8184 - DNA, 1774 bp, Arabidopsis thaliana landsberg
aggaagaacactgacgtatggtctccacaccatgaaaagtagcatagatgcagtccctagaacaacacggagtcactttattgagcacaagaaaggtatatgtgtaacaatttatgactgggaaagtagcattaaagattaccataggccatgattgcaaatggcagacgaactacatgtttcagtttctgactgaaactgtaataaccctgcaatggaaggttctttcagaaggtcttcagatggaatgattacaactacactagagaatatcaacctatttctatatagattacaaaagatatgaaataagcaggatccgtcttgttagagtaaatgttacctgcaagcgtattttctggacctgattgacaaaatattgctgaaacatacctgttgcagaaagtacttacgataatttatacatatccggcagaatattttatagctgaaattggacataataacaataaagcaagaaattgttgttctaactacaaatttactaggcagtagtttgccacatttagtctgacttgcttctaaacaaagattgtagtaataagctgaaggtgggtattgtggttacctgttaacatcaatagagcaacattgcagctgcaaagcagcgatgggataagatactctacagactgaagtatccacggtgcccctgctgctaaaatagcataagctgcctatattgaacaaacagtaaatagaaagttaggcatacatacatgtttcttattatccttgaaaagggatgttacaaaactctgtcgtttggaatcacttgccaatatgataagataaatgcagcttccaacaagacttctcgattcacgatgaccaaagagaggagcttcatgcaatatatcaagaaacctacaatcacaaaaacagtggtgaaactagatgaggagccaataaagaatatagtgaaatctacaaatacaagaatgtaggagctgcattattcaaccttgaaacaagtgattatagagattagggaccaaaaggaacaaactttgaaataagaacaaaactcgaaaaatccagagctcagaaacaaacgatcgaaatcacgaagctttgtaaatcaatgagcttacatagcattgtcttgctccgtcgacggattgacagaagaagcgcgtcgatcgttggccattttggtttgggtatcttctctcgtatgttggagtgacgactgtatgtaatctcagaagcttggtaaaaagagagagaggggtttttgcttgaaattagggttgaatcagattcgttgctccaatctggagatttgagagatgtgaagatcaagcgtaagaaatagaaatcttcactgtgaaatcaatcaatcaaaggatttggaatgtttggttttttgatttgtgaagtctctctgaacaaccagtcaataacgctgtcaccgttggtgattggcctaaagttaaacaattataaccaaaagaaaataatgaatttttctgattggtctttcgtgagccttattaatcgaataatcgctatttggaactcttaaagacacatacttatcattcttcaatataaacgacattgctaagaatctacgaacttgtcggaacacataggtttccatcattatttcattatttggtttcttaatcctttcttcttgtaatatatatccacaattgtgatatgagaacttttatcctaacttaaacataaaaatggatcgttgtaaggtcatacatgactgcatatgaattaaactatctttagc

SEQ ID NO: 8185 - DNA, 1701 bp, Arabidopsis thaliana landsberg
atccagtctacgttctagacattatagaagaagtatatctttaaatctagtatgcaagactattgccaccacggcaccacctaaccacgacccggttggtagctacaatctgtgtgtgaggtttgaggtcttgacataaacttcatttcacaacaaacccataatgatgacattcatataagatgaatttatataattcgatactaattgaaaaaccgacctatatcgatcatgtgaggttcgaaccgtgacattctctatactgttgaacaatgaatagttgaattttgaatacaatgaataagatcacaatgtgagagtgagatcaattaacagaaaaacggcacgatgttcactaatccttaagaaatggagtaaatttaaaagcccaataaaggcccaataacttactgtttagaaaaaccaacaacaaaatgagcgtcgttttagatgaacacaaccgacgcggtgtgtctcgtaaacagcgaatggttttgttttgttggtatagggataagatcacgtgatcagaaagtcagaagagcccatcttcttcttcctcttggttcttgcctctctcttctcgttggatatcataaaaagacaattctatcgagttcccatcactattcccgatttctgatttatttttccctttcactgtagatccttttttccgactcacacactttcgatattttcttttgttttcttcaaaaaagacatattttttttgctgggactatcatcaattggggtccgtcgccacgccacgcgccgagctcgcaatatatcgaaagcaacgatctaggaaggatcttaaaaatcctacttggccacaaatttttgctatttttattattttccgtgtttaatttctgattcagacaggaagattaatattaagcactagttgtgcaaattcacaatttttttgtgtggatggaaacaaatttctgggtgagcttccctttccttttttttgctttctttctctcctttcttctctccggatttttctaggttttcaatttttgttttaccttcaaaggttgttcctttgtgatataaaaatatagttttcaccttctttcaatctctgcggtttctaaatagaacattggagagatttgtttttgcatctgtaaattttgatttctttgaccatctctctgtttttgtggcaagtgagtaaagtttcaatcttgacctttctttctttctttcattagttatgatttttgcttcttttattgccttaaatttccccattttgggaatgaatgtttctcacgttattctcattgattccaatttttctgcagcacacgtattccaatccaaatcgacaatatacgcgtctctgatggatatgttttggattcagtgagaaacagagattgattttggttttctttaatcatggtggagccttatgagacacgtaacaacggtgaagcatcccagatgatcagatatcagagttataaccatcacaattccagactatcatcttcattatcatcgccattgcttgatttgagagtgttctatgtcagaatcagtaatttcaaggtggatcattccacacctgaggttctcaccattactcatattcctttggatccagattcacttctggagaataatggtgttagaatgagcatgtactctgaaagagtttcttctcagctacgcgtg

SEQ ID NO: 8186 - DNA, 2428 bp, Arabidopsis thaliana landsberg
agcaaaccgtttcctagggagtttcagagcaataacgcttacgcttcagttcattctcctaacgattctcgttgatgaagttctcgcggtttccagcatctcctccttccacgtaatggttcctcttcttcttcatccctcccaatggagccttcaactggaatggccacaaaaagttattggcttccttgaaatgtggcccaaccgtcatgatctcatggatcagatcctcaacgcagatgatgccatgctttcctagcccctgatttaacagcaaaggatatgtaaatatagagaagacatagagttttgatgataaatgacaatccatatctgttagacaaattgaatccaacattgatgataatacatcattttttctaggacagggataacggcaataatattgactttaggaactgaaccagacttgatgaaggagataggttgatgatatgcacctgatctacaatagaattgtctgttttggcagtcctctggtggttaagctttccaaaacctcgttggtaaatcaattccttcacactttttaagttcgggtatctgaggaaaacaagagtcgtccatggtaagactaccacttactaatgaggttaaataagaaaagaaagttttgaaatgtaagcacgaagaggggtacccataggttacatagggttcaacacggcgaagcatgttaatggttgccttgttgaccttcaagaacacaccattgaaaatctgcaataaatgattttaagtgtcagatacgatccttttgtatcattggttaacatattacaaagttctcatcataagattgttacctgtcttaaacgcaaaagttgcaaaatcttctttgtctttgggtcaatggcattgatactgatgatagaaacaaatagatagaaaaatgagaaaacagttatagaagtaacacatcatccttatacttgggagatagtaatagtagatcatattacccacggatacggataatgaaaagcagtttagcttctgggtcaacataaaagcctcctttcaattttgcctcacgcttcagctggattaattccctttcctgaagaaaacaagtagcagaaacgctcaatgaatttgcatttctcacattagaaaaaattgcaaactaagcttgtagaaaaatactttctcctggtactccttggagtactgtttagcccggttaaatatgagtttcctcttctcagcattctgctttttggcagcctcaagctcctgtttcttggcaagtgcccattcttcctccctctttctcttcttcaacactgactcaggaacaacagtcttggactctgcttcagtcatttctgttaattacatagccaaagaacaaaattggaatactcaatcgtttaactacacttttcctgaagagagaaactgaaaaacaaacaaaattagatgctactgctaataaaatcaaagcaagaattccagcttcttagataatgcaagtgaaaacatatataaaaatgtaacaagtgaaatggaattgtgttacacgagtgaaacataacctttcaccaaaatgatacaaaaggttttaggctccaaaaatcaatactttcaggcaattactagcataatcctcgtgtctgttgtcatacatatcagaaaaaatcttttaaaaaacctaggaaatggtccacaagtcatagatccaattacattctatcacacaggttatgcaccttaaagactcttaatttttgtaaagtaatccaattgctagatcacatgcgttgtttagagagctttctcaggattccaccttcttctgaaccaatagctagatttgtttaggccaaataaagccgaaccactaccaaaacacacatagctttcctaaacctgaccaatgcaatcgcgcagctcgaaacacgattgatttctgcaacgatgtatgttgagagggcgaagagaaagaagaagactaaccggcgatcacggacgtcggcggtaggatagagtggaggcggggccgttaacgaagtgaaaaagagggagcgaagcaaaaaaaaaaatctttttatagtatgagaaatttttggactagggcttcgttatgtttttatgatttcgcttttaccctattagagttacgatattttttgttttgactcagataattcggctttacaaacagacccttggtttatattttctactctcttcacatgttttttaactttcaaaaacttttcttatcaacttttttgtttcttaaattcaaagatgaatgaaccactcgactaaaatagtttaacagttttttagtttattttcttttcaaattggtatcttagatatatcatttgatttggccaaaaatttaaactgttgatatgaactttactattatttctctttaaaaaaaggaaaatgt

SEQ ID NO: 8187 - DNA, 2377 bp, Arabidopsis thaliana landsberg
  unsure (1)..(2377): unsure at all n locations
aaccggaagagatctaagaaacaaacaagttaagaaatgaatagatcttacatccacaagtagcgattgaaggagcgtgaagcttgcatgcggcgggaagagtagaagccttagtgatattcaaagtaactccaagagaagcactgctcttaaacgcttcacatagacactgagagtcagctttaagcaccgtcttaagaccagagcaacatgtaccttccggtttcgccaccgtgcctccgctcgaaacgaaggataaacagtcagccatgttgagtatgagagtcgaacagtctacagacggagccggcgccgttgcgtggtggtgagatgcgccgagaactgagacggaggatagggatagaagaacgatgagaaagagaggtgttgttgcggtgaaggaagagtgtgttgccattgtgtgggattttgattcttcttctcttttttttgctcttttgagtttttgaggagagagtagagaggttttttaatggtggaaaatgagaaagagtgaagaggaagaagaagggattttgtaggtcggttttggggttttggggtaatgtgcaaaaacgatgacgtttaggtatacgtgtctctttgcattttccatatggatgcgtgatcgtggggtctttcaccaagagacctgccctttcatctttccttctttctttttttcgctcttccttttcaagtttttactcatttgttttttaattactccattttgaaaatttattaactttactaggaaaaatttattagctttcatacactaactaagaaaaaattaaatgcacctccgaattctttgttctttcgctttcctattatgcgaaatttgcgggatatttctaacaatcaggggtttccaaacaaaaatctaaactaattagtaattagagtaaaaaaattgagaaaaaaacaacgagaataattgatcgagaaaaataaactattgtttgttactatgttagtgtactctcttgaaaataacaaaccacatttaaggaaatgttttatcctcaaacccttattgatgtttggccttttcagtttctatgtggttgtgagtctgaggccgttcattttttaaaccaccgagttaagtcatggaacttgttgtttgcctctgaatggaatacttagcatgtcaaattatcaatattgatagcttaatgtacgcaagtgaatagataaatattacacgtaaaaaatagaggaagattaatatgagttctatatttagcctccacgattcatctacagagaaagaaaaaaagtaagttacttcgtcttttgttttaaaacgaatttggaaggtcgagagtagagacatatgttattatataacttactctttactctttagctccacacatggatttgtatttatactcgagatgattttccattgtatgataaaagcatcaaatcttatttccaaaaataaaaaagattccggttggtgatttggtcgacgtgtaaagagatcacagaatcgtagccattcggatcgtcaaaaaacactacctaccgacttnnnnnnnnnnnnnnnnnnnnnnatatttgggccgtaaaactcaagcccatacaatatgggctcattgttctctactcttttgaaaccgatggcctattgtggcctagttgaagagtaaatacataacaaacccacctcataacttttattatcttcccgaattgccccattagaaacaaactgtgtaaatcagtcctcatcctgaaagaaacaaataatttcaatctttgcttctatatcggtactcctaaaatctagcgaaaacttctcttttgtctctcaagtcagactcaattcccatggacttctccgtcaaaccttccggcggctcaccttctccgtcatcttccacctcttcttctacgcctcatcgtttcaaatccgttaccacaccaaccgctactgccgctgccgtctcaggattctccccctccgccgccgctgatcgagatccgatgcattcctggtgggaatcagtctcaaagcaacgttctcgcatcctctctctttcatctcttctctccggcgattctcactttgaagacggtgacgtaactccgatctcctctcttgcagattccgatcggccggcgttatcgatactctcttctcgtgctgcttactctttgatatcgaattctctttgcaatccagcttctggttctggatctgatccgctttgtcaatggctatacgaaacttatctctcctctgatccaccgcttcgtctcgttgccctctcgttctttccgttactcgccggaatggacttggctcgaattcattcctcggattctacatctcttccttctctatgcggattcgaag

SEQ ID NO: 8188 - DNA, 633 bp, Arabidopsis thaliana landsberg
taacgtcttatgttgcagctggtcatcctttttggttcggtggcgtctttgaagaggagagatccttgtcctctgtttgattctttgaagctgagagattggagcaaagtcgagagactattttttgtataggcctttttaatcttaaaaagtgcttaggttaggattcttggagtcgtttattctcactggtgttcgtagtgaatctaattttttgtagaagtcgttgtcttccaaaatccaatatataaaatcagatgttcaaaaagtcctcaatgaagtccaattatgattgcaaaaaagattaaaaaaatcgaacgaaaacaaaagaatgttataatagtttgaaaaagaaaagaaagaaatggtgagtttggttttttgttccctctcgttcgaacatcaagacacactcttcccgtaaaagtctctctctctatcgcagataggtgctttgtctccttcttcgattactccgatcacctaaaaatctttccttttcttaaagcatttctctttgattcaaagacaacacacatagcttagttcctacattaatttctcgcataaaaaaagttcagatttcgaggtattcttgcaatctcgatcgagtttcagatctggggattcaat

SEQ ID NO: 8189 - DNA, 1937 bp, Arabidopsis thaliana landsberg
caaatctaaaaaacaaatggttgtgtagtatttaaagtttttataagttggttaaccaaatctaaaatataaatagttgtgtagtatgatgcaaatctgactgaaatcgaatcagcccgtatttaattcatcattcattattgcggactaatatgcattaatatagattaaaaaatttcactagtaatatgtaattgagcatacaacttcgtaccatcctaaatttattgttagtctgtattttttccatccacttcccaaaaggttggtaccatcatattattgtatgttgcacactaacattttgcatactaaaatattggtagatttgaagtttataaattaaatcacagggataaaacaaactctcgcaacaacaaccgtatccgctgcgtttaaacgagtcaagcccttagtcaaaaaaatatttatgctattcatattcatcagaacaataaattagagaaagcaaaccaatttgatcaaaaacagaaaagaaaaagcaaatcaaatggtcaattcttgagttgtacttgtgagtcagtaatgttcaagaataaaatatctcttcttttgttttgtcaacaataaaatatccaacacgacgaaatttgaaccattaaataaaaaatattgtttccttagtcgctttatgttctgttcgtaaacgtaattttcacaagtcactgcttcgttattcgaactccaatttttcctaatcctcgcaaccacaaatcttcaatcttcaagattaggatcaggtttcttcgttcaaaggtaaaatcttatcactttctcaaattctaattcttcttcccaattgtgttgatactcgtctctgtacttcgtaaattgaaaagtctcacgcaaacggtgaggaagaagacaaatgtctcacttcaaagaagtgattttgatactcgtttcgttattggattcttgaaaacgttatgcccttttgttgtttggttaaatgcctcaatgagattacttaatttaaagcttttcgtgaatcgtatctctgtttgttcttttcggttgtgaaatgggtttaatcccaaatagcttctttgattatcttaggactaacttgttaagtgcgtctctaaagtttgtgtttttatcaaaatcattcacatgtttttgtataatcttctttggggtttggtggtgaatgatgagatttgatgatgacatgtttctctgaaatggacaggacctgaagatggtactgtttcctcttcaccatgaagtcccttgtaaaggagaagtattgtttgattcaaatggtttaagacgtttttcgtctggtctgaaacatagaacaatggctgaagcaaccacgcttggcagggattgtaggatgaagagttatatgaaatcaatcccgtattgtcgttcaccaagaagaaggttatgtttagttagagcgtcatcagagaacaagattaccaaacagagacttaaactgttggattcttactttgggaaacttcaaaacgatgatgagaagccttctatctcaacaggagatgatattgatcgcaaagctgaactcaatgtgaatgaagagttggattctttgagtgcttatcttgacaaactccaaaaaggtattcttgtttttggtgtcttgttgcttgatttttctggctttttcctcttgttaatgttcacttattttgctgtttgtcagatgcaaaatctaaaggtttagtctcgtccaccttggacgtggtaaaatcagaaggcggttcagtagcaagcaaattgagaaagactggtatttgaaaccattatagtccttttcagcagtttgatgatgaaagatcaagcagaagatacattgaacttctatgctgtgtaaaaactcttaatcacttcttgtccgtttagatgcaatgccacacatgttcttctattgatgctaagaaata

SEQ ID NO: 8190 - DNA, 2894 bp, Arabidopsis thaliana landsberg
tttaatggtctgtttaaaatctaattaacattttacaagcaaaacctactgaaagtaaaaaattccttctctaacttctctggggtcaactcctggaatcttggaacaattctaccgcctacaaaaagaaaaatttctgatcagctttgcataactgatacaaacacatgcttaagagtactttacttacctgtggctattgcgatcagctctaattcaacaccccctacccatctgacagcaggcaaattcctgtgcatcaatagatggtttgcctcatcatcgaatccccattggcaaataaccagagtagcaccaacatcctgcaaagttaaaattataagggtcatacataaatcatatcataaaatgcattgtcgtactaatgaacattttcaaaaggatttcttcagtagcttactcgacatccaactgacaatacaaatttatacaaattaaaacctaccttgcacttttgtaccatctcatcgaaatattgctgctcttgcttgcgcaatgtctcaaacttctccactgtgtcaatgtccaccttatgcttagtcttcggcttcggtggttcaaagggacaagtcaaaatggcaatgtgagcatcttcaatctgctttggcatttgcggatgactcatgtctttgtcaatcagtattccataaataagctcagtgtcctccaactttcccccaactttcccctctactttgatcagatctaagttaacatccctcctctctaaatcagcaacagcaagaaccgctttaacagcaatctcagctaagctgcgcttgcatcgattcacactgtaacaatgagcaagaaagagttaagacagtatactataaaccaagtaaaaacaagcaacaactattgaaaagtagcctgaataagaaaaaggaacattacatcttcgaggacagagtagtcatgcaagtttgaaccagaggctcataattattaacatcgaattcaaacttttgggcaatacgctccaaatgctcaacagccactctagaagccatctcatatccttcagcaatacgaatgggatgaattcctctatctaactgacgttcagcttgctccagaagtgcaccagccataacaacaacacctgttgttccatcaccaatttcataatcctgactccgcgacagttccaccattagtttcgcaatctggttatcaacatccatttgctccaatatcgtagcaccatcgtttgctgcaaaagcaaaacaaaggcgaggttacaaacaatatacaagtagtagtagagctgagctaagttaacagacatagcgaatcgattttcaaaaagtagatggatctattcatcaaactacggcatcaacatagtaaacactatttcaagtaaacaagagcgaaactagaaaattaaaagcagatatgaagaaatcaaaaggaagaaacgaactgatggtgatgtctccgtcaggtccttgaagcatcttatccattcctttgggtccaagagaggatcgaaggatccgagccacggctttaccagcggcgatattggctttctgagcatcgattcctctaagacgagtcttttgatcttgctctctcagtataatgaacggacgcccgaactcatcgaacgccagcgccattttcgagcttctctcgatccgatcgaactatagatcttgggttttttttgtttcctagtgcactggagaggaaaaaaaaaagttgaaatggggaaaaaagcgagaagaagaatgtctggaagatttgagagcttaaagtggtcgagtgtaaaaccctaactcgctgttgatggcagaatcgtaaatcggaattgattcatgggcctaacaagacgtttgggcttatgggtttaaagcccatctgatataagatgaatagaatgttcatggcaatactatcataatttggttctttaataagacactcgttaatacgacgatttgaagttgaacgaatggtttcatattcattcgcatgttcaccaatcaaaatctatatctgaacaagtccatttttaggtactccagtagatttacattggattgtaaggtaatcctacatcttagttcaaacgttttctattttatttttggtcttgatcacaaaacacaactatatatacatatcaaactcatcttcggaaatcatcacaatcaataaaccgcaaaccctaaaataaattaaacgagttctacgtaagaaggagagagagaagaatgggtcgccaaaacattgtcgtcgtggttgccctcgtcttcatggccatcattggccttgccgcagctgcctcctctccatctccttcagcgtctccctccaaagctccagctgcctccaaaaccgatcatgtcgaggctccagtcaccgatgaccaaatcggaaccaccgatgacgatgcagctcctactcctggtgacggtgacgttgcagtggctggtcctctaggaagtgactcctcgtacgacaatgcgcctacaggctctgctgattctgccaaaagcggtgcggcagctcttggcgtctctgcggtcgtcgttggtgttacatccattgctggttctttcttgttactctaagttgggcattgttttatgataagaaggttattttaaacgaagattatttatatgtaaggatgattgtgatgatcttggtgtaatttgtttctcctttgttaagagaaacgttgtctttgtaataatactgaaaaaaaaacttttcactaacggtgtttagatacaaaattctgaattgaatataataatatgcgatttcggcgtctttagccataataattaattaagtagaattgtaaccatcggtgtaataaaacgttaaccaaaaatgcaaaagaaaaacaagaa

SEQ ID NO: 8191 - DNA, 2540 bp, Arabidopsis thaliana landsberg
ggaaccccccggtgccgccttcgtccagtgtagatcctatggcctcgttggggtcatgctattggagcaacatgcctagcatctgttagtttggaacctgcccatgagcaaaaatcatatttctttgatttgaaaaaaagagaaagctaattgtgagcttaacttgtgtttaatgtgtaaaatcttcttcaaagtgttttcaacttgggatgtgctatgaactgtatgttaacatgttttcaaggaacaaaagagaaattgaaagagatgaggaatgagcatataattttcttttgggttaaagtcatggtacatatggatcttatggctgtacaagagatgtttacaagtaaaagaattgcattatacaaactgatagtttcttttatttattcattttgggacaaaacctaattttgcatttgattgttgtttagatttatcagatcctcttacacagaattttaaagttcatcatctcacaatcagttaagatttagtgaagtgatagtcgacatcctttgttttactaggaaaatctctatttgattttaaatgtcagatctttaacaatggagtagtttagattcacgactaggccacaatctcttggatgtgtacttgacttttatttaggagaattactataacaaacgtaagaaacaagtaagagctcgagagtagaaaatgggggaggagaatgtgattgggcagtgaaccaactagttgcatccattgccattggcttatgtcatttgcatattatttcacactattccaagaaataatttccttaaattgcggctcccaaagaaagaaaagataataattatgtatgcaagtaggtccataacatattttttcttatgaggttccttaatctttgtacttgcaccttatctgagttctgacatcacactgcagttcttggatcagaagtctctttatttctacattttcactttactttatctggatatattgatgtcactcactctacagttttctttcttcttaagttcctcaaaatatagtaataattccttctctaaaatgtcatttcatataataatactgaatcaaatagcacaatgcgagaaaaaagtagtactaaaagataaaaagctgaaaaagcactcattccaaatttagcatcaatatgcaaatgactacagatgctatgaaattctaaatctgacaagaaagtcagaaactggccaagcctgaaaatgtcagaaattacattctagaaactgaatacagtttattccattcacgaccatcgacaaaatcatattaatctgaaattgagtggaaaataaaaaaaatacaacaagaaatcatcaatcatacttgctcaccaacacacactacatcaaaactatacacacaacttaagaaaaaaagactacagattaagatttaagaaacaagaactgtggaaattgaattataccaccaaaaaaaaaaacttatggatatttttcaagtggctattggttttttatgagattgcattgaaaaacaaacacacttagctttcatggcttccacttcactcgcatactctctgaatttatattcctcctgctgtttaaacgttggaggaatcttcccttcgctgtaacattggttacagaggctaaaccctgttttcacttccttaaaccgagacccgataatcggatatcggcaaactgaacaaacctggttcccgtgtcgattcctatctcttgtttcgagtttaaaaacagtcgacatgataccaaatccccactctgaatcatcgtacatctctagaaactggttgaatgttaccgtcgaagtatcatcgctttctccatgaacttctaacatttcactcattccttgtgatggtatgtagatagctctcaagagtttgatgtatttgacggcttccatttttgtaatctgagagcttccttcgtttaccggtttccaaagtagcgcatcaaatgcaactcttttccttttgtctggatggccaccgcataaaggagcaatcactgcgtaaaacattcccaaatcgactcttcccgaccctgaatcatcaagaaccgagaggattttctcgtttatggccttaatagctccttggaaagtttcaggtttcaggacattaagcagacgccggagaatctcttctaagtttggtctccttatagattttgtgggaattccattgccggaataggatacaggaacattgttgtctctcatctctcttcttaatgcttcaacatcgcatttccacagccttgtgactctctggaaggctctaacttgaagagctatggctaaatctggccttaaagtagtcttctcgcctaccgtcttgaatttggaagattccacaacaataaacggaccttcttcgttagcactatttccttttttgacctttttcttcttctgcaactgtttcagatgagataccgcatcgtgcaactcaactcggttagtcattttcagggcctcctttaaagcccttttagcttcttcggtctctccagcaccca

SEQ ID NO: 8192 - DNA, 1664 bp, Arabidopsis thaliana landsberg
ttggaaatcagacaaatgactaagcgggtcccttttgactttagcatcaatattcaatattaccgtgccagtaataagagttctcgagtccatgaaatgatgttgtatcagttttcgttcagcatttcaataaattcacgatgttttggtcaaaatatcttactacctatcgactgttatcggacttcaggttctactctttgagtcgtcgacaatgaaaacgtttctttttcctactgtaacgagaaggcaaacaagtggtattttgttacgataaaaaacaggtcaaaaaaaaaatttgttaattgaatgtttaacacgtttccaaaatttataaatgttcatattcattttacattgtactagcatcggcagtagttgattgaatactagtgtcgagtgacatcagcttgatatcaaagcatgattgattacattatataatatccatttgtaaataatccacctctcaaaaaaaaaaaattaataaataaataatccacctccgttcatatataaagattgtcacggtggtctaccttaacactacaaaggcagtccacgactgagaaaaaaaaagcagttcaaatttttttcgtatgtgttaaggatggagtacattcatagagcatcatctacattctactccaagataaatgtggagtatctgtattacttttagttttgtaaagagattatacataatttaaatatggtacattactcattacaggtctttgagctgtggcgttccttagccatgatgtttcatcctctatattgtcgatacgagttcacactttctagcttcatctacataccaaaatcatgaattgtcgtatagggccttaatgggcttaaatgaccgagataatgacctgttagcccactagagataattcagaagcctaactttggatataaagtttaaaaaccctggttccagttttttcttctggttctcgaaacttcttctcccaaattgaacaaccaaagaagttgcagagcacacacacacactttcaagtttcaatacagagatggcgagcactgagccagagcgtgagaaccgtgaagatgaaaccgaagtcaacgaagatgaagacaccggagctcaggtagctccgatcgttaggcttgaagaggttgcagtcaccaccggcgaagaagatgaagacgccgtcctcgatctgtatgttactcgttccgttaatattctagtttcctttcctctggttaaagtgagtgttggattttcgatagaagatgagtgtcggatttttgatagaagatgtattcttctgggtttatgattttgtaggaaatcgaagatgtatcgattcgataaagaagggaaccaatggaaggagagaggagctggaactgtgaagttattgaagcataaggaaactgccaagccccgtcttgttatgagacaatctaaaaccctaaagatctgtgccaatcacctcagtatgtttgattctctctcgaagaagatctttttttttttcttcgaaagggctaaactttatgtatcttttgttgaaattatgcagtttcgtctgggatgagtgttcaggaacatagtgggaatgaaaagtcttgtttatggcacgctactgatttcttcgacggcgagtagaaagaagagcttttattca

SEQ ID NO: 8193 - DNA, 1796 bp, Arabidopsis thaliana landsberg
acaaccagttgctcggtttacacagaataataaaaacgttatgactcaaattgttttccaatttggttttataaatttgcgacccggtttgatattatggttcgattaaaccagaacaaaacaaccctatatataatttcttttgaaatgaatgagaaataaaaaaacaaagaaattcgaagaggtttttttaggttttcgaaaattcaaattacaaaagtaatccatcccgctgctctatagaaatatatttcccgatccagttccagtgtcagttgctttatctgtaaaaagcaaaaaagagatgagaggcggagccgcgggaaagagaagaacgacggtgggtttcggcggagcgccgccgccacctccaccatcaatcgagcaacaacgtcacctctttaactcaagagactccgacgccagtttcgccagcagccgtccttcatcaatcggtttaggcggccgaggagcctccgatgacagatcttcgatgattcgattcattaacgccttcctctccacacataacttcccgatctctatccgcggtaatcctgttccttctgtcaaagacatctccgaaaccctaaaattcttgctctcagctttagattacccttgcgattccatcaaatgggacgaggatctcgtcttctttctcaaatcgcagaaatgtccttttaagatcaccaaatctagcctcaaagctccaaatacgcctcacaattggcctactgttctcgccgttgttcactggttagctgagcttgctcgtttccatcaacatctagtatctaattccacctccgtacccgaagataactccatgaatttcttcgcgattcaaagctttggtcacttcattcgcggcgaggatgataaggttaacgatttagattctcaatttttgggtaaattggaagcggagaagactagcgtcgctgaaactatctctggttgtgagaaaatctccggtgaattggaggctaaacttgagtcactgaggaaaggtccttcgaagaaagagtctctggagaaagttaaagccgatttggagaatgacgtaaacaagttccgaactattgttgtggagtatactgataggaatccagcgatggagaaagttgtggaggagaaagctaaggagctcaaagctaaggaagaagagagagagcgaatctctgtagagaataaggagttgaagaagagtgtggagcttcagaactttagcgcggcggatgtaaataggatgagaagagagttacaagctgtggaaagagatgttgcggatgctgaggttgctagagatggttgggatcagaaagcttgggaactcaattcacagattaggaatcagtttcatcagattcagacacttgccattgactgcaaccaagctctcaggagattgaagcttgatattcagttcgctgttaacgagagaggggaaacacctgcagcggtgatgggtgtggattataaatcggtggtgaagccagctctgtgttcgttgtgcgatgggatcaaaggaagctcggcggagaaagtggaggaattggtcactttacagcaccataagtctgaaatggcttcgaagatcgaatccaaaaggagtcttcttgggtcaattcagttgcagatcaatgacctcgaagaaaagatgaagttggtgaagaagaaacctcaggagttgagtacaaaatgtgatttggaggcgaaaacattggataaagagtgtgaaagctgaggctttgaatctggaggttgtggagaaagaggctgcttactgaaaa

SEQ ID NO: 8194 - DNA, 2050 bp, Arabidopsis thaliana landsberg
gtttcgaaggtacaaacacatatggcacattctgcatttagatggagagtacaaaaaagcgttagttcattatcagaccacgtaataattgcttgtatagtaatgaagcttgttcaaataggataaactatagctatgatgaatcatgtcttcctcaagagtgaactcaaagctacaatttttaaacatacataaactaggagaaactatagctatgatgaatcatgtcttcctcaagagtaaatttgaagcataccccaataactacatagatacaatgattcaattgaagaccaaaagagagtaaacagagaaagtttcctgaaagaaaacaacagagaaaagtatgttcaacacaaaattgcataaagctaagaatggcttcttaagcttctaacaaccaccaaaatctgagaaacactaacctaacgatacagagcctcaaaaattgcaacctaatagctctctaatctacacgagttgaattaaaattgcaaccaaatcatcgagagagagaaagagatggtaaccttatcttcggcaagcaaaggaagatgaagaagaatctcaagtggttcagcatcagcagccataacaacgaactcagagattccacggttcaatgttttggtagcttcattagctcccttcttaagctgcttgtagttagtagcttgttgaacaagatccattattgttatcgaaagctgagaatctgctaacggatacgccttagggttcactacctctcccgtcatcttcttcgttctcaataacctcacagaaagaaattagggtttttgaaggatttgagaatgtttacaaatctgtccttaacccaaaaaagaagaaggtatctatatatagaaacatgactcgggtcgggtttccgggtttcggttgattcggattggtgaatttgggtccacaccgatcttggttgtcggttatttctgtcttattcaattatttcggtttagttcggtttatgttggtccaatttggagtatttgacatctcttttagctatagacgatttacgtcataacattgtgttctctagactctagtaaatcctcttcatcaacaatatttgcaaccagatttacttttgattgagattaatagtttcaagtcatatcaaattgcaaaagaccatactgataagagttttacatataaatttcagtcgattacatatagaagaacactatctttttatttccttacgacatcatactacgtacataggttaagcttattagtactaagatctcatatgggtttaggattttgccatatcctttccccctgcgactgctactgttactgtacctgaaatcaaacacagatcaagatttgcttctacatgtttcaaactcaaaaacacttgaaatagtcagattttagatgaagctcctaagcttgtttatgttaaactatgatgtgactcaatttccacttcctaagacatccaataatgtaactatgataagattggaaatctcacatcgaaagaaaagaagatgccaacttaaggaaatactcaagatctttagatccatttcacttaccttaatctaatgtttgggctcagaagattcccttgctttgctcatagcttcagcttgaatcccttggacagaaaaccatccctgagattgtaacataagcatgttgatacatttagcaacttctcaaagaataaagatacctaaatttgccttattatccatttctagaattctaaggaaacataacgagtaagacagcaccggctagagatgagcatttcaccttttgttacccttctgcaccatttgatctttcctgcgctgagcttgggtaggatctcctttacatcccaaaacaaggctactcacgaggatgtctgcggtaaatgaactatcacactctattccggcagttgtaagactctgactttccaaatcaaaccacatgagattcgccgcattgttaatctccagcaaaatcttgctcctgtccttggaacagatcagaggtctaatgaactcaaccgattcaacac

SEQ ID NO: 8195 - DNA, 565 bp, Arabidopsis thaliana landsberg
aacgaacttctcaatgcctaaaaatcctaattgaatctgtctcctacattcattaactaaattacctaagtgattactacgaacatcaacaatcacaatctcaaaactggagtctaatagccaataaagtcttatctttttatcatatgaagaagatacccaagtgaatccagtaaaacttgcaagagccaaagaaactactaattgagattcataagaaagtgaaacgataagaagaaattcaaataccttatcttcagcaagaagaggaagatgaagaagaatctcgagaggctcagtatcagcagccataacaatgaactcagagatcccacggttcaatgtcttggtagcttcattagctcctttctttaactgtttgtaattcgtagcttgttgaacaagatcaagaatcgttatcgataactgagaatcagctaacggatacgccttagggttcacttcttctaccgtcatcttcttcttcgtctaccagagttctattggtttaagtcctgagttcagggaagaaagaagtcgtgaggagaacaagggagctaggggt

SEQ ID NO: 8196 - DNA, 1751 bp, Arabidopsis thaliana landsberg
cgaatggttttacagacagatgagagaggtgttcatacccggatccctgtcatggttaatattgcatcattttccttgagcttgactaagagtgggaagtctctgcataagtctgccttttctcttgatcaaacaaattccgttaacagaaactccttgcttatggatgaagactcggatgatgatgatgaatttcagattgctgaatcagaacaagaggtttgaatatcaaacattttgattttaaaatcttaagcagcatctggaattaaatcgttattcttgtgtactatttcagcctgaaacaagtaaaccagagaccgatgtcaagagaccaggtgtgcaccctatcagtaagtgtgaaaatgctatttgagccaattaggatatctaatagcaatgatttttggtgcgatttgaaactacagaagaagaacctgctcacaacattgatctgtcatgcttctcgggtaacctaaagcgcaatgaaaacgaaaacgcccgtaactgctggaggatttctgacggtaacaacttcaaagttcggggcaagaatttcggtcaagagaaaagaaaggttggtgaagttttcatcttattaatatagaatggttaggttcttacagccaactaacttttgtttctgtccatttaacactatacgaaagatacctgctggcaagcatcttatggatctcgttgctgttgactggttcaaagacagtaaaagaatagatcatgttgctagacgcaaaggctgtgcagcacaagtaagatacacaagcaccttaattttagttacctaatggagagaatattccactcaatattcttcccatgctattccttagcttgtggatgaatctaaatcacttagaaagattattgagtcttttgatacacatgttcaggttgctgcagaaaaaggtttattctcaatggtggtaaatgttcaagtaagctttgcccatcaactgttattaagattcctaacattgagtacaaaccacacagtcatatttatataggtttaaaactggtgtttatataggttccaggatcaacacactacagtatggtgttttatttcgtgatgaaagaactagtacctgggtccctcttgcaacggtttgtggatggtgatgatgaattccgaaatagtaggctaaagcttataccattagttcctaaggtatgtttatctctttgtgattactactacaagtatctggagattctataggaagtggatttcacgtagaactaaactctatgccagggctcatggatagtacggcaaagcgtgggaagcaccccttgtctccttgggaaagcagtggactgcaactacatccgtggcccgacatacttagaagtgagcagacccatagatctagtttatgagtgcctctagaagcaaaataactcaaaatactttatcttgttgatgtagattgacgtagatattggttcatcaaccgttgcaaatggagtgctcggccttgtcattggcgtaatcacgtctctggttgtggaaatggctttccttgtacaggtaatttatcaataaactgacccataacatttggatttgctcaggtaactgaggctgttgttaatgcatacaattcatgtttggttttacaggcaaatacagcggaagaacagccagaaaggctaaaaggtgcagttcgggtttcgcatattgagctctcttcggctatagttccataatctggagtcagaataaa

SEQ ID NO: 8197 - DNA, 1854 bp, Arabidopsis thaliana landsberg
tcagctaaatatgttacaaagtattaataacgtcaatgcgtcatctataattaaaataaactccacaattcgtaattaagtattctagattactttatgagagatggaactggaagaatgcatactagaaacggttttatagttttacttttacggttttactatcttcgtcaccatcattgaggcttgctcacaagttacacaccctctcgcacatattattattcttttattaatcagttacacatttcatcaaaataaacaaactagtagtcagaaaataaacgaaatctatacctggaaaaaaattaattataagataaatactaataaaataataagaagaagaatatgcataaaggtgtacgtatagttgtgccttgtgatgattgagcgcacgtgtgggtatggccattggtgtccgtgtctacattcactgaagttgacttctttgtctcccccactcttttgctcttttgctctaggcataaccatgattacggttataattatacttactatttactaacagttaagatacatgtaatctaaatcctctttctccttaaacctaatagtcgctcttcaactttattgtcttggccacgatctgaccagcgcgtgatggctcccagagtgtcggcttcgatcctctccttcttttattgtctttgttttcttcgggcttgaaagtatggtggttttagcaagttggtttgagttgttgttgatggagtttggttctaggcgatcaaaatcgaaagggcttttggtcaatggtgatgatggagtcgtcgttctcactatcgcatctctgtgtggtgcctcttcttgtccctaacctcatgcttcattgtgtttggagcatctttggctttttctgatctgaacagcggttttgtattctcggtgacccaattctcctatcgtctctcatgcttcttttttttctttggctcttcattaattgtgtttggtttagatcttctagtttgagtcgaaggtttagttgatgcttttgggttgggcagagattaagttatgcttattttgggttctaactcttcggattattgtatggctttgcggtgctttccggattagtggtttgcttgctttaactctctgctttgggttcctagttcttcttcgctgtttgcttcctctcaattgtgcgtggactctggtggactagtttcgtgtttggagtttgtctctcggatgatacatcgatgcaggtgcatctactagttcttttctggagccgtcttcggttttggtttgtgcgttctaagcgcgacaatggtttcattcactagttctttctcttgcgagatcgtgaccgattcatgtgtgtaggtgacattgattgttttaaaattttcataaacaaaagtataaatgcaatgcttcgtctgataaatggagctccaaaagtcgctatagcaaactcataattcgaaccatttccaacgagtaaaccacagtacagtcacagtcccttgagagacctaagcttacaaagggagcaaagatttccatagttaaagagctcatttagccataaaggatgaccgtgagtgatatatgattagaacctgttttcattagtcacacacttcaactcttcatactccaaactcgactcattagatatgagccaagcctctgcgactttcatagataatgatactggaaagaaggccaagctctaacttattatcaaatatgtgattttgatatttttgatgacatgtaaagtgttgtagttgcgacccaatcaagaatgatttttattttttacaatatggtttagcaaaaaaattaagagatcatttatatgaacctgcaata

SEQ ID NO: 8198 - DNA, 1207 bp, Arabidopsis thaliana landsberg
aaaacgttggtcgtcgaaaatgtatcatgacgtcatgaagaaaaaaacgagaaaaaaaaaggtcgtcacatatgttttcatgtaggacaagattataataataaaatcgtttcaaaaacaatacgaatattttacttaaatgagtcactgatcagtaccccacagagatgatatatttctctctttaatctctctataaatacataagtatgcaacaatgcatataaatatacaaaacatctgaacacccaaagatatacacaggaagagagctaaagctgatatatactaagatcatttgatcaacctaatcatcaacaccacaaaatttcttttattttttctctaatcgattaatttagtaataatgtctggaagagggaaagtgaaatcggagccgatgaaggttgtgttcattaacacacagtatgttgagacagatgctcgtagcttcaagaccgttgttcaagaactcaccggtaagaacgccatcgtcgccgccggtccttttgattcgccctctgctttcgacggccgttgttacgatggcggtagtaaaatcggtgaagataccagacagctccacggcggtggcggcggcggaggacgaatggggacgacgacggagttcgatagattattcaaagagatgcctcacatggaagaattgtataaactatggtcagaatattgagtcattaataacttctgtgacaatgatttttaaatcattcgttttcttccaaaatcttttcttttttatctaatgagataatgttgttattgatttgatttaatcatcttaactggatcgtcactcttgagattaggtccaataacgaatgttgtgttttggaaagtaattatgagttacctttcagtacggcccatgtctcccaattttaaacgggcttattatagctttcatatgttgtttaaaaggaccatgaagcccaagtatatgcgagattaatacttggttctcttattttctgtgtatttgggttttagaaccaattatcaaaacaagaagtgtgagtgtgtgacaaaggcattgaaagcgactagcagattaagaagtcaggcctcaactatgggcttttctctatggggcgtctttgctacccaagtccaactaggtattacttttttttccatattttttatatatttatatttcatgtttttcttttcttgcaaaataatg

SEQ ID NO: 8199 - DNA, 834 bp, Arabidopsis thaliana landsberg
aagttcagtctccccacagatattatatatattcccatatatttatctacacatataaatacaacaaacatcgggagattcaaaaggcaaactactcaatagagcaaaccaaaagaaataaaaacacatataacgccaaaagtatgtctgcaggagtgagatctgaaccgataaaggttgtcttcattaacacacagtacgttcagacagatgctcggagcttcaagacaattgttcaagaactcaccggtaaaaacgcagtcgtcgccgacggtccttatgaattctccggtcaagggtacggtggcaaagattcatcacagcggttttgtggcgtaggaaaagaagcagaaagaggtgtagagacgacggagttcgatagttttttcagagagatgcctccggtcggcgaattgtataatctttggtcagaccattgactagactaataattcgttttttttccccacaatctggtttattaaggcccattgggtttaatcttattatctcaagcctatgtgaaacacgagtgttccttagaaggtgaacttcttttttttgcttaatgcattaatgtattatattatctttcacttttttaaaaaagacaatcaataacatcattagtagcatagtttattttttttgaaagttttttttcgacccttatattattttttgaaattaatataattgcaacaataatagtctatcagattttacgacaaatatcagaaggaaccaaaaaaaaaaaaaagaagcgtggagaaagttaacgcgcgagaggggcgcgtgacgataaagaagaggaagagtgaaaacaaaagagat

SEQ ID NO: 8200 - DNA, 1230 bp, Arabidopsis thaliana landsberg
gatgctctttaccgttatggtaaggaccaatggagacaatcttttgttcgtaagctttgaggttgattcgagcgaggctctgtgggattctcacgatgcaacataactctgaaccagctgattctctaagaagcttcaaaccattatcttctgagattaaactctttatgtctacaacaatctgtggatccattaattcaaaccttcaataccacctcagattgtcttctggttaagtggaagacttaaaataccttttcttttttttattccctagaattttgtggaaatttaagaaggaggagtgaaatttcgccctagcaaaatgttgacaagtctccacgttaggtcggcagaggaacaaaagtattatttttggaaaactaagacttttcttcttaacttgcatgacatgacaatttttatagtctccacgtgttttacacttaccaaattctgacaactctccatttactttaagtcaacttcaaaagtcacagaactcgcttacagtataattagccaaaaacaagtctatattcctcatttatataaacatcaagaaccaaaattttgtctccgtatacctttgattacaatcgacaagcaataataggttatcaaaatcaagaaaatgtgtagaggatgtccaagttgtctcaacatcatgtgtttgagaaagaagcagcagaagaataagaagaaggagcagagtaagaaacaacacacacctgtgaaaacagaggatatggttgagccactaggaataaaagatgatgaagaagaaagcctggacaagaagatgaacatcacgggaacaatgggatatgtccggcctgaatatatgtctactaatgacagtttttatcgaaaacttggggaaggtgattcttcttcatccttgaaaaatgatttcaacaaagtgaagacctttgatttacgaggagtgaaaaaaacagaggagaagtaaggaaaaagttgggacttgatgagctttatagattactttctttctcaatattgtaaacttgtattgagccactggcctctacttttacctacttgattacatgtatgctatgtcagacttagttcaaagatgttttcaaaatcaagaataaaatcaaagtgtttagaattcagcagaggcctgagaacacgtaaaaaccacaaatatagtatttatacataaagaaatatcctttaaaatatgaatttgatattactttt

SEQ ID NO: 8201 - DNA, 1061 bp, Arabidopsis thaliana landsberg
tccagaaagccgagggttttgcgatcgattctagcacatcttcttcttttgcaaaaccatgttccttatgttcttcttcaaactctatttgaaacatcgaacttagttactcgtagtggtttaaatgacatcgcctttgaattctttaactactcattacaaaaaccagatacgttttgggaaaaacattatggtcttaaagcaaaacatccttcttgatttgatacgtaagacttttgttcctgttccgtctcaaagaagcatcaaagatcatagcagtaaatcgtcattcaatgatcatgaatatctcggatttgttctctctgccaagaagcttcatcttcggggaatcaaattcaaaccgaggaaaaacacagactcaatcttacacataagttatagtaacggtgtgctacacattcctccggtagtcatggatgattttaccgcctcgatctttttaaactgtgttgcatttgagcaattatatgctgattcatcgaaccacataacgagctacgtagctttcatggcttgtcttataaacgaagagagtgatgcagcgttccttagcgaaaggaggatcctcgagaactattttggaacagaggatgaagtgtcccggttttataaacgcattggtaaagacattgccctcgacttagagaagagttacttagcaaaggtgtttgaaggagttaacgagtatacttctcaaggattccatgttcattgtgcagaatttattcatacgcatttcgatagtccatggacatttgcatcatcatttgcagcgttgttgcttcttctgtttgcggctttgcaagtcttctttgcagcttatagttatttccgtcctccaaaagaaaagtgaaagatgctttgtaaacataaactcattgtaatgattctttaaagttaagttaagtgttttgattcttgaatctatattttggtttggtatttttctttaacacgttagattttgaatttttaaccttcaaaacgatatgttgattttctttttcgtcatttagtacgtaatagatacatctttccta

SEQ ID NO: 8202 - DNA, 1044 bp, Arabidopsis thaliana landsberg
acagtatataactcggcatcccatgcaatcatttctccaactacgtcctcaataatagtcatctcatgtacaggtctccatattggagcttctggcttggtagcagattcaattaaaaccttaactgcattaggccctagaggtatccaatgtagtaactcatcagcatcataagagacaacacggccctcaacaacattaccatcagaagaagtccagtcaaccaaattacatttaggaagtgatctggtatttacactcctatgaattgagttttcaccaacatcaggctcttgtctctgcaattccagaaacagatcaagacatataatattcctcacttagtacatttaggaattgatctagcatttactaacctggtcataaagtttttcaataatctgctctagatcctgaattatattctttatttgaatcttattggtttccattgcagccatagagcgactgttgacctgaaaacaagccaatttggacaagctcatgcctctgcccattgcacgcagtcttcctggattatcaggtcccaatatctgactaagcacatcttcctttggattagttgttgctgaatcctatgtcccttcaatatctatctcggttgcctttttctgcaaacagataacaaattaatccacaacatacattaatatataagcataatttaaaaggaacaagcataacatacaatcatttcagccgcatcgatgtgtacaggagtgccatccttcttagtacgtgactcaacccacactttcagccttgtcaccttggatggttcatcacttttttggactaattcttccctcaatctgaccattcctttacggccacaggtatgaggaatctgcttcttccttcttttcttatacgaatcacttactaccttaaattcatgactagtcttctctttgacaaacttacgccattcagccattgttacattaggtggtcgcagactcatcctgtctttcatgttatcagcttctctgacatctttggcaaggcgtgacttgaatgatc

SEQ ID NO: 8203 - DNA, 1854 bp, Arabidopsis thaliana landsberg
aagcaaagtgagtccgtggtgttcgcatactagcaaccattttccattgtttcttaaacggatcaaaccgcatgacatctttagtgacaacaggcttctgatgaggaaacgatgacaccgaaggcgcataacaacccccaatcacaagaagacaattggaaacacaaacacacgcaaaaccagaatgatgccaaccatcttgaacagctctagttctaggcaatggatgccatcgatcagcttcaggatcataagcaacccactgattcttagaacgttccgtcaacacaaacaaccagctccctgaccatccatttctagctttatagcacgagtaatcagcaccacgaactaaatctctccagcctctggaaacacattcgagcactccatgatacccatgagaaagcttcgctatgcatctcaaagccaaatcatcaggcaaacctgggattatagactgctcgattgattccctgaaaacaagtttcagccactaacgatcagacttattcaatcaataatcaacattcaatgttttaagacaaaacatgattttgaagagaaaaggtaaaggattgagatttagattcaactttgtgaaggaagaacaagagagctaacacttacatgaaccgaatcgtactcgagagattgtaaatgtatcttctgatccccttctcgaacttgctttagaacaccaaaatcgcgcttcaaagtttatcactttcccggaaacaaaaacaccattaacgataatcgaaacggaaactgcaatcagaacgatatagttatgatggaactaagcacagtcagagagaaactcaggattctggcaaggaagagaggagacggaagaaacaggcatgagatggatagatccattataatgggtcgaaaatttaaatattctttattgatcccttcatttatatgttctttctgcttcttaacgcatactttcttaaataactaatttaacccataacttttccaagataacaagttaaaaccgcgtcgttttatttcagcttcgtctttatctcatctttcttgcgacgggcccttctacccggtgcgtgacaggttgaatcattctcctccgattcacggtgattccggcgactacagactcaacatttaataagccgatctcttacatggtacgagctcggacaaattgaagaatacaaaggtccgagaaataatttggtaagcaattcgatcctttaaacgatgttatttttgtcaatccgagtcattgatgaggtattatatctgttactgaatctctctgatcttcccctgataatggacttcatgatcctgtaaatttcagattttgagccttgtgcctcaaaattgtagtcaaaggccgcgtttttgtctcaatttgtagatctttgttgttgtttctgttggatcttacgtatatatccttgatcattttaaaatttcaatggaagtgatccaggctttgattagcttttaattatataggaataatggcgtcttcatcggattcatggatgagagcatacaacgaggctttaaaactctctgaggagattaatggaatgatatcagaaagaagttcatcggctgtcacagggcctgatgctcagcgtcgtgcttcagctatacgaaggaagatcaccattttcggtaacaaattagatagtctgcagtctcttcttgctgaaattcatggaaaacctatgtaagccatttactagtccaatcctaattgcttaaatctgtaaattagacacctttaaggttagtgttaatctgaattattacttactgacacagttcagagaaagagatgaatcggcgaaaggatatggtagg

SEQ ID NO: 8204 - DNA, 1227 bp, Arabidopsis thaliana landsberg
aaaataaaaaccaaaaccatcaataaaaaaatattacccaaaaataaaacatataattgtcgttttttttaaaaaaaaatataaatgataattagtaatatacctctttatcccaatcggttcggaatgtgacaatgaccaagataatagtttgcatgagtgtgccaccaatcatccctgtccatattccctgcaccaaatcaaaccattcattttataagtctcatctttatacaccaaccaattattaatcgttgattagaatataaatcatgtaagatgaaatttaccctagctcccatatcataggtgaaaccaagaacataaccaatcggaatccccacaatgtaataacatccaatgttaacgtaagctacatatgcttgccatccacatccaacggccacacctgatttaataaattttgtcattaatcatttattcacaactaatcaattattgcatttttttgtattagtttttgttattaatttctaccagataaaacaggttgaactccattgagaactatggtaatggctaagaaaggagagagctcggcgacggcttccgcaaccgctggactatccgtaaaaatgtaactgatgacatgtcgccacgagaggatcacgatggcttcaaacaatgacagtaaaaatgacactcctgtagttaccgcagttgaaaatgctgctgatcttggatttccagcacctaattcgttactaactctcacactgtagtaaaaataaaattagtgtttagcttatgctattatattattacctctagcataaaaaaaaatgttcttaaaacgttttcatttatttattaccaacctggcagctgcgttgaatccaactgacaccatgaacgacattgcagagattgacatgctgcaaataaaaacaaattaagtaagataagttagaataagaaattatatattatggccaagtcgtaagaactagttagtaataaactttttgtctctagtgaaagagtcaataatgcacactttaataatcatggttgtaaaaccagtcgcttcaataaactaataacttgtggtctcggagtaatccacccatcattagttttcccaggcccacgagtggactcgggtcataagttatgcaacgaccgcccagcctgcgcacacaacaaaggtcggctcaaccccgcaagttcgcgtataggtcgaggccttaaaacttaagcaatata

SEQ ID NO: 8205 - DNA, 810 bp, Arabidopsis thaliana landsberg
  unsure (1)..(810): unsure at all n locations
cataacttaaaacttatataacagaaaaaagcgcgctcactattttgttaaagactcatgttttttgtggttaaatattacatgtatttgttggccaaaatgtacagtcatcaaaatgaatataaatccaagttaagtcaaattgcagttgtaagtctcatatcnnaaaaaaaaaaaaaaaaaaaaaaggagtaacagtctcaaacgtcaaaaacaaattgtgccttgcataaatcaggagttcaaaacaataaacgagaattagtggctttactgtaatgcttaactgacgccattttgagtagcatattttctttaatattaaatacataaatgcagttaaatgtaaatgtctttgttatcctttaaaatggtagtttctaagtcttttatttcatggaaaaaagtccgatgttttcttcatattaaacgctcatttcattaataaagcaagattagcagcaactaaaaaagccaatggtgcatatgagcttgtttctttcgttgggtcaaacagttgtatgtatacacaatgaaaccatcttttgcttttcggttataatcatcacaacccatttgctaatttttccctcaaatctttcctcaaaatcatctagtatatgatggagttttaagaatgaattcagtggaaaacactttgtatgtaaaaaagcgtgtgatccacataaatttacatcaatgaccatacctacaaatcaagtttcattttttgcatcattgacctaagtttacaaatatattcataaactaactaaataatatctttcttaaatatatacataatttttg

SEQ ID NO: 8206 - DNA, 1772 bp, Arabidopsis thaliana landsberg
gggttaactatggataattgtgttaagattcttgttcatcatgtacgagattttcattgggtcacaagagtttcgttgttgaagctactagtttttttcatgatcaaatacttctttgagctacttgtgattctctttacatgatctttatgtagaagataagtattgctgtgttttaattagttaggtacttgttttcaggtcaatggcctcttcttcggatccatggatcagagagtacaatgaggctttgaaactctctgaggatattaatggcatgatgtctgaaaggaatgcctccgggttaaccgggcctgatgctcaacgtcgtgcctctgcaattcgaagaaagatcaccattttggggactcgattagacagtctgcaatcccttcttgtcaaggttcctggcaagcagcatgtgtaagccattctgattctggttgcctgttcaaactcctcatgttagacaacgctaagtttcatgttggtcttgaactatgtaattatggtttatgtgtatgcaatttgctgataaacagttcggagaaagagatgaatcgtcgcaaggatatggttgggaatttgagatcaaaaacaaatcaggtggcctctgctttgaatatgtcaaactttgcaaacagagacagcttgtttggaacagatttaaagccggatgatgcgataaatagagtctctggcatggacaaccaaggaattgttgtatttcaacggcaagttatgagaggtaagatgtggtatgtaacactgttctaggaccatagtaatgatcttggcgtctgtattaatttctctttgattgtattttatttccatgagtagaacaagacgagggacttgagaagttggaggaaacagtcatgagtaccaaacacattgctctcgctgttaacgaggagctcaccctgcagacaaggcttattgtatgtctccgctgttgttcattgcttttcttgttgattttgatttcttattctaacgaaatgggactttcttccatgcaggatgacttagattacgatgtggatatcactgactctcgcttacgggtaagtatatgcttcgaacaaattagtctcattagtcactagcttaagctggtccattgataagctaaagaacaataggaaggcaagcaagtgattttaacaatatactggtctattatgtctaagaatctctcggtcgttgctttttttttttatcataaaaagcaataattttttagtttaatgtgattcacatctcgtcttggatttgatgtagcctgtttgtgtttcttgatgattgcagcgtgttcaaaagagccttgccttgatgaacaagagcatgaaaagtggttgctcatgcatgtctatgctcttgtctgtgcttggaatcgttggtcttgctcttgtaatttggctgctggttaagtacctgtaatgccaatgtggtggcaacttgtgaaagctcatccttttctctcagcctatcctctgtgcttaatggttgttttctattccttctatcgattgattcgtgtctgtgaagcaaagaaaaataccactgcgtgtaagaaaccctcagaagtacataatctgtattacctttcgatgaaccaccaattgtaaactaagttgacatttgtctatatatggtatggctcctacttggttcaaaaaagaaaactagtggcttggacaatgcagagacatattggtcaagatggcaatcatttttttataaagggaccatcaatttttttattg

SEQ ID NO: 8207 - DNA, 1756 bp, Arabidopsis thaliana landsberg
ggtttcagtcagtttgaattttgcatttctcccaccttgtacttcttgctaaggactcttgcccaaagtatctccttatcatggagaagacgccaccctactttagcaaccaacgcctacttcatctttgggctgacatatcttattccaggctaagaggtgcttcttcttcttctccaaagtactcccccaaagaaaattatgtgacaaacaatccaagctatataaagtagcaaaaggaagtattattgcactcattacatggaccggtatggttgacaaaaccgcttttgtaagcgttattctccatgccagactcaaagaccgactcttccatcccgccaagcgagacgaaacgcgttccaagacttctccagaagtctctttgttcattctcttctgtaagataggcattcccaaatacttccccaactctttagtatagccaatcccactctctccacttatgaacctttccatatccctactcacattattggagaaaaagatctttgacttctccaggctgacgttttgccctgaagcctcacaaaaccgttccaacactcgccgtatgataagaatttgggttacagacgcttctgcacatagaatcaagtcgtatgcaaaacaaatgtgtgatagtttctacccaccacacgagagtgccatcggtttccagtcccatgttcccactgatgcctctatcaagtgacaaagcctctcaaggcaaagaacgaacaaatatggtgacaaaggatccccttgtctcaaacccctagcaggaacaaaagaatcagttttttctccattccataacacactcatcgatgggtctgttaccccagccattattctgtgagtccagacctccgacagtccagtagccaccaaagtttcctgcagaaaatcccatcgaattcggtcataggccttttcaagatccaattttaacaacatccaccctttccttcctttcttcctccgcatagagtgaaccgcttcttgcactaacacaatattatcaatgcttactcgccccaggataaaattcgcttgagccggcccaatcagcttcaaaataaccttctttagccggttaaccatcatcttagtaataatcttaaacaagacattacatagactcattggtctaaactgtgtaatccgctctggcttagccactttggctatcaacacaagcaaagcatcattagtagccgctgatagcaccccagtttcaaagaaatccagtacaaagcgtatcatcgacggtcccacagtctcctaacattgctgataaaaaacaggctgaaaatcatacgggcctgatgccttaaaacgtcccataccttttactgcaatgacgacttcctcagaagtaaaaggtttgagcaacgcagccttttccccgtccgttagtgttgcaaacccgcctattggcaacatgttccatactgcgctaacatcctccaaagagtacagcctcgtatagtacttcaacgccattgtttccaactccaccttatccgtcatccatctgttatcgccatctttcagcgattctattcgattcctttttctgcggataattgtggaagtgttgtatttctgtctcccaactcaatatacttttctcttgacttctgaaaccacagcgtctcctcttgttccagaaccaagtccaagtctttcaataatataacatcttgagcaagcaactcatcggagtgcatcacatccaacaaagcctggg

SEQ ID NO: 8208 - DNA, 1651 bp, Arabidopsis thaliana landsberg
aatatttcctttatcaaccgcagcaatgaaagagtcatagacctcatgaggcatctagacaagaagagaaacacacaaatttatcaaaaatgtaaaggaaaaacgccatgaagagaagtgcacagtgtgaaaaaaggcgaccatacctgaggagccacaacagtcttcaaatagtttttcatttcaccatttgcaatggacggcactttctggccgggaacatcaactaggcaccgcacctctgtgctactaattggatacatcaaaattggtgatggatctgctaagacgacatgtccatggtttgcatatgggagattgcagttctctaggaccaacccgacaaaacaagaaggcacctcgacctgggtgaagataggaaaaatatatcctaattacttgtgaagctaatgcagttttttttttgcttctgtaatatcagcactgatatgagaaacagagatcaatattaaacagcatgttacctgaggattgcacaaagagcgacgcaggtttgagaaacaaccatcacaaactatagtcaaagctgcaaatgcggtttgttcctctcctgctttattcttatatctcacacctttgatagtcccattctcttctagaagagaaagaactgttccttgctctagctgaacactgttgagtatagatataagtagaaacagccattagcagtacacaaattgcctcatataaaaaaaatccactgactcacccaaccgagaacaatttaaagaagttatagacaagttaacacacaatgtattatgcatcttcatttactttagcataaactaatactgttactggaactgaggtcaacatcatgtaatttctagtaagtctaggtaaagcaagcaaaacgataaaaggcccaggcaattataaaggagaaaaacgtacttgggaagtgaagcagctttctcccgcattctttgaataaaacgtccattgtgaaagctccttccagatacatcttcgtgaaacttctccaaaggataagctaagcgaatgcgtttcccatttttaaaaagtgcataaccatacacacgctgagcatctatttcttccacacaatctgtagatagccctcttaatgtcattaactagtaaacaactacagagcacaatagaggtgagaacagttcccctacggattctcaacaaaatcttccttaccttcaattcccaactccagtaacttgaggtaacccccaggctgtaacaactccccaacaatacgatcaggctccgataaatctctttcaatcacatgaactcggcgtttatcctacaacataagataagatcaaatccatgattctacaacgtggcatcaaatatagctagacacaaaccagtagactgcatataataaaccaataaaataattgtccaaaggaacaaccataacagcatttaaacctgtttcgtaaagtagttggcttctaacttaacttattttagtccttaaaagtcaaagaagaacaataaattcttaacatttccccaaaattaatcaaagagtgttcgttgaccatcatgatcaacctcaagaactcgtgcattgtgtgacacaagttgttttcgaaaaaaccgacttcatgcattgtgtgccacataaataaatctc

SEQ ID NO: 8209 - DNA, 652 bp, Arabidopsis thaliana landsberg
gctacattgttatatatttaattatttatgtatttgtttgcatatattgaaacaggttcaagatgcctgaccattgcatgcccaaagatgctgcttatcaagtgatcaatgatgagttgatgcttgatggtaatcccaggcttaacctagcctcctttgtcaccacttggatggaacctgagtgtgacaaactcatcatggattctgtcaataagaactatgttgatatggatgaatatcctgtcaccactgagctccaggttcctccttctttcctctcattctctctctcatctactttccactgttttgtcatagactcatacatcttttatctggcttatttttcagaaccggtgtgtaaatatgatagcaaacttgttccatgctcccgttggagaagacgaggctgctattgggtgtggaactgttggttcatctgaggctataatgcttgctggtttggctttcaaaaggaaatggcaacataggagaaaagctcagggtctacctattgataagcctaacattgtcactggagccaatgttcaggtctaaaatatttacttattcttatcctccaaaccatcacatttgctttggatagtgatctgtttctttccaatatcaatacattttcaaactttgtttc

SEQ ID NO: 8210 - DNA, 1775 bp, Arabidopsis thaliana landsberg
aaacatcgggcttgattactttggtcgaacggtgtttattaagatccttcctgttggcatccatatggggaggctggtatcggttttgaatcttccgtcgactgcagcgaaaatgaaagagatacaagaacagtttaaggggaaaaagttgattcttggtgttgacgacatggacatctttaaaggcataagcctcaaacttatagccatggaacgtctctttgagacatattggcatatgcgaggaaaacttgtcctgattcagatagtgaacccagcacgggccacgggtaaggatgtggaagaagcaaagaaggagacatattcaactgcaaaaaggatcaatgagcgctatggttctgctggttatcagccagtgatcttgattgatcgtcttgttcctcgttacgagaagactgcttattatgctatggcagactgctgcctggtgaatgcagtaagagacggcatgaacttagttccatataaatatatcatttgcaggcaagggaccccaggaatggataaggccatggggattagccatgactcagcccggacgagcatgcttgttgtctctgagtttatcggctgctcgccttctttgagtggtgcgatcagggtgaacccatgggatgtagatgctgttgcagaagcggtaaacttagccctcactatgggtgagactgaaaagcgattaaggcacgagaaacactatcactatgtgagtactcatgatgtgggttactgggcaaagagctttatgcaggatcttgagagggcatgccgggagcattataataaacgttgttggggtattggttttggcttgagtttcagagttctgtcactgtctccgagttttaggaagctatctatcgatcacattgtctccacgtatagaaatacacagagaagggcaatatttttggactatgatggcactctcgttcctgaaagctccatcatcaaaacccctaatgccgaagtcctgtctgttctgaaatctctgtgtggagatcctaaaaacactgtgtttgttgtcagtggaagaggatgggagtctctgagcgactggctatctccatgtgaaaatcttggaatcgcagctgaacacggatacttcataaggtataaaagctagtaactgtttttctcagttacagtttctaacaagaatttgaacaaactaagacccatcctatatttgaattcaggtggagtagcaagaaagaatgggagacttgttattcgtcggctgaggcggaatggaagacgatggtagaaccggtaatgagatcatacatggacgcaaccgatggttctactatagagtacaaagagagtgctttggtttggcatcatcaagacgcagatccagactttggagcctgtcaagcaaaggagcttctagatcatctagagagtgtactcgcaaatgagcctgtagtcgtcaagagaggccaacacattgtagaggtcaaaccacaggtaacatcagagagatctattaatccttttcttttacttgcatctgagaatctgttaagaagtcgtgagtgaaccaacattcttatgtgatcgaatctgttctttatattgatgcagggagtaagcaaaggtctagcagtggaaaaggtgatacaccaaatggtagaggatggaaacccaccggacatggtgatgtgtataggagatgacagaacagacgaagacatgtttagagcatattgagcacagtgacaaacccggacctcccaatgcaacctgagatc

SEQ ID NO: 8211 - DNA, 1146 bp, Arabidopsis thaliana landsberg
ggagtctgtattagtcttgattctactgcggcgaagacgaaagagattcatgaacagtttaagggaagaagcttgttcttggtatcgatgatatgcatatatttaaagggataagcttaaagcttatagcaatggaacatctctttgagacttattggcatttgaaagggaaagttgttcttgttcagatagtgaaccctgcaagatcttctggtaaagatgttgaataagcgaagagggagacgtatgagactgcgaggaggatcaatgagcgttacggtacttctgactataagccgatagttttgatcgatcgtcttgttccacgttctgagaaaaccgcgtattatgctgcagcagattgttgcttagtgaatgcagtgagagatggtatgaacttagttccttataagtatatcgtctgcaggcaggggactcgaagtaataaggccgttgtggattcatcgcctcgcacaagcactcatgtcgtgtctgagtttattggatgctcaccttctttgagtggtgccattagggtgaatccatgggatgtggatgctgttgctgaagcagtaaactcggctcttaaaatgagtgagactgagaagcaactacggcatgagaaacattatcattatattagcactcatgatgttggttattgggcaaagagctttatgcaggatcttgagagagcgtgccgagatcattatagtaaacgttgttgggggattggttttggtttggggttcagagttttgtcactctctccaagttttaggaagctatctgtggaacacattgttccagtttatagaaaaacacagagaagagctatatttcttgattatgatggtactcttgttcctgaaagctccattgttcaagatccaagcaacgaggttgtctctgttctgaaagctctctgtgaagatctgaataacacggtgtttattgttagtggaagaggtagagagtctctgagcaattggctatctccttgtgaaaatcttggactagcagctgaacatggatacttcattaggtatgtattataaatgcagtcttgttctgactaaacttgagaatacttttttatattttggtttgtgtgtgttagatggaatagcaaagatgagtgggaga

SEQ ID NO: 8212 - DNA, 1648 bp, Arabidopsis thaliana landsberg
tacctcaacttttagtaacactaccaaagaaagattcatttatttcgtcatcggtaacacaacgactgtaatggagggaagtaactggttttgtcaactaaaagcagagaggaatagaacctttgattatgtatgataaaaatgtgaaatctttcttttcaggagttgtataaattaggagcaaggaaattcggattcttgagcttgggtccatttggttgtacaccaagcgcatcgataatagaccggacaaagataggatcttgtttcgagccagtcacagagctgatcaatctccataaccaagaattcccaagagtcttgaggcgtctagagcgccggttatccggattcaaatactttcttcatgactttcacacttccctatctcaaagaatcaacaatccttctcgttacggttttaaggaagggaagatggcatgttgcgggagtgggccgttgagaggaatcaattcatgtggattccgaaatggaccatcgcaaggttacgagttatgcgaaaacgctgatgattacgtcttctttgatccttctcatttgacggaaaaggctcatcaacagatcgcagagctgatttggagcggaccacctaatgtcactgcaccttacaatcttaaaacattgttcagactctaggcttttccaatgtaaacggtttattttttctttatcatcatatatatatgaagttgaatacagagttttacagtttacaacaacaaccatttacttatttcaaagaaacagaacagaacacgattggggtttctagatttcttgcgcaagaagatcggtcgctgctttacctacgagatcctttatattcaccggagacacgacatgtttgtctccagaataaaacagattagcgatctcttcatcggttttctcagtgttgtgacgcccgtcgaagaacagaaatgatttctggtagctgcagagcttggcatgcacgttactataaccgcacccgtatgcattcatcgatccagtaccgcagcaagaagtcgttgtatcagtatatcctaatcaccataaacatgaacattaactaaaacaaccgaatccacatgttaaaaaagttgttccatctttctataatttaattaccatggagtgatggttcatttatcctccggagaatttcaccattgaaatcaaggaggctgtaccggaagccacggtacagtatcggtacggttatcgcaacgagcaaacgactaagcctttcattgtgcgttttcaccatgaagttgaccatctccatacaattctcaccggtcttaaactcttgtctcactatcggtaaacaaccaagcggtcccaaattctgtaccgcaaacttcctcgctccacctgccctgtataaactctgcatatatccaaaacaaaattcctactacgatcaaacttgtagaagctaccaagttggatccatcaatctatcaagttgagagagttgtgaataactaaaaagtataccgtgagctctcttggtatcctttggagaacgtgggcaacttgagttagctgctccacagtattggcatttggatgagcctttgcgaaattcaagtagtcctcagctcctatgcttaccatgtatatagcttctgctcgtctttat

SEQ ID NO: 8213 - DNA, 841 bp, Arabidopsis thaliana landsberg
  unsure (1)..(841): unsure at all n locations
ctactatcaaccttgggttccttcaccttctgtctaaccatcagaaggtatttgaccaagtcattatagacatcagtatcttcagagacacgtatgacctccaagaaatgagtggcatcatcagcacggataaaggactcaattgcatcactgactagtccttccctgagttgcgccttagcgacttggctccaaacagaannnnnnnnnnnnnnnnnngcaaactcaactgcacgctcaatgctcctgacattatccagcaatacattgacagcctgaacatttaagttgaacttcttgaagatagcaaatgcttcctcatataattgggcttcaactgcgacttctccaactgcaggtccatcaaagttgtccagcctgttgatgtaatccataactctagacggatctgccttaatagctgtcaatataagcagattttgcagattgaagtttccactgaaggcagaattttgtagaacaatcttttcaagaagctcaataagctcgtgcggcaaatcagcagtcatgaatgctttaacagctgcagaaacttgctctgggctcttgctttcaggtaaagcagtagacacaacttggtcaataagctgtcttctataatcattgttttcatcgagaaccttatcccacagatcaccatccatcctctccactacatacctacaattgaaaacttgtgtattaacaaactacaaagtcaccattgtgagagtaataagaattttcgtaagtaatgataaaatacctggcttgtaacttaaacaaagagtttttgttagtgacattgatgagttcctcgtcacattgtcctcttgctgtc

SEQ ID NO: 8214 - DNA, 643 bp, Arabidopsis thaliana landsberg
tccggcttcagtactcctaactcggtgaagatacccatgtgagcacgttccagaccaagtccactctccataagggtttatcaattcattgaagcatcctctgttctggtagtactcgcttacttcttccaggtcatccacctattaaagcacaaaaatattacaaaaaggcatacaaaattgaaattgaaacccaattataactaaaaaactttctcgggaactaggatctgttatttatccacctgtatgataatgttaagtccacagatttgagccagtcggaattcctcagcatcaacacaagcaaagcagacttccttccatgtctttgcactgtttgctttccttgcagcatcaacagcaccttggaactgttgcaacttcacaagggtgacggctaacttggcccaattcgatatgaatgcatatattatctttgcagcctcatacagagcttcatcgtacaaacggtcaccaacatgttgaaggttggcaacgttgggcatcagaataaattcttcaatctcacccaacctttcaatctttgcataagcatagatgagctcactatccaccttgggttccttcaccttttgtctaaccatcagaaggtatctgaccaagtcatcatagacattag

SEQ ID NO: 8215 - DNA, 949 bp, Arabidopsis thaliana landsberg
catgcaaatacagggagaaaaaagtacgaaattacaaaaaaaagccatgtcaatgtaaagagaatcattgaatcaagaagaacgattgggggtaaattagtatttaaattggtctaagcatgaaacagcttccagccgatggtgccttatgcctcgggcaaaaaaaaagaccaaacacactaaacaaaacttacaaacaaactaacaaacattcccttcaaattcggaaaagtcagaatctcatcacctatttattacactcccataaacgctaacaaatcgttgaatagaataattaagcaggtaaaatcctaaaccgtcagagaatctctatcctctcttaaatatcactcttatctttatcctcctaaaatcttcttaattgtatctatctctttctcaaaaaccaaacactatctctcgagtatatcacaaggagatatggggaacagtgaaatgtcagcgagtgaggttgcggcggccaagcagaagaacgtcgacgattggttaccgatcacatcttccagaaacgctaagtggtggtactctgcttttcacaatgtcaccgccatggttggtgctggtgttcttagcttgccttacgctatgtccaatctcggatggtactaatttgttgaatctgataatcttaatctcctttatgttttaatccatgatctgatctgagtttttgatgtattacaggggacctggagtgacgattatggtgatgtcatggatcataacgttgtacacactgtggcaaatggtggagatgcatgagattgttccagggaagaggcttgataggtatcacgagctaggtcaacacgcttttggtgaaaagcttggcttatggatcgtcgtgccgcagcagcttatcgtggaggtcggtgttgacatcgtttatatggtcacaggaggagcatccctcaagaaaggccatcct

SEQ ID NO: 8216 - DNA, 773 bp, Arabidopsis thaliana landsberg
agtgtatcgaagcgaagatcatgatccaatatgtagttcttatatttttgcaatcggtgcaaagaaggtcatgaatttttttcaatgacttccctcccgtaaccatgtacacaatatccacacctacttcaacgattagttgttgtggcaccacgatccatagtccgagcttctccccaaacgcgtgttggcctaattcgtggtacctgtcgaacctcttccctggaaccatctcgtgcatttgcaccatctgccatagtgtgtagaatgttatcagccatgacattatcattattgtcactccaggtcccctgccatcaaaattgagtgtaatattaatattgaacgtgtatatagagattttttaatgagatatttatatatgtagctagattggatatataccatccaagattagacatggcgtaaggtaagctgagtacaccagccccgaccatggcggtgacattgtgaaacgcagagtaccaccacttggcatttctagaggatgttatcggtaaccaatcgtctacattcttctgctttgtggacgcgtccttggttggagacgattgacttttctccatcttattttggctttgaagaacagaaaaaaatgtgggacacaattagatgatgagaaccaaaaggattcaagagcaaggcaatttctttcctgaggattgaaatgtgccttgtgacaatgattattgcaaagagttctcaatttatatatacaaatttcattttcactatttttttttcccttttat

SEQ ID NO: 8217 - DNA, 1888 bp, Arabidopsis thaliana landsberg
agatcaaatcctaatacatgttcttgtaatagagcgacatggaaactaaatgaatgttcaaattatcaaagaaaacagtcttggttttcaaagataggttttaattcaatattcaagagactaagtattgctcaagttttcatatgattagtcttattcctatctcctgaatcaagccagtggaattagtcatatcgagcaattagcacttaatggtatgccccaaccaaaaccttaagaaaagttaactggcctaacttactgtaaccattcatgagatttatccaagcaagtaaaaaagagtatgcaatatacaccaaaaatctaacatagaaaaagcatgcagtaccggagtaaagtatccggtatcaggagttccatcgagattaagcgtgggagccatagccagcgtgaacttatcaccaacagccaatggataaacctcagtgttaacatctaaatgcataaacatttccaagttgtggctccttgcttcaacacgcgtaactgtgttaccacaaacacacagagacgcaatcaatttgaagtcagaacaaaaaaactttaggaggcttaaaattttaaaagttgagatctttttcacactaacttggattccaatttatctaaaacttaaaacaaacacaagaaactaggattcatatcagaaactcgatttaagccatgacaagcattacaaatcgtgactgaggttaaaaaaaaaagtagatacctttatcgaactttttgccatcagggtctagcttatcgaccacgaagatatcctcgaacatgataatattgctcgccatctacaaacacggagattcaaaccctaaacactcttaatttcatgaaaataatccgattcgactggcataaaacaactatatgagcatctggagaaatcgagaagctgaattaccttcaaaggagatagaaaagacgatttttttcaccagctccggaggctcaagaggcagagagaggaacggcggcgagaagagtgttaaggaggggcagagaagaagagaagcgagagagaaaggattttttgttttttactttttcatattattacatatattccttgtagtttggtttatttacatattttccttatagttttacttattacagaaaataccctatagatttgtgtttttccgagacattccatgtatattttgttgtttattacatatgttgcattaaaggagagatcagaagtttgaaatattggagtaggtgcatggtttgctgagtatgagcaatagttaaacactggttggtttgcaaactgatttcaatcgagcgagaaaaattgttggaaggtgagaaagtatctcttcctccaattcccacggctggttctctggttgcatcatatatttttaatggacacggtcgaaaagaaaaaaaagagtttatagatggatttgtatagcagcgttgttgtttgcttgccttgtcggtttagggtttcagaaagaaggattggaaaaccctatttcccattttactcataagtccaactttttttattaggcttttgcgaacccaataaaaaacacggccagtaatattcccattttactcaatcgtgcatgttcaagaaaaacgatcatattcatatccaaaaaagaattattactttttattggcatgattattaataattaaaaactggtgaatggttaggaaacgaataatatagagggggtggagagaagtggacgccgagagcagtgaggtggacccagagcttcttccgtaaaacccgatggccttggagcctcgttctcctcgaagcgagaagggcgtcccgttcaagcgtccgtactgtggcatcatgtctccttgcgcatccgaaatgtgatggaggtga

SEQ ID NO: 8218 - DNA, 644 bp, Arabidopsis thaliana landsberg
cgagatccaccgtaggagccaacgcaagtgtgaacttatcaccaacagccaatggatataacctctgtattaacatctaaatgcataaacatttccaagttgtggctcgtagcttgaacgcgagtaactgtaaccacaaacacaacaaaaatcattgtaggtttaagagaaagccactcaatctgaagacagaacaaaacttgggggagactaaaaacttaaaaagttaaatttttccacaaaacccacacactcagaccaaaaaaggataaacggaagaactcattcacaatacatacatgaactaaacagctatgaacaaacgtcgatgtaagccatgagaagtactagaaatcgtgagtgaggctaataaagtgtatacctttatcgaactttttgccatcagggtctaactgatcgaccacgaagatatcctcgaacaagatgatattgctcgccatctgcaaacacggaaattcaaaccctaaacactctttatttccttgataaaaccccaattaaaccagtaaacaagacctatatggacatctaatgagtacaagaatccgaactctgaaaaaaacttataaacaacccatcgcataggaaagtaaatagttccgaaccaggagcttaagtttagg

SEQ ID NO: 8219 - DNA, 1385 bp, Arabidopsis thaliana landsberg
gttaaacacaaacaaaatcgattctacagcctaactacaatcgaacgatctccacatgaataaacgaaatctgtaacagtcaactcgacgaaaaaccaaggaaatcgaaaacttacgccaatcggagcatgataggagcacagttcttgttcgcgatgagagaacggagctcacggcgagccttagtgatctctttcaagtactccgcatcaacaatcggtgcagccatagctcctactcgtttaggatttgtgaagaagaaagagagcgatgaacaagaaaatggtcaaggatgtgtgtgaagattttttttggttacaccgaaatttgggccaaagagataaaaccacccaatgagaaacgggatttgaatgggcggtgtcagttatctcctgttttcctcagccacatctttcggtggacctcattggctttttagatacgattgttggcacgtgacttgcatgtcattttgttacacaaaaaacggcacacgagtttgctagttatttgttaaacagcgtgcatgttcattccttaaattttgtaaaatggaaacattgaataaaaatggacataaaccattattttttccggtgatttatgttttctggatcatattcgaatatattactcgtgtattagagttaaattgaagaaatcaaatacaaacagaacgacaaaaatcgatgtcacaacactttgaaattggtctactaaacacaatacatgaaccatatgtaatgtgatgatatacactcttcagttcttcttcccacgaccacacttgacttgcacggcaagcatcttcacaacgttcttacatgaatccttcttgtcttgttgaaacgtgctcttgttcaccggaatcacacattcagctttccccaaacaatgctgcaatagattttttttattggttactcctatcataaggtacaaactatatagcaagaagaaacaagatataatattttaccttctcgatgacttgctttgaaacaggagcattacaagtaccaagtgtgaagtttccacaaacaccaatagggtttccgaagctagcgaactcaactgctgcgatcttcttagtgcctgagcatttaagagtagccgtgagactcacgttatctgtgatggcttgaacttgatctttcttcctagtccagtgtctaacacttggagtgtagttttctccaacgtaagaacaaacagtgtctctgttaacgatggcaaagtccataagctcaggcttcacattaggctcttcctcaaagataacaagaaggttcttcttgggctttaagaaagatctagggatgtgatactctatttgtgtaggttgacctaatggagacaagaacgattgccaatatcttccaacg

SEQ ID NO: 8220 - DNA, 1030 bp, Arabidopsis thaliana landsberg
cgaattgttgctgcgcttacgctctctggtgcatcaaagtatgtctgcaatgtttcacattccttagaaacttctacatatcataccaatcatactctgtatagtttgatttttgtttttgtctcttacctggtaccatgtaagtcctggtgcttttccggtgaattttttccattcgaccttctttaaaccttcctcagtgtggattccaagtttttcaccttccataccgatctaatgatcgaaaaaaacggatcagaagaaggaaatgcatactcaatgttgaaatacaataacggagaaattgtttataaaccttgtttccccatttgctgctctcagtgagatcaagtgttccagaagtcaatcctaagatggaaataccacgaggaccggtgtatctatgctccatgtaagatccactgtcctgtaagaaccaaaaatcccaaacattaacgaaacaaatcttcatctatagatattgaattatgtttgttaattacttactgggaatcctgtgagaacaccaagcattacaagatgattctctcctgcttttagtgtaacctgtttttggaaaacaaaactcttctcttcgtggcttccatgtccacttcctgttaagaagatatcattattatagctcattgttgtagtacttgtagatcattcttgcacaaattcttaccaaggtattctccgttaagccaagcgtgcaacgcgtgtccaagactagcaatcctcacaaaagtcttaactcctttcttggtaggtaagtgattcttgtgaaccttgaagctgcaaagcaaaattcaacttcaaaattctcttcttttatatattcaataaacaatcacataaaagtaaattctttaccttgttgtgtaccatccatagtctgtcttgtctttagtcaaaccataaagctcaacgggtatgtatgagttaccttcgagtttactaggcaatgtctctgtgaaaactttgaaatcaaacttctcgttgccttttagacttataaagttccttg

SEQ ID NO: 8221 - DNA, 1037 bp, Arabidopsis thaliana landsberg
aaaggtgagtagtaaatagatgaaaaatagaacttacctttggtatgatgaacgtgttggttatcaggcaaaaagctgtaagcatacaataggcgaggagcgggatggatgtaattggatagactatggtattgatgtaggcaattctctccaaaagtttcaacctcccattatagccataccatatagggcaatgtctactcagaagaatctcgatagaccccaaagcccatcgaagaacttggttcaaacgatcagagagattgatgggtgcggatcccttgaacgcagggcgtgaaggaacacagtagattgatatccaaccccttgcatgcatcttgaatccagtaagaatatcttctgtcacagaaccgtagatccacccgatctaaaagtccaaaatatgaaaagattatcaaatagaaaacaaaagaatggcattgttgtttggacagtctactaaaacctctgacctctttgccccaatcagtcttggcctcataaccacagcttatgacatgaatcgcctccttgagaagagtcaaggggttggttgttgatggaagacctccttgttccatgaaggtagctgcaataaacactggcgactggccaaaacgcttttctagccttttctgggatactagaagagacatctcatcctcatagcctgcaagaacaagaacattcagtgaaattttctttacatgcgcaataatgtgatcacatagaggatgtgacagccagaccttcaacgtcctcgtcaatgtcttccatattgaaaagtggaacgttggagtcacttctcttaatgcttctgttatcttcatagttaggtatttttctactctttcctttcttcctcgagccaaaacagctctttacaattatattaggctcaagatcttcctctgttagaacaggatcatacccatacaaggcctgcctgttgaaacagcagccagtgcccacatacacaggaccttgtataccatctaaacccttcaagtgatctgcacacatagtacacatctgag

SEQ ID NO: 8222 - DNA, 1054 bp, Arabidopsis thaliana landsberg
ttaagaaactctctgtaatggtgtcaccgagtctcattgtggaatcaacttcactcccatctctctcagcttcaacagcatgagggttcacaggcaagaataggtaaaccacaatgccaagaaacgtaatgagcaaagccggaccaacaaaagaccatccccaaccaaacttcaaaagccccgtagcgattaaagtcccaatgatattccctaatgatgtatgagcactccaaacacccataatgactcctctcctcttcttatcaaaccagttccccaaaaccgcaaccacgcaaggccatccaatagactgaaaccaccctgccaatgtctgaatcgcaaggaaatagtagaaagcatggatattggcccaaaaagcgactccaaacagagcagtacacactcctgtcccgaccatacctattgttagaaacgtcctgaggtccaaacgatcacccaaatgaccagccacaaacattccaaccgcgtaaacagagaggaaagccaaatcgatttgtccaagcagagctgttccatctggaccatcgaaaggagcccatccacctttatctgcacccttgaaatgtccggttggttgttcagagagtgttcctttgacgatgctgttaggctttcgtgttgcgtggaaggcaatataagcaatgaaggtcaagacaaagaccattgcttgatattgcttgaaagagagttttcctgaacgcctgaaacgttctaggaaatgaatacctggtggttttacttcttcatagaggaattcagatgaagtccacgacgccatgtctaaagcttcttctcacgtgaccaaaaaaacctgaatagagagatcaagacaacaaaaagtcaaaagacaaaaccaactagaatcactcagaggacaatttaagaacaatcttaaacatgagattgcctcattcaacacacaaattttaatgaactatgaaatttgaagagaagagaaaaaatctctacttctctgttttttctgcaacttaatgctaggaaggaaataagcactactatatagttagggaac

SEQ ID NO: 8223 - DNA, 2290 bp, Arabidopsis thaliana landsberg
cgttacttgtttgatgataatggcgtcattgcctctgcagatgctcatcaagaatcagattctagcagcgttgttgacaaaacggagaaggagcataatttaagtggatccatttgtgatttggagaaagatgttgatgagcaagaatgtaaagatgctaacattgataaagatgctcgtgaaggtatcagtgctgatgtttgggaagatgcttcgaatggtgctcttagtgctggcagtgagaatgaagcagctgatgtaacagagaataatggtgggaactttgaagatggatcttcggaagagaagattgaacgtttagagacgaggatcgagaaacttgaagaggagcttagagaagttgctgcactcgagatttcgctctattctgttgtgccggaccattgtagctctgctcacaagcttcatacgcctgctcggcgtatttctagaatctacatccatgcctgtaagcattttactcagggaaagcgtgctacgatcgctagaaactctgtatctggtcttgttttggttgccaaatcttgtgggaatgatgtttcgaggtacacatattctatttgacatgtgagtgaaatttcaggatcttgattcttctcagttgtgagtctaaacaaatgttctgttgttttctcttggttcacattttttaggttgaccttctggttatcaaacatcatagctttgaggcagataatttcgcaagcatttggtaggtctcgcatcacacaaatctctgaaccaaatgagagtggtaatagtgattcagggaagaaaacgaacctgagatggaagaatggtttccaacagcttttggaggattggcaagaaactgaaacatttactactgcacttgagaaaatcgagttttgggtattctctagaatagtggagtctgtttggtggcaggtatatatataccaaatgtcctaactaaaaaaatgagcttcttagttagttgatgaagcatctcacttatgttctgcttcttctcctatctttaaggtctttactcctcatatgcaatcacctgaagacgactcatcagcaagtaaatcaaatgggaaactgatgggaccttccttgggtgatcagaaccaaggaatcttttcgataagcctatggaaaaatgctttccgagatgctctgcaacggctttgtcctatgcgaggagcgggacacgaatgcggttgcttacctgtattggctagaatggtaatcagattttccatatgttttagttcaagccaattcataagaatcatattcttatatcgtctttaaacaggttatggacaagtgtatcggtagattcgatgtagccatgtttaatgctattctccgcgaatcagaacatcagattccaactgatcctgtctctgatcctattcttgattccaaagttctgcctattcctgctggagacttaagctttggatcaggggcacaacttaaaaacgcggtaaacaacacgaaacaaagttcatattttcatagccattagaaacttggtaatgttgattaatctaatgacacaatagttcccttgcagattggcaattggtctagatgcctcactgaaatgtttggcatgaactctgatgattcttcagcgaaagaaaaacgaaacagtgaagatgatcatgtagaaagtaaagcctttgttttactaaatgaacttagtgatcttcttatgctcccaaaagacatgctgatggaaatatccattagagaagaggtttgtttgggatacatatctcagttactctttgtttatcggataagcccatcctatacatatttcagttactctttgtttttaaaacagatatgcccatcaatcagtcttccactcatcaaaagaatactctgcaacttcactcctgatgagttctgtccagatcaagtacccggagctgtcctagaagagcttaatgctgcagaggtacaaataattcagagtttggattcagtttgttctcataatcccaagaagtaaaatttgtaaacttcatttttttgttatatttccagagcattggtgataggaagctatcagaagcaagcttcccttatgcagcttcttctgtttcttacatgcctccatcgaccatggatatagcagaaaaagttgcagaggcttcagcaaaattgtcaaggaatgtgtctatgatacagagaaaagggtacacaagcgacgaggagcttaaggaactggactctcctcttacatccattgttgacaaagcgagtgacttcactggttcag

SEQ ID NO: 8224 - DNA, 1071 bp, Arabidopsis thaliana landsberg
ttactttttcagatacctcaaagtcaatatttcttgggcttagccacaaaaattggtattccgttgttacacatctcatcaatagaaaaatgtggataagtaatgaaaggaaaaacatagaaagcaacatcaggattgctgaacttaccgagcaaccatagattccaaacaacccggtgtcgttaaagatgctagtgaatgcagtgcatgactgaacctcctgatattcgtttagaacacggcgatctgtaaccagacataagaacttgtatcactattactgatagcttatcagtgcgagagtatggtccgtgaactagttcaataaacaaaactagaataggccaaaaagaaatacaagatttgacttacaaagccacgagtgcattcctttttcaggacctcccgcatagaatgagccacctgctcccataagcatctaatagcaattagattacattttattactttttcgccagaaaaaaaaatttgatcgaaacaagtgaaagttaaagcaaccaaaaagtaaaattcaattagacacctgtagaacagtggcggtgactgcttctttctcgttattccagccaggcacctcgaaagcaaccgcaaagtgtgtagcctgaaaatggaacaacaaaagctcaataagaaatgtgacatagaaacaccttcatctcagacacacttgtccagtgatgggaaatctgtcatgaatacctacctctccaccagtatgttggcgaaaatctccaccgacatactgagattttggagccaattggggtggtacattaggaaggtcagaagttaatggctcagcaacttttaaaagttcctcatgttctactccacttgccgccaataccatccgtgcagcagtgaaattctcctgaaattcccagataaattgagtcaaaaagacaaataaataggattgtaattttgaaatcgctgagacgtagatggttcacaaaagctcatgcattcttacactcacaaactcttccaagagctccccattcaaacaatctaaagcagactccggtgcgtacagaggacttgccaatg

SEQ ID NO: 8225 - DNA, 1615 bp, Arabidopsis thaliana landsberg
gagcattctttattctcaagaagattttcaataagtatgagtttttcagccttctttcccaactcttcagtgaggttgagcactcaaataaaatagcagagaagtcagtgcacagagagtgaaagagagaaactttatatgacattattccaatcaagtaaaaccaagctcagggtacatgactacatattctataaataggaatatcgcaatgccactcaagctaaaaactttgtttatgtaatggaagcttaaagtgtaagggcataaacctcttcaacagccttctctatttgtcgttcagacaacctcaaagctttgatttcagcttgtccttcagataattccctatccttatctgtataaccaagtcattgtttcaaacacaagaagcaaagtactaatccaaaaaccaatctcaaattccattgtcaaatcatcaacaaaatcacatttctcgtacctctgacttcattctccagccgatttaactcaattctcacgggatctgagccatggagaaggttcatgaactcgttatccgcgtcaaagcttggtctcattgacctccgtcgtgacatgcctttgcttcctccttctcgataagaagccgatatagccaatgaaggtgacataaatcctctttcctccattacttccgatctcaatcctcaccacaattcaaaattgaaccaaaatgctaaagttgtaaattagatcggtatatatcagaaaacaaacgaagaggacaacactacaaagctcatcaaatgcttgggcttaagagaagaagagaacacttcttgtttttgttttgttttgttttgcagagagatagagagatttaaatgaggtttaagggtatggttgttaaagagtgacaacgatagagactgattagcgtcactgttaattactgtttaattgtgtgctcctctttgattttattaactagtttcataaggagaaattgggtaattagcaatgaagtagtacattcttgtccaaaagaaattatcataacactggtgtttcgtagaaatatggttaatttacattgaagggattagggaccatctgtatttattttgtatgtgttgtcaaattattagggaccatcccattttgtccaaacatgtacgacaaatgtaaaatcactagacaccatgtctcatgattctaactaaaatgacacaacttctattctggttttttttttctcaatcaaatttcagatttaactttggtgtacattcatgttattttcccctttttttttttttatcatcacgcataatatatttgtatagattaattttcgttgaatttgatactgtattcatttcttgaagatactagtagtatatagtgaagaaatcaatgtaagaggagacaagaatctttgagctttaatgagccgaacatgtccctaagtccggaccacggtcaaaccaactaatctcaaattttgagctgtttctttacattatattatatcttagtttcatactttcattgtattacgttattcatctaaacacatttcattaacgtagttacgtttcttttgttttctaccgtcttttacattattcatctaaacaaatttaactat

SEQ ID NO: 8226 - DNA, 891 bp, Arabidopsis thaliana landsberg
gcgcgcttttgtagctacatagacgaacggacccgcaatttgcagaactgttcacctgaaaaatctccggagcatgttaatgacgagaagcaatcatcaacagaggcaaaagagactaacattgaaccaacggaagctaaggtccaagacatttgctaggtgtaatcaaccttgaagctctcttttccacttccatcttcaaatcaaatcttagtagctaaatcgtcctacgtgtagttgcaatagcttctcagttctcccagtcgcccttttttcataattccggattgaattttgggacataagttttaaatacattcatttgttgtttgtggtatgctggtataaatatattcattttaaggtggtgggatacatacaagacataaatggtgtatatagttcattaatctctaagctagtaagtaaatgattctcttggataccctcaggtttataatatatgaattttatgaagaattctttctacaacatttgttttttcttgacaattagcttcttaacccatacccattctaggcaaacaacatgtttatatattaaaacgttaataagtgcctacagcatcggtttgtgcgaccagaataagccacgccatataaattgggtgtttatataaatttagatcaaataatgacacgatgttctaaaaatgcctcatctcgtttgtaacctcataaaaccgtcgacaaatggattaattctttaaacggagggaaaccaaacacagaagaaaaaagaacacacaacactctactgatagcttacgccttcaccgttgacaacctcttctacgcgatacgcaacatagtctccatttttgactccttctagtatacaagaaactgtctttggactaactaccataac

SEQ ID NO: 8227 - DNA, 1457 bp, Arabidopsis thaliana landsberg
atattagcatctatagtcttttgatcaatacatatgaataaatctaaaattagatttccaatcttccaaatgtccaaacttttaatgaaaaaaatctaaaactcattattcatttccaaaaaaagaaccaaatctgggttgaaataaatatacacaaacacgtggactgactagaatctaacaatgttaaaagcatagaacgataaatgatgaagccaatgtcattgagactcatagccagttgcccagttcattcgctgagaatacgagcctacaaaacgacgtaggttcgtagcttttgaatttaggacagaaaatgacacgtagatagttcagaatggtccacgtgggagaacgaggaaaaagtaggacccaaacacattcatggatccgaccgctcgtctctttttacgaatgctttcactttcatccacactcttaattttttatacacaaacctttttaattcttaaaaacacaaaacatattaatattagttaatgctaacaccaaaaacatgaaaattagataaaactatttacttatatttaacagaaattaattattaaaaataatgacaacaaccccatgttttattaatttttaataatatttttttcctccttttttctgttatttttatttatttatttctcgtttaatggagtttttctagtgggagagtattgcgttctctctcacctttaatctgtcttctatctctctctctgcccaaagagaagcccaaaaaaaaaaaaaacttttgtctttcccttaatttctctaattttccctcgatttctctggcatcaacagtctcattctcattgatctttcttttttgtagcgagaaagatccatttttttcggttcgttctcttctgggttacgaatcaaagagctacacagacacagacacacactgtttcctgtttctccccggattgcaaacagaactagggtttgttttcacaaattttggatcttttttttgaagaaaagaacaaaatttggatgaaaggaaaccagaaagactcgtcggaaaaaccgatatgggatcggagctcatcaagtacatctatacccggaatgtggtctttaacccgacccggtccaaaacttatggtttggcttatctgtttcattgtcttcacttacattatctacatgcttaagcttgtctctacctcacgctcctgtgacgattccacttctttcaccaccgtctctgctctctccacaaacgtctcttcaaatgtctcgtctttatccacctccttagcttcacggcggcgtaattgggaggaggaagaagaagacacggtggtggataagctgacggatcttaaccacgtggtgtttgggatcgctgcgtcgtctaagctatggaaacagaggaaagagtatatcaagatctggtataaaccaaaacgcatgcgttgcgacgtttggttaga

SEQ ID NO: 8228 - DNA, 2505 bp, Arabidopsis thaliana landsberg
  unsure (1)..(2505): unsure at all n locations
gttctatgaatactaatcattttgatgaggtaaatggaaaagaagtaggattagctccagccttaatgaattgtgttggaaacgaggatatcatcaagtgtgtcagttttccatctggattttctaataggcggattgagtcgaacatgtagcattaatcaaccaggcaataatctaaagaatagagatcataattccaaacaaaattttgactcaataaaacgactcaaaaaaaagaaaaaaaagagtaagaataagactcaaaaagaaaaacatagttagtaactgcctcccccagacttaaacgacactgtccccagtggcactcaaatccagagtaagcgagaaaaataaaagaaaaacgaaaaataaaagaaaaagagaaagaaaaccataccagtgggttgcctcccactaagcgcttgtttagagtcaatagcttgactttgatggagtttggggatcaggtggatcaaatggaggaaggaaatacttcctagtaaaaccccgcatcatccatggtggcgtatgcgcagttggtgtctgtgctctaccaaggaagtgaggaatgtcagcagggcaggacagaagtatgggtggtctactccgctttcctacacaatcatcaaaagaaagaacaagcagtcgacgaaaaactcgtggcttgcttaaccgtaaaacagtttttggagatttgaaactcttattgatgaaattttgaggtttaggaggaggagatgagtacatttgccgtttcggaggtggagcaaagagtagaggtgcagtgggagacgtgactgtagtgcgtggagtatcagcactgaactcaacctgaaagctagctctaacaaagaactccggcttagcctgtgtgaggtgtcgatcgacacaggtggtggtgtcgatcaacaccattgctnnnnnnnnnnnnnnnnnnnnnnnnnnnnnnctgcgtctgatggttgcttgcttgtaccatgaacatcagctatctcaacatcaatctattgttcattgacactatcatctgttgttgacgctttggtgttaagcttgctcgatttcgctccttcaaacgttgaatcatggtctgttcctgatgagtgtcgattgacaccaaggtcgtgtcggtcaacactgagacttggtgttgagtggttctgtaaatcagtgtcgcaagtagtcgtgtggggtttctcagaggtctggtgctgaatttcactccttgactgaactacaataacatcctctttgttgaatcgagcattcaagtcttgtatatcatcatacagaccatcaatcctttcattcgttatcacttggctcctgagaatctattatagcatgtattccatcatattcgtagaagtgggtggagggtgggcttggtgagtagaatacctggaatgactagcatagaacatatctggcgtgttatagtcatcaagttgaatagcacgtccatctgcaatagttgcagctctatatcctctttggtgtcgagcgacacctaggtggtgtcgaattgacgaagtgcaagcctagtatggtggatatgacagcctttagaatgaactattgggtgttcaagacagactctgtcaatccgaatcggctgtcgatgcttcgaacaaccaactcgtcgagctcgacttcaaatacaaggcgcttgtcaggctaagggattccgaattggcaaagtcagcctcgaaggctagaaaagaggttaaagatcacggaatggagctgatcgagggggccatccgctttattcaaactgagaaggctcaatcgcagctcgaatcggacatcaaggagtataagagcaacctactctagttggattagagtcatgatgacgattttcttgaggagcaagagagatccaagctgaatgccactttgaaagacaaaaaagaacgtcttgcggcacttcccacgtcttctttttatcccagcacttcgcggaattcttcaaagcttatcacatatctgccttgtgattgatttgactacttttcttaggttcaagcgatttggctgaacctgtttagcccgaggtgcctgacactttggcaccgatccttgaacctagcgctgctcaaggcgaagtgcctctagttgagaacgatgagcaggtaatgactctgaatgatggtcacgccatcaaaactgggccggaactctgttctgaacaagatcctaccaaggactcatcctaggttgagctagctgtggatgaatccgagatggctgccaacccacagtaaccgtgtccacttcaaaattgaggtgtgtcccaaaaaatttgaaaacttaaatttcgaacaagttcacttcgcctatggaggcttatttttatttttattttttttgaacaagttgtttgcttgagaaaggctttaaacctttcaaatttccgatccctagaaggtttttttatttaaacaatgaaatgcgggttggcgaagtctgcattcttagatttcgaccttgtggttatac

SEQ ID NO: 8229 - DNA, 1403 bp, Arabidopsis thaliana landsberg
acttgttgtttacaaccatcttgctcttcctatccagtatgtattagacaccactttgttgtttcttaatcctttcctagtagaattgctttatttatgtaagatctccccctggtagtatcttgtttgccattgataaggacatatagcctgttcttcttctaaatgtcttcaattacttttcttctgcctgctattgtttacaactgcagaggttatagttctcatggtaccattttagacttgtgattaagccagagtattttgtgtattggaattagaactattattgcaatttctgaggtttattcatgatttttctttgattatacataaacaaacttttgatcttttgttgctaaacttgttgttcttgctggggtatgcagttcgcctggtcagacgtaccaaatccaacactgtactcctttctgggctgaccggaagtggaaagactgtgctcttttaccaagtgagtgttttggcttgacgttacctttttcatatgaatattgtttatgactttccttcaaatgtactttttttttgtaatgtgtcactattgtgagtcagtgtgagtgactaggtcattgttggagagttataacacgataattgtttgattggcagctccgagatggatcgtcgcatcagggcactgtaacatcaatggaaccaaatgaaggcacttttgttcttcacagtgaaaatactaaggtaaagaatcttactgtgttctgttgtaaacaacacgtgcagttgattgtgatggatggaataacatattactaaaccatgtcccgtgcttgctctttgtgacagaaaggaaaaatcaagcctgttcatcttgttgatgttcctgggcactctcggcttcgacccaagctagaagaattcttgccccaagcagctgccattgtgttcgtagtggatgccttggagttcctcccaaactgtcgtgcagcttcagagtaatttcaaacaccctctctcttccacacacacgcattgtaagacacagataagagacatgtttgcatctcaatgttgaaaatgaggcattgccatggttttttatggtgataggtacctatacgagattctgaccaatgcgaatgttgtcaagaagaagattccagtcctcctttgctgtaacaagaccgataaactcactgcacacaccaaggagtttatccggaagcaaatggagaaagaaatgtaagaatttcagttttcttgacaaaattttcttatatataaagcctatcttcctgcataaaagctaatcatcattggttgatgagtttttgcagtgagaaactgaccgcttcccggagtgcagtctctactgctgatataaagaaaaacttcaccattggaattgagggagaagtgttctcctt

SEQ ID NO: 8230 - DNA, 842 bp, Arabidopsis thaliana landsberg
gctcacagccaagaacaagtggggttttgcagctgttgacttagtcaacaaatatgaacatcgttatctatcgagcttgctcaagcttgatgcagaccaaattcgaaatcctcaagcccggagtaaattaggaactaaaccccaaactcatacagtgatacaaacatatgatccccaacttctgtatatgatgaatagtgtcaagaagcaaatcaagacagatcttccaaacagggaacgtgagatgcacgcagaggcattacagagcgcaaggaacacaatcacaatagtagcggtcttgattgcaacagttgctttcacatgcagtattaatcctcccggtggcgtctatcaagaaggacctgccataggaaaatcgactgtgggaagaacgttggccttcaaaatcttttcgataagcaacaacatcgcgttattcacatcgctatgcattgtcattcttctggtcagcatcataccttacaggacgaaaccactcatgaaattcttggttataacacataggatgatgtggatagttgttacatccatggttacttcttatgtttcatccgcttgaataactgtagcgcctcttggagtccaaaagtggttgttttacgtcattcctgctatctctagctcgacattggtaggcttgtttgtctatctgggtatatatactggtcacacacatgtctaagaagcccgagtgcaagacaaacatgtcctctgttcctgtagttcctacgactagtgtagttccaaagactagtggaggagacaattggactagtgcagcctcaaacacaggtgcggctgcagcgcaaggagtattacat

SEQ ID NO: 8231 - DNA, 1451 bp, Arabidopsis thaliana landsberg
tgcctttaccactagttaaagaaaaaaaactctgtttcatactctgtttgtttttatctaaacatgttggtaaaattgattagaagtttcaggaaacgttgatatatacctgagaggacgacgagatcttgaatggacaagcctttggaagagaaggcatcgatcatttgatcgagagtaaaatctgtgtcgatgatgttcggtcttacgtttgcagccatcgattctttcccgtctctcctccctgtcggaatctcaaccaccggtcctcctgcctgtcccgccaaagaagaaaaacattcaaaccttaataaggataaccggtttaatgtatctacaactccggttatatttggttcattgtgtagtctatgcgaaaatgatacagaattggtttgtttctttttttcgatttcatgtgtatgctttcggttcagttgggattggttaaaccggattagagcaatatagattgaagtgaagtgggagtgaagtaaatgttacagcttcgacggcgtctctagcagcaagtgcaactatgtcagcgcaagaaacagtggccggacataaattctcgatggcattcttggctgtgtctatgactgagaatcctccaagagatgcgtttccgggatcgcttttctctgtgctattcccttgtatcaacactgatgcatcacaacccttgcaagttcaaccaacaaacaaagtttaagccaaattgtttgaactttcctcagtaattcgtaattagtgcgtgttacctggacgaaacagtcgtggaagaaaagacgaaggagtttcccggggatcgttggatcggaggaggtagctgatctaacggtgtttctgactagaaactcggctacagaacaagaactagcatagaaattaaaggagaggttggcggaggaagtgagaagactagacagaaacataaggagatgaagaagagtggaacagtttattctgtaagaggacgccatttttattgtctctgtgttttgactcgaataaagtgacaatgaaaatagaaaggagaatgagaggaatcttgaaggttgttgtaataaactgcaactgttcacttcataatttgcatttgatgttagtgtcagagatagaaaattagttgaggtgatgaagttgagtcaacgcattcaatgaagagtcattgatggtcgtgtttagttgaatccaacattcccagcatcatccatggttttaagtgaatccgacatacttatctatgggttttgtcggcgagtaacttcccaagccaatgcatgccagagaacttgtggaagaaaaggtgatcaactttcttgaatactggatgaaacattaatatctaactttttatttctccaagacatttttatgattcacttttctttaatatcacaaataaaacttatgctgattctaaaaaatgaacaagaaaacctggt

SEQ ID NO: 8232 - DNA, 1412 bp, Arabidopsis thaliana landsberg
agttttgatcgccgacccaaaaatggcctaactggtcattcctgaaaacaaagaagttcaatgtcattataattctatttttcgccagacatatcaagagaactttatttccatagctcagtatcaatatcagaaaatttcgaccaaaactgaaattgagaaatttgaataagtcccaaagcttcaaagacaaaagaagacagaataagtcattccactgaactcatcaactagaatccaattcgagaataactcaactctatagaatctgaattccatagatcaacttggacaaattcccaatcttatcggcaaaaacagatatgaggaatcgaagttatcgtaccagcgttagcgaagagaagagtaggatcattatgaggaacaacggggcttgatggccagaacttgtggcctttgcctctgaagaaatcgacataagtatcccggactctctttgctggccactgagtctccgatggttcggaacccggcatgactgcgacggaggaagacgtcgacgaaggggaagaaaaacggaagtgagagaaaaaagggcggcggagatgggaagagtaaaaaaccctagacggaggtttggttgaagaaatcagaagagaagctgccttcactaatctcattcaaaccaataaaagaccttctctctctcctcctatcctattttctaccgttaaaatttatttaatccgattccttttccgcaagatatattattttaagggataatacttaaaaaataaaaaaagtaaatttggaaaatacattttgttcatcaaaggataacataaaaaaaaaaacgagagtaaattttggttctcgtttagataaactgttgggtttgctgccactagccgtgagcccgtgagactgcctcgcatgttattgtttgtttcgttgttgttgttgctgttgtcgttgccgcaagttttgaatttgttttgctgctactgttgcaaatttttgtattcgtttctcagataatactatagttttacacgtaatttttttttttccaatcaaccaaatgtaattctaatatatttttgttacttgaatttttttcatatttgagtttttctctttttattatgtggattgatatgatctatatatataaattattcttattcttgttaaatattaatctaaatactatttttatagtatagaaaatgaatgatattattttgatgtaaactacctaaaattttataacaataatgagtttttacgctattgatcaaattgggttggatggatttctgttacatattggttacagttattaaaagggaaaaatgttatttaataccccaactttcaaattatgacagttttatacgtcaactttatatatgggcattttaaacatgacgttatcgcccgaccac

SEQ ID NO: 8233 - DNA, 1121 bp, Arabidopsis thaliana landsberg
aacaatctttaggtgttaccaatttaaaccggtagagagaaacttcaagtgtacacaaagacagaaatagtatgactagatagcaaatggaggaagccagtaaggggcggtcagagcgcttggtgcacctttgggagctttataatgatgtgcctctccggtagtgagatcgtaaaaaccaaagccacgtcccatataatagacgcagttaggcttgaggccgaggcaggagctagccgggatacagaaagcctcgttgcttgcaaggaaaatgcacatgtctccaatgtcctcggtgtaacacataatttttccttccgtcgtctcctcttctctaaaaaccatcaacctctttgttttgtggtagattccttttaaatttgacgaaaagaagccaagcgcatacctgcacgtaggaaagcacacgcttattctcagtattttcaatgaatttactttacttgtataactatgagtgtatatatagatagaataccatttgactaggaaacggtcaccaccagaaggtgactccacaaggtattccgtcctggaacatgaactcaaaagctcccactcggactgatccaacactggatggtctcgatagaacaactcatggagcccaggggagtcatctgatttgaagtggaggtcataggagaacaagtagttgcctccaggggcaggtaagtaaaatttttggtctcttttggaatacatgagacttgagttgtgtccaaacagttgaaaggggttacaatgttagtccactcaaggtcacaaccgggtctgcacagactcagctggatacccgaaaacttgatagccactacacagtcttcctcaccaagaggagaagaggaggacatggctacgttaaaaactttttcggtttggccagtgggcagagccgtaagcctaggcagaggaatcatgacagggtttgttttggatgccaaaggattgaaaatgtcgctgatacgtacggaacgatcagtccggtcccagaaaaatccccatccatgggaagctcccatcatttcttcatccatgagctcttcgggaattgtgttgtccgggcccgaaaatatctcctccttggtcgggtcaaacaaaag

SEQ ID NO: 8234 - DNA, 842 bp, Arabidopsis thaliana landsberg
aaactccgtggaaatcaagctgtcattgcaaaatatgtggcaagagttttgtgtgttctcaaggtttaggtaatcacaaaagagttcgcagagagattagcgggaaattagcgtgtaaaaggaagtacactgaagactataatccattctctgactcattaaaagctaagaagattgttaaaaaaccatcaagctttgaagtctctcaggaggagaagatcttacattgtgttgagttaaaacaagacttcggtgaactgcttgctcactcgggtttcgacaagtctattagttgcagcaaatcgatcaaagtgaaaaaagtagcgcgtaaaaatgagaaaactgaagatagtacttcactgtttggcgtgattgactcagaagctagcaagtttgcttcactaccatcaagcattgaaatctatcatgagaagaccttccattgtgttgagtcaaaacaagacttcagtgaactgttttctcgctagtctactagttgaatctttttctcttctaagtacagaagttgcagatgtatacttaacattttcctcttgcttggttcaaatacagtttctttggttaactcatgttttcagatacagaaccaatccaaagttcaaaattgattacttaaaccaattaattggtttagcgattagggagcaccaagtttatgatacgcgtgagtgtaggatataactatcctctgtcttctttcttttgcataatagactcattagctttcacaacaagtaaatttctccattgttgtctgtcaatagcttaaatcgaaagcgatacttacaactctgcgataagtaaaaaaaaagtgttcttta

SEQ ID NO: 8235 - DNA, 1178 bp, Arabidopsis thaliana landsberg
attcatctgatgtagcaaaatcgagttaaataaatatatatactttcaagttttgtggttacagccatgagaaagttggatcatgtgcctacatttgacacattgacgccacattttgttgtttgcgagagacttgagcttcaagtcatcaactagagggtcagggtgaagtttcttgtaatcatcatacgataaatcagtatgcgatggtactttgcaatcaatgcagaatagtccacaacatttgacacatgtcctaacattggataagtcggcttcactggatagttcggttttggacatcagcatcgagcagtttggatatgggcaatatattctctccgcagcgggaatggagtcttctttcatcttttgtttccacatctcaataagctttagtgtcaacactttactacatctttcaagggtgagcttaaacttgcatccatattcaaggcatgtgggctcagttccgctacgcagcttcactttcacatgttgtttcacacaagaaaagcaatgacggtgaaggcatttctcggtaacgaacccatgtgctctacatcggtttcttcaaaaaatatgccacaagtctctccttgttctgcgttcacatcaacgctgtttctgcctatggcttctcttgcaagtctaaaagcaaacttaacatcgttccatgcaaccaaaacagcgtcaatacaggccattttttctaaaatgccttgaacttcttccacaagatggtcaatcttctttttagacttccctctaccaattatctgcaatgaaaatcagatatattctccttagactaagacaatatatcatcaccgtcaaagtcgtaatcatcattactcttctaagattctacaataattactagttttgaattgaaaaaaagctcaagttactagttgtaaggtggtttttggttttttatttcattgaaaatatattttcttacccttcaagatattaaaaaaattagaatttccaacgattttggaaaactaatattttattttgaatgggttcttcatgttttaaagaatactaaaaaccatgattttcaagtttttggggaaaactatttttttcacaagaattgttccatctctggattttttaactttactgttattttataacctatagcaaaaacgaaaccaaaatttaaa

SEQ ID NO: 8236 - DNA, 910 bp, Arabidopsis thaliana landsberg
  unsure (1)..(910): unsure at all n locations
cgaccttcttcatcagaatagtaattacatgtatttacttttaaatcatattccggttcattataagcatagggatcataataaccatgtcccgttagtaggcaaccagaagagcaagtcttttggtcattcttccattcaacctcacattggtaacaaaactgatatccacatctacacaatgaatgcacaaagtttaacattacgaaatgaaagtactcgaatgatgtagaataatcgagttaaataaatatatacctgcaagtcatgtggttgcaggcatgagaaagttcgatcatgtgcctacacattttacactgacgccattttttgtcctttgctagagactttagcttcaactcatcaactagagggtcatggtgaagttttttgtactcagaacacgacaaatcagaatgtgatggtactttgcaatcaatgcagaagagtccacaacatttgacacaagaacggtcattggataggttggattcactagaaagctcggttttggacattagcattgagcagtttggatatgggcaatagattctctctgcagcgggaatcgagtcctctttcatcttttgtttccacatctcaatcagctctaatgtcaaaaccttgctacagctttcaagggtgagcttaaacttgcatccatcatcaaggcatgtgggcacagttccgcttaggagcttcacttccacatactgtttcacacaaggaaagcaatgacggtgaacgcannnnnnnnnnnnnnnnnnnntgcgctcgccctcggtttcttcaaaacaaatgctacatatctctgccttcacatcgtcccttgaaactatggcttctcttgcaagtttaaaagcaaaattaacatcgttaagggcaatcaaatcagcgtcagtataggtca

SEQ ID NO: 8237 - DNA, 631 bp, Arabidopsis thaliana landsberg
tcccatttgtaatttacttcttctttgttttgttttctaaattacacagaaatttaagtttgatgaaataaaaaagagctaccgtgcgctagtgctttttccatcatctaaattacactgagaaaaaggttgaaataaaaaactaacaatgaaagaaaccccaaaggtgttactacctactagaaaccccaaaggcctatagtgtctcaaaattcttaaaaatatcagatggaatgtatttcaaaacaaactaatgtctttgatgatccaagcagaaattaaagagaataataatccctgaaaaagttctcatcaaagcctccagaaaacagttaaaccgccataattgttgtagtcgtcccaattgtcatcatttccatcagcattctcttcttcactgaaaaactgctcagtattccacatcctgatcatctctcggcgcgtcatagcttcaagaaccatataacaaagtcaaatacaacaatacagtgcaagtttaagaaacaaaggagtaaataagaaagttaacatcatttttggatttgccatttgctgatcaatatattcttcatagctaggccaacgacgaccttcttcatcagaatagtaattacatgtatctacttcaaaa

SEQ ID NO: 8238 - DNA, 1007 bp, Arabidopsis thaliana landsberg
  unsure (1)..(1007): unsure at all n locations
agtaacaaaaacgatagggaaaagtaatgttatcggaaaagtagtactattaaaaaaaaaaaagaagtatttttgttgatctctagacctcataagatacaaagaattgagaaaagagtgtttcataacaactatggatattcagcatatacgaccagtccaccatgagcatacaaatcatcccaatcatcttcattcaccatcataaaaataaccttggccagtacgtggacaaccagtaggacaagtcacttgacccttcttccattcaactccacatttgtagcaaaattgatacccacatctacaaaggccacaacgacattacaataaaacataaacgttttgtctctagttatgtcttaattgagttaaatatgtattatatgtacctgcaagtcatgtggttgcacccttggttaagctcaatcaagtgtcgacacttgacacattggcgccatttttgatcgtttgctagaagctttagcgtcaagtcatcaagtacagggtcagggtgaagtttcttgtactcagcacacgataaatcagaatgcgatggtactttacaatcaatgcaaacgagtccagaacatttgatacatgcacagtcattggatttattagaccgagaaatctcggttttggacatcaatgttgaacagtttatatatgggcaatagattctnnnnnnnnnnnnnnnnnnnnnnnnnnncatcatgtgtttccatagctcaatcaccttaggtttcaaaaccttgaaacagttttcaagacttagctttaacttacattcatagtcaagacatgtaggcacagttccgtttcgcagtttcacttctactaactgattaacacaaggatagcaatgacggtgaagacatttatccattacgaacatgcgatcggccttggtttcttccagacaaatgacacaagtttcaccaaaaatctctgaggccctactggtttgagaaacaattgcctctcttgcaagtttaaaagcaaac

SEQ ID NO: 8239 - DNA, 2706 bp, Arabidopsis thaliana landsberg
tgctttattctgttctgttacttttctctgcagcaattgtttctcagccatgaaacttatgcatttatgtttatcttcttgtttacttcattaggtaagagggttatctgacctgttgaaaacaaacttggagaagggtatacacggggatgatgatgacatattgaaaaggaaatctgcttttggatcaaacacataccctcagaagaaagggaggagtttctgggtattaatactttagaatttttgctttgtagcagcttccattaactgtgagatttttcagctaattactattttgttccttcctttttttttcctcatgtccgatagaggtttgtatgggaagcttctcaagatcttactttgatcatactgattgtagcagcagttgcttctttggcattgggaataaagaccgaggtatgcaatttaagaactaatacagtatatttggctcagcgcctaccttgaaaattttaagtcctttttctatgtggcatagctttagaacaatcgacaaataattatagaaacaagacttccagagtttctgtacctcagtatttgaatgagttatgtctttctcgtgtccatatcgttgacgctcgataccacgtctattgactatcctttactttgtcattgtactcattctaagctttcctgctctaagagggcagaaagttgttctctctccattgtccaaagtttcacagttttctttgttcttcctgagcttttggtacctctttggctgccttcttagggtatcgaaaagggatggtacgatggtatcagcattgcttttgccgttcttcttgtcattgtggtgacaggtattgatattccttgctgatttcactcatacaagtgactgctgcgtgtattgtactaatttgtatacctcttcccttggcagctaccagtgattatcggcaatctcttcaattccagaacttaaatgaagagaaaagaaatatacgtctagaggtgagagcttggttgatcatgcagctcatagataattccatttttgttggtttaatttttaaaaatgcatcgtgtatatgtgcaggtaacccgtgatgggagaagagtggagatttcaatttatgacattgtagtaggcgatgtcatacccctcaatattggtgatcaggcaagttgcatgattttgtcaatgcagtatttcttagctcttttccgaatttcagtatagctataatttatgtttgatctgccaataatttccataggtacctgcggatggagttttagttgctggacattcccttgcagttgatgagtccagcatgactggagagagcaaaattgtatactttattctcttccttagcatttgcaacaaataccatctttgcatttcatgtgttctgaaaaagctgtttctcgcaggttcaaaaaaactctactaagcatccattcctaatgtctggctgtaaagttgcagatggcaatgggacaatgttggtaagacttaacgaacattaacttatactatctgtgacatagtggctcaaacaaactgtaaactgtagtttctgtagaaaaaattatgagatgtttaattggtgaacaatgatatccgtagttggttcccaccaaaaagaaagatatccatggttggtgaattgtgcagtttttcgtgtttttatttatggcgttcaaaacttctgatttggctagtttcttcccacatttcttatgtgtgtaattttttttttgaaaatcaggttactggggtaggggtcaacactgaatggggcttactaatggctagcgtctcagaggacaatggtggagaaacaccattgcaggtgagtatcaacttttctctgttcatatattcgtggtttttgttgctcaatagtcatccgtactatgctttcttcaggtgcgcttgaatggtgtagcaacatttatcgggattgtcgggctcacagttgctggcgttgtattatttgtcctagttgtccggtgcgtttcatgttctttatatcacctccgcccggagttgaaagtgggccagcgattcctaaaaagagataaacctcagtcaactacagcatcaatcagaaaaattatgaaaaaaaaatccttacaaggaaaagtaataacccaagcaactaatgtaagtgaataagataacttgaattgaaaccatcaactggttctacaaagctatccaataaatatcaaggtcgcaaattgacagtgagtatactatttacactacatataaaagataatcaactcaacccattgcaatgcagatcaatcacattttgtaaaatatgagtcaaaacaaaaatcatccagaatttttactacacacctaaccatagtgtcagtcaaaatcgttaatgcatataaaacaaatggtataaaattaaaaatcacttaatctctatgaaaatgaaagagaacatatacatgcttcacaaaatgggatggagagaagaaaattaaggaaaagaacaagaaaatgaaagaaattaccagtcacgcggcttgcaactgctttaaaaaagtgtgcaccctacgaaagcaaaccgcattgataagacaccactaagaacgttatttaagttaaaacttactaacgaggcttatatactcttaatgcttgagcgtgcgctctcatctttctcagcatctggttcttatcttcttcccttttta

SEQ ID NO: 8240 - DNA, 2804 bp, Arabidopsis thaliana landsberg
ggattctaatgggcggcctttgtctatgggaacattcactgtgctgtcctacaatatattgtctgaggcatgtgctagcagcgacatatacagttactgccccacatgggctctcgcttggacataccgtagacagaatttgttacgggaaattgtcaagtaccgtgcagatatagtttgtctacaagaggtatgttaaatatttatggcacaagttgtactgacttggaaacgtttcaattgctagttaatggataaatacctctccaatattttcgtttttcatcttgcaggtacagaatgatcattttgaggagttttttcttcctgagctggataaacacggataccaaggtctttttaagaggaaaacaaatgaggtttgcttcaacgcatccccttgatcttccattaccttttcgtggtcacttatctgcaagatgtaccaaccagaaaatattgattcactggataattttaggttttcatcggtaatacaaacacaattgatgggtgcgctactttcttcagaagagacaggttctcacatgtaaaaaaatatgaggtatgtcttagttttctcctgttacctatctaattaggcccatttgctaaatcattgggctgctcatccaggttgagttcaacaaggctgcacagtctttgactgaggctattatccctgtttcccagaagaaaaatgctttgaatcggttggtcaaggtactctgagatgctctatagtatgatttctgttttccgcacattcttggtgatattttttcatgtaaaactgatttagagtctttctttttaggataatgttgctttaatagttgtactggaagcaaaattcggtagccaggctgctgacaatcctgggaagcgccagctactttgtgtggtaagttgtccatcttttcaatattgttctttattgtcagagatgatgctagagttgaagttatgtgtttccacttcctcttctcctttaaaggtctcgaggtgatcatgttttctctcttttcatgtatttgatgggtgcaggctaacacgcatgtaaacgttcctcatgaattgaaagatgtaaagctgtggcaggttggtctttatttctcattgtaaaagaactctcagatttcggattcttacatcactattgatccataatgattcttgcccaaataggttcacacattattgaagggactggagaaaatagctgccagtgcagatattccaatgcttgtgtgtggagatttcaacacagtacctgcgaggtctggctggttttcctatttgttatgcccaagtagcaattgtcaaactctatattaaattatgattgtggtttctacctgaattaacttggagttccttcttaatattttcagtgctcctcatacacttcttgctgtgggaaaggtcgatccattgcacccagatttgatggttgatcctcttggaattttacgtcctcacagcaagcttactcatcagctgccactggtaattatctttcccaaaaatggaaaacagatgcacagaatcgtgaaaggcagacttcaattttaattagaatggcaacatatgcgtagacatcatacctttgtgaccattgcaggttagtgcctactcacaatttgcaaaaatgggaggcaacgttattactgagcagcaacgtagaagactggatcctgcatcaagtgaaccgttgtttaccaactgtaccagggactttataggcacacttgattacatattttacacaggttaacttaagtgcttactttcaggggttttacgcgccagtgtttgctttcatctcagatttctttttcatctggtaagcaatttgctttttgttttgtttcagcggacacgctaacagtggaatcgttgttggaactgttggatgaagagtccttgaggaaggacacagctcttccatctccagaatggtcttctgatcacattgcacttttggctgaatttcgctgcatgcccagggccagacgaaacaatattttatagagatactgcagctgtaataacccgataccaaagactggttccaatggatatggttaagctacatgaagtagatagcatggccatgtcctggggtttctcccgttgggtttttcgcttgcgttctattctgtatcacagttttatttactgcttggttcgcttggcttttctttctatagttatttcctctttgccagaaagttttgtcttcactggcttgtgattgtaacaatgtaaacaattagattcttcaagaaaatagtgacttcaccttttccatattaaaatctgtgtcttctatggttgcaatcctccttacactcttaaccctacagcttaaccatcaattttctagtctcttcacttgtagatatcttgcagatactgtgaaaacgaactgtgaacaacttgatatattttatatgtacccctccaataactgaagatgatccaaattccaaaactcaaatttcaattcagaaattagacatgttaaccagtactcattatataatccttttaaatcaagtttcttgcagacttagaactctcgagtatccctataactagagagggaaacatatgtgaacaagaaacaagtcttataaaaagccacattaagttcttactctgctgcattaactgatggctagattcatggcttacaatcaaaatccacaaatgttggctctatgcataacagtagcagtaatgttccttggtgtgagatcagaattgagtcaggatataaagggatgtcaggatgcgat

SEQ ID NO: 8241 - DNA, 1937 bp, Arabidopsis thaliana landsberg
acaccagccataatgatgtcattatagcgtgaaagaacacgagcaacatcacgagtttcctcccgcttacctatctgtatgtcattgggacctagatataacgcatggccaccgagcaagaaaaaaccagtctcaaacgaaacccgagtcctcatggaaggttttgcaaagatcatagacatagacttccctttaaaaggtagataatttctctcccctgatttcagcaaggccttaacctctgaagccttgtctaaaatcgttttaatggtggctgtgtcaaaatcatctattgccagaaagtctttcaggtcagattttcctgcaaaaaattaaaatcttatcatctcacaatccactggaaatgaatctctagatgaaagcatctaaaagtatcaaacttgcgtagtttctcaatcaatagaggcaataatgagtcacattttcggatgctaaaatcaaaatccgataccaacatacaaatttcataaacaaaatctgatctttggggaagtttccgaaagaaatgataatgaaatgcctaaaaggctaacctttgacatcggaaggagaagaaggcgaagtgacggaggaggcttgacatgaaacacgaaggcgagggagagcaggagaagggagtgaaacggcggagaatctccgaagagtagtaccggggaagaaggaggaagacgaagaagagaaggaaagagccggtgatcgagccgtcgaaacatgagaagccattgcagccgccatcgtcttaattcagagagagttgttgactctgtgagtgacactgcgctttacctttataagagagacaccgatgacattttttcttattgggctttttccactaggcccattttcaattctatgtataaaaaggtttatttatttttcaacttgccctaatttgtgaccatcttccttgagcttgttgttccgatgaagacggtcaccggaagagttaacagtgcaaagccaatctctctatcaaaggcggctactcttctctccggattcgtttcttctgagaatggagcctctcaagataacagcgcgtaccttcgacgagcttccggtgcctttattgaattgaagagcatccatagggagattaaatcaaaggagacgaagctaagctctaagaagaagaggaagagtcatcgagagatgggttcggaagagaggaagaagagtaagaaaaagagaaaatccagcgagattgttgtttgaagttgatcaaaaaattgtagtggaattaagaaaagctttcaaattttgtgggaatgttgttgtagttgaaagatgttcacttggtgagaaagatttgatttttagaattctcttgtttatagtttctgttatctgcattgaaattattgttaaggttcaaaactttggattttgtggagaaactacattggtcacaaatctgagatgaccaagaaaaaacaactcttctgcgccaatttgcgactctggcctatacgtaattgtttcaatgacattcttcatattgttaaacaaaggcatcaggcggcgcttgttccggaatctgcacaacaaaagcaacaaattaatctaagagcaataatttttttggaaacaacttaaatgattagttttgagcaatttacctcccctggattccatttctcctttagccagatactactatcaacaggatcaccacctatttgcagctcggttctgccgcaaatgattcaagttagaaacgtatgaaacatcatagtatgttttgattaactctgtcaacatgttcaacaacggtttttaactatagaaaaaacctggaaacagattgaggacttacccggaagatgtatttgtcgtgtttatagcaggagcagtaaaagatgcaacagggacattgaagttgaatgcggcctgaatgttctgggaagtgtttg

SEQ ID NO: 8242 - DNA, 441 bp, Arabidopsis thaliana landsberg
  unsure (1)..(441): unsure at all n locations
tggacaatatacacttgcatatagtagcttgccnnnnnnnnnnnnnnnnnnnnnnnnnnngaggtgggccaggcgggtgggacgacaaaaccactctgctataaacgtctgctgcatacatatgtgagcagactggggacagagggtgacaatggggcgcgttcgctcagccaaggggtgaagtgacaagtcgtggttcgtattttcgggactgccgcaagagttgcgctactcacatagagcagcgaggaggtcgaagaccccaaccttaagtgcctgacctaaacagacagtctgcgtccgctgcatcagtcaaaacagaaggactgattacgggagtctcaaacgctgtatcagcatatgttgatggaggcccagtgctcaatgaggatacaggagccaagcgtttcgtacatccatacgagctgtttcaccagccgc

SEQ ID NO: 8243 - DNA, 2047 bp, Arabidopsis thaliana landsberg
cagcaaaccgttggtggtttgggggggggtggagccatagatccactaaattgtcaagcgtcagcgttgggatcaccgcttctcccatacactttatctgtatctgaacataaaccataagtatgtccattttttatcaaccaaacatataagttccattatattcaaacgttctatcctttctcgtgccatagtgcatataaagacccttacctgattttcactctcgagatctagcttcctcatgaggtacttttggatgaaagaaactgttgtatttccatccctatcacagaatgagacattggattatcttccccaacaaaagaattcctcataacagaaaaatgagggactatgtaagatgcagcgacaacacaggatatataaaacaaagaatacctaaactgtcaacctaccttattctcaaaaaatttgctggaatttgaggtaaagaagttcctccttccctgtaaccagtaagcccttgtcaatataccaagagaagagaaacaaaatgaagaaagagagaaagatcatgaaaggaaatagtttcagatatgagagcaaaaatctcactgatcattggacgccacaagtgagaaccaaacgggaccatttctcctctcctgttttgcacttgactcatctggttgtggcaaattccttgaatcgcctaaagtggtggcagaccttttgcgttgagttgtacgcattcttttaggagtaacagtttctgatgttgtaggatcaccattattactgttgtcatcctcacgtttacattttctctttttattcttagttttggttttactcccttgaaattgattgcgagatacattcgcgtgctcagattttgaacctgacccttgagaagcagaagacttcaagggctttgtcccatttgccacttcaaccagaaagttcaaaggtttccaatccattttggaatcacagggttcatcaccatccttgttttctttattggagatggactctttacatgactgcaaaaaacaaaataactcaaatgaatgtgagaccaataacagtatcaaatatttttactgaatatttacttttgaagtgtaccaaacaaaaataaatatgtaaccaaatcatgtcaaatatgaagtcattacgagaaaatagagtagttcagtgatcaccttctttgactgtcttttattctgagtgaatttgttaagagtgtcgggtgagcttgtgctctccagaagctcatccccagaagattcttccttcttcacagttctctcagccaaagaaccattacgtaactctcttcttgtttgtgctttagatcttcttctcgttgttccagcttgtgctgacaccataggtgtgctcacaaccaaagaagatatagatctctccttcctctttcctggtaaggacacaattccaggagctttcacttttcttcgttttagagcaaagattttggccctcaagtcttgcaaattgtggtcaggcctaaaaccatgcacacaagtggctcccatcagtacaataacgagtaagaaaaaggaaagtacaaaagagatctatttagattctcctacaacatcctataaatggtctctctctcataaaaaccattgtgctacgtgtattaaatgaacaagattccagagattgtgttatagcagttcatttcaccaacaagaaaagcaattggattgagtccacaaattagatgaacaaggagcaaagaaatttaaccaaactaaaccatattttgatgagaactggtagagtctgaaatacagaacacgaatagcttacctcagcttctccaatggggtgctaccgaggtcgatattgcatacgggacaagtctctatctcatcctccgtgatcttctcatagatgcatttcctacaaactgcgtgcgaaagtaatctaaaaagttattccattccagtagatagcaactaacaacatgacttaaaataaatgtgagcaaatttcatacttggaataagaaaaaactcaaattggattgcatacaagataagaagct

SEQ ID NO: 8244 - DNA, 1201 bp, Arabidopsis thaliana landsberg
  unsure (1)..(1201): unsure at all n locations
actgttaccaggtgcagcaagccttaaaacaggaaaggagaaacggtcatgtttggttctcacttgtagcgtcaagtaatcagtgagattcctgttctgtatctgagactctgagtacttctgatattcaatattttctgtgtcttttcatttctatctcttagtgacacggctttactggtttcagggaaggagaagcatcattgcctcagattccagcaaactacttgagaataaggtaagttgttctttttgctttgctctgtttcttgtcactaagtttttatatgtcaactgtgaagtctgtgatcaaatattacttattattgcattgatggctttgaattcgatttcgcagttgttttacccgagtttccatgtcatgtttgttttctgtggtatacgtttcttgataaagccttcttcttttttggcccatcacacctaatccttgactgggaggtgtctattttcttgtttgggagaattatattgtgccagagttgatcccctgtctcattatatggtagggatggaaatattccagtttcttttatccaaaagtacctcatgaggaagcttgatctcaagagtgaacatgagctaagcaatcttatcttatgcagcggctacttttctgttttatatgaagtatccactcggtctaatatcgaatcacataagaccgtatgttctatacattggttcaagtcttgtgcgtatcattgtgactgtaaggtccccataaatgtttaaactaaagttaactctcccttttatttccgacttgtgtaccgggtgatatcttatgatctgggactttttcgacccaccggtgttgaaccttaactactctatgttttttttttgtaaacaggnnnnnnnnnnnnnnnnnnnnnnnnnnnnnnnnnnnacgttgcagcttcacagcttagtagacctatggttggaaacaacttctaagcatcaaagagtcgctgcgtcaataggttcatctgcaaaggaatttgtaatggtgctagtttattctcggaagctccctggatgcaacaactaaagagctattcattgaatcttttctagaccgagaagaaagaaaagtgcatgagcagtggaatgtcttgtgtagaaagaaacttagcaatttatatttatttaattgtaatcttaaaatttgaaagatcggtgggagacagacact

SEQ ID NO: 8245 - DNA, 2284 bp, Arabidopsis thaliana landsberg
tctctataacaaaactcaaaacgtttagaaaagataagtaaaccttcactaataaaagagggttgactccaactacccaaaatggtagattaacgaacgatccagctggtaatcttgaaaagtgtagattacttttatgaatcctcctaaaaggctaaatcccaaattccagcaaaccccacgaaagcagtcgtttggttgagctgccaactatttaagtttaaaatcatttatgtcttggttagaaaatttgaaattccactaaagaaagtcttatctttctgttgacaaaaaaaacaaaagtcttatctttcttatctcagacttctaatttgatttttccttttcgaatttggtttgaaattattgtttcatttgtctccgtattttattctatatctcggaatattttaatactaattatttttcgtcaagaattcaaaaaagcttttactaataatatggacacaaagtgaggcctaatttgatctatgcattaactcaagcgagagcatattaacaacattagcacaaacttaatgagactttcttcaataattataaccaactcgatattattcgactccaatatttttatattgtacaaacgaaattaaagcttcttaaaacaacattttagaccaaacaaaatatatcttcagtctccggattatattcagtctccggattataaagggttttatagtaaccctctttcacagagaacagttttcatcgctttcagtgattcttccatatcatcacaaatcgtttccaataaactgttaaaataaattatcattagtaattcttccatatcttccttcactctgtaactgcctaaataaataaattaatgaaatttctacaaacattcaaacattatatatttttcataaatgcaaaatcaaatatctaaatgactcttttgcagaaatcaatgaattgagacaatctacaatcaaaagggttaaaacaagagagaccacacattgtctttcttcacgacccaaagaacataacaaaaaaaacataactttatatgtatgtctccttcaatcgcccactctacgttccctgtgaccctgtacaatgtttcttcacatggggaacaatgaagaagtctctacctcatgaacaaaacgagtatacaatagagagaattcttccttttctccattacttgcgtagatttccggcatctcaatcgtgtaatgtgtatcttcttccatgaagataatactatcagtgccttaccggcctgtgtatttgcaggaggaatcaactttgctgctgaggaatttggtaaacgataccttcgagatgattacagttacgggtatctgtttgatcggtttggatcaaaccacctcggagttgatgggtctttacgtgaactccatccttccctccagtttcttctactgctgtgttaaggatacttatctgtgtctgctccagatgtgctgcttccatcacgtctcttttgcgaattatgcatctcttcttcaagatcatactgagaacgctgcaaaagcaccacaacataaaaatataaatatactataggagactctaggggtgcgtgcacaaatccttgagaagcaaaacaaatgttatattcacagaagacttttatcatctttcttggtccattgaaaaatattctctctaagagaaaacaaaaacagagctgaggattgttatcggtgaagatatttttacctttgcagggtctgaaagcacagcatacgcttccccaatcattttaaataatttatcggtatctttgcgcacttcttcccctatctccttccataacctctcatctttagtctcgtttcttgtcaaagactgaccagccttcgaatagtgaaaacaagataaaatgaatttatgtaactaattatcgtctgtagctctttgctttctgcatttaaattgttctaggtgaatccacaagcatgcaaagatgacagtttctattaaataccttgtcgggatgatgtttgagtgcggccttcctatatgcctttctgatatctgaagccgagcatgatggtacaacacccctgccacaaagtaagtaagtcccattctggttagcaagctttgacacaataatcacatccatgccacaaggttcttcctcaaagtcacccaagttttcatgaaaaaaccagtttcacccgcaaaaatcagaatcacaaaggaacaacactacaacagatatgtgcagtctaaacctacgtcttttttaggaaatgggaatcggcatgctttg

SEQ ID NO: 8246 - DNA, 2045 bp, Arabidopsis thaliana landsberg
ttacagattcttcagcttagagaacatgaacgggtctgacccgacccggataatggatccagacggttgcactcccattacaagaaatgcgcagtcacactagatcaaagggagaaggagaaccactgagtccgagtcttgccttttggtattttttttgttttcaataactaaaaataaaacctccgaaaaattcccaaatttacaaaagaaaaagggcaaaaaagaaacaatatttccgggtcaaagaaattggagactgacagaagcaatgtgattccacaaaatacgaaaaccctttttacgtttttgtgatagaatctattaagaaatttgaagagtgacacagaagcaatgtgaaattctagggtttagagaaagacacacgaaacacagagagaaagagacgataacaacgacaagaaactatacgggaaacaaaaatctgaagtttgaggatgaaagaaagtgaaagctcactgagaagaaaagatctgagtggaagcggagaatatggtacaaattctggagacaaattagagaagggcaaacaaaaaaaaaagctgactttccctgtatgtgtcatatagagagaagaagcgttaggtgcataagtggatgaagctaaaagtgttggtagacattatgatgaaagatagtgtggctgctgggaatcgagcccaggtccctacggccacaacgtggaatactaaccattgtattacagccactttgttatacattcaaagtttctatatttagcgaataaccattgactcttcgcttgtatctttccgttgagatttaagtaaaatcattaactctctgccttcttccacttcctccactaaaaaccatctttaatcataattaaacctcaaaaatcctttcattatcacagtattataaatagcagctcttaccgaatactctaaaccatcacacaatacaacacaaaatctttaaaagaaaacacaatgacttctaacaaaagtttcctctttgtcaccgtcactcttctcctcgttctcaatgtctccagcagatcactcccgcccgtggcggattccaccaacatagcggctagacttaccggaggaggactgatgcagtgttgggatgcactctacgagctgaagtcatgtactaatgagatcgttctcttctttctcaatggtgagaccaaactcgggtccggttgctgcaacgccgttgacgttattaccactgattgttggccagcgatgcttacttctcttggctttacatctgaggaaaccaatgtcctccgtggtttctgtcaatctccgaattctggcggttcttctccagctccttcccctgtcaaactttgataaatgttcctcgctgacgtatgaagacattagttatggttataatatatagtttttattaatggtatgatgagagaatgtctgttcactgattttgagtttggaataaaagcatttgcgtttggtttatcattgcgtttatacaaggacagagatccactgagctgaattaaaaccattatcagaacaaaataaaccattttttgttaagaatcagagcatagtaaacaacagaaacaacctaagagaggtaacttgtccaagaagatagctaataatatctattttagaaaagttatcatagtttgtaagtcacaaaagatgcaaataacagagaaactaggagacttgagaatatacattcttgtatatttgtattcgagattgtgaaaatttgaccataagtttaagttcttaaaaagatatatctgatctagatgatggttatagactgtaatttaccacatgtttaatgatggatagtgacacacatgacacatcgacaacactatagcatcttatatagattacaacatgaaattttttctgtaatacatgtatttgtaacataattgaaaagatcctaagaaatatatttatagaaggagtttaaagaaaacatagcataaagttcaatgagtagtaaaaaccatatacagtatatagcataaagtttatgagtttattaca

SEQ ID NO: 8247 - DNA, 767 bp, Arabidopsis thaliana landsberg
atttaaaacgccatatgagttgagagaacacttggctcactcgttgttcttgaccgtgattggggttaacgactatgcattcttctatactaggttaaccgatgcgaatgatttcgcagacgaacttcttcataagttcttgaaaaaaatagaggtaaaagggtattcacaaattatttacttacgtgtaataatgttaatcaagatacatcctactaaagactttgattttttgttgtagaaattgcataagttaggagcaagaaagttcttcatcaacaacattaaaccattaggttgttacccaaatatagtagctaagacggtaccacgcggaagctgcgacgaacgtataaaccttgctataagcatttacaacgaaaagcttagaagaagcctgcctgttatgaagaaaaaattaaacaacacttcttttttatactctgattacttcaagttcatgttgggactaagaggaccttcgaccaatcaacatagttcgaatctattgaacacgacaggcccgtgttgtcctttagattatgatggaagtttaacttcaagttgcaagcgcaggtcaaaaacgtgtaaagcaccagattctactcatattttctttgatccgcgtcatccgactcagttggcgaatttcatgtactccattgcgtgtttcgacgagagaactatttgtcatgtcgtgtgatttaaatttaacaccaatttagttgttgtttatttctttccgcatgactttttttgaacacttt

SEQ ID NO: 8248 - DNA, 558 bp, Arabidopsis thaliana landsberg
  unsure (1)..(558): unsure at all n locations
tccatgaagaacttaaagatggttttcttaagatcctctttatctctttaatggcaggagtattcatgttatgatctaagancaacgtagaagatctccaaaagttctccctccaccatacacagaacaacctccaaaccataagccttctattgtttcttgtcgttattgtgtggatcctctacatgttaacccgacctaaacccgtttaccttgttgatttctcctgctaccttccaccgtcgcatctcaaggtcagtatccaaaccctaatgggacacgcaagacgtgcaagagaagcaggcatgtgttggaagaacaaagagagcgaccatttagttgacttccaggagaagattcttgaacgttccggtcttggtcaagaaacctacatccccgagggtcttcagtgcttcccacttcagcaaggcatgggtgcttcacgtaaagagacggaagaagtaatcttcggagctcttgacaatctttntcgcaacactggtgttaaacctgatgatatcggtatattggtggtgaattctagcacgtttaatccac

SEQ ID NO: 8249 - DNA, 1822 bp, Arabidopsis thaliana landsberg
aaccaaaaaaagtttgttggccgacaaaagtttaatccttccaaatttcacatgggcaaaatacttttcttgggggaaaccacgcaattcgcatacatgtaattcgccaaattgagtcggatgaaacgggatcaaaaaaaaatatgagtatggggtgccttacacgcgatcgaaccagggcttgcaacttgtcaattgacctccatcataaacgttagggcaacatgggcttgtcacgttcaatagactcgaaccaacttgattgcttgaaggtcctcttagtcccaacatgtagttgtagtaatccgagtataaaaaggatgttttgatgaatttttgcgtcatacgagacagactttttctaagcttagtgttgaaaatgctgaccgcaaagttcaaagcatcattgcagcttccacgtggcacggtcttagctacaacatttgggtaacatcctaatggtttaatgttgttgatgaagaacttccttgctcctaacttgtgcaatctctgcaacaaaaatcaaaatctttttagttaaatgtgtcttagtagtggccaagaaaaaaatgaaatgtttttagtttcctcttacttctatttgaagcaagtaatcatgaagaagcttgtttgcaaactcattcgcatcggttgtttcattaaataagaatgtgtagtcgttaaccccaatggcgatcataaacaacgattcagccaagtgttcacggagctcggacttcttgaagttcttcttcagattgtttgtgatggtctcctggaacatatcgacttggacacttaacgagagacatgttccctgttcatacaaataaaacccattagactactttttcttttgaaaccaataatgcaaatatttttttgtagaatattactaaaacttactatttgccttcctgtctgaggaagaatcccacagccagcagaagcatagttaataccagttgagatactattcttttcttcttgagataatcccaaataagcaggaaccaaaggaagaccatagtagatagctgaatcaaatgaacataacaggaacacgtttaagacttcttcaataatttaaatataagaaatggactatatcagaaatatatatataaacaaattatatatatactaataattcgtatgtgacaatattatattttacgtagttaatcacacgatagaacataaatccttataaaagagttagtaatttaaaacattatcatgattctttttttgctcttaccaatgtaatcagcaattgttttgccattgctgaaacggccggtggctttgccaccttcaaagtccgaaccataaggtggaaaattcgatttgaccatcgttgtaagatgattattgtttcctgaatcaaccaatgaatctccaataacataaaaagccggaaagttgccgccaaaaagcactgtttcttgttctaatggcttcgttgagttaatggtggtaatattaagaagacagaggaggagcaaaagaaagtatgagtttagacaagaatgcaaatccatgttcttttcttctttattttccagtttagagaaaaaagaagaagaagaagaaccctgcaaattgaaagaaagatgaaaattgaggtcaattataaagctttacacatactaaaaaaaattaatagtacaacataaaacagctaactaattttaacaaacctatatgtgcctaaaaataacatttccaacgttgtatgcatcaagacattgctttagtaattaatatatacctaacattgcgttgtaattctgcatcactaaaacataaaaccaaaaat

SEQ ID NO: 8250 - DNA, 1996 bp, Arabidopsis thaliana landsberg
atttgaatgatatttggtttacgtctcggtttcggtacgcctaaaccgatcaattgcctaaaaatcaaaactataccgaaaataaaccgatttctacccaaaacatatattaatcccaaccaaattaaccgattttaccctactttatcagattttaaccggcaaaacccaaaaaatcggttcaattcggagaatttcatgaaccgaaatactgagataaccgactcggttcggttttgacggacctgctttgagtgtcctttctgtgctctgttgtggttaactgatctcgcaggcttagaactttaagtcttgaccgtgccattgcatcttagactcgaatcccgatgttttttaatcccaaccaatttaaccgattttacccgatttttaccgggaaaaaatcggttcgattcggagaatttcattaaccgaaataccgagataaccgagtcattgaccgaactcgcaggcctagaactttaagtcttgaccgtgccattgcatcttaggctcgaatcctgatgtttttgaaagtctcctctgttttattgttgcagagatcaatgaagctactagctatctttgtccttccatcgacaacgcttcaagctatctatcgcatttggtggtatgcttcaggcttcaaccaaatcccatacattataaacccaacgctgagccatgtcttagcctgcacactccagctctcttcttggctctaccgtacatcactcttcatcattgcttgtatcctctaccaaaacatctgccaccttcaggtcctccgtcttgatgaattcgcacgctgcttcgcctctgagatcaaagatttcagttccatactcgctgagcatctcaaaatccgtcgtgaactgaagattgtcagtcaccgtttcaggagattcattcttttgtcattgtttttcgttacagccactcagttcatggcattgcttactaccatcagagctagtgttccttttaacatctacgaagttggcgagctcgcggtaagaattcctcttcactttcatatagggatgcaagtttttgaaacattatattgatcaatgtctctgtttcttacagttatgctccataagcttggtgtcaggactattcatatgcttgaaaagtgcaacacgaatgactcacaaagctcaatcagtaacgagcatcgccacaaagtggaacgtttgcgcgtctttagatacatttgatgttctttatgacggagagactcctaaatgtccaacaactacacaacattcccagattttatcgcgtcgtcgtaatgttgttcaatcgtctgatgatgatgaagaaggagaaggagatgacaatgatcttgagatacatccaatctttgcccgcgccatttcttctcagaaacgtcaagctctaggtatataaaatcttgaattagacgatgatttggaataaatcattttcacctttttaactgatttggtttctctattgtgtatatatagtgacctatctagagaacaacagagcagggatcactgtttacggattcttggtggataaaacatggttgcgtatgatcttcagcatcgaacttgctcttcttctatggctgctcaaaaagacaatcagtaattttatatgtttctactctgaatccatattttcatttttcatcactttcctcttgtaaccgataacattcttcatgtttttggtttttggcagtgaacataacatgaagacagaatcagtgtcacacaacacacacgaagagattggtactaagatgtttttatttcaacaatggcgatataacagattctttttgtagatcttctatatatacaaatataaaacgtgtgtatgtaaatcaatgtgtgatcctttttgagttatatatatgtaccagatcatatttattgattgtgtgaaatactgatttttgaacctatgtttggctcattgatgaatcgggcgtgaaatgtatgatatggtttgtgat

SEQ ID NO: 8251 - DNA, 1344 bp, Arabidopsis thaliana landsberg
taggtttatttgagtaaatattcagaagcaaatattggctatgaatagggaattttaatgcttaattattatttatatgtgacatttggaaccaaatttgattgtgtaacatgaaccaagtaggttgctttgtggtcaaaagcaaagagattcattagtactatacacacctataatgcttccattgttcttctttagttctgtagcttcttctttgcatttcatcatcagagaagctttgctacaacaacacatgaacactagttgattcacactagctagagtttagcagatcattaccaagatgagggattttcaagtttgggcaactcccaagaaatgtttttaaccatttccaattaggtacataaatatcagcatacatgtgggacatgtaaccaaaccgaggaagcggttctaattttgagtattgatagatgatctcgaaccaaaaagaaaagtaatgtaggtcataaactttcatgaatcatgatagagaacgtacatgtcttatactggaattgacatgacatatatagctttaaagtgtttagatatatgatcatttccccgacatttgaaatcccgagcagaaaattgtggatgctacttctcctcgatgaaacccttgttgcttcatcaaaactgtccaaaccaaaggcgagataaacatttaacttggcagtggaactcaaattgtttattaaataacttccagcttggtcatcatcaataaacaaatcgcgtaaaagaggagcatcagtcacaactccatatttatcgttatatgtacttgtacaaccgtagaatcgcatagctttattttgagtctcttgatcagtgacaaaaaatttcagccggaatgacttccggaagattccaacattcaacaatatttaactcttccaatacaggatagcaagagacaagtcttgcaaaggtggcctcactgggagaccaaatacgttacaaatgcataacagcataaggtaaagaaacgaactcggcatcatccatggtcacatcaacgagatttaaggatacccgagtcttgcagttagaaaaacatggggatattacaaataccatctgaaggacaacaaacatgaagatgttgtaccttacgtttaatcgcagaatcaatccatgacgtgagaaaagaggcatcatcatcatctacattgttcagatttgtatcttcgtgaagatgtaacttaagcgtgtttatgatataaatcataagcaaaaaccataagatatctcaagttaacaaatccattcttagatttgtgtaaaagaatataaaacatatttcttatcgggctaacgtatttgttctaaata

SEQ ID NO: 8252 - DNA, 642 bp, Arabidopsis thaliana landsberg
aaacctatttgccgttattctctaactcattattttggctagatctgaccgacgcgtggtggctcctaaagcgccagcgtcagtcccctctcttattcattgtctttgctttcctcggctgtgaagcgtggtgatttttggcgaggtgtggattgggttgcatcgaatctcagatctatcgaggtttggttctatgagagcaaaatcgacgtgccttaaggtagatggtgaagatggcgtcgtcgttctcgcctctgcctcatggtgtggatcttcgtcttgtctctggtcacgtgtttcattgtgtttggagcaccggaggaggctctgtccttcttccctcaccggatgtgagcaacaacggctctgttctcggtgcctcggtccctcactcgtctctcatacttcctctttgtgtttatgtgttttgttttatagaacggttctagtgactagcttgatctctttttggttgttggacttgtttgctcgtgctccctggttctagtggtggtctttatggttttttcccggatcgatcttgtgctgctctcttttgagattggtttcatccggttgaagatttgtttcgctcattgttcacagttacccctgatcgaggtcggtggttaaaaagataaa

SEQ ID NO: 8253 - DNA, 1465 bp, Arabidopsis thaliana landsberg
ctttgattcctaaaactcttctctacctatcaatttgtaatcggatgatccctctaacctcacttctgtctcatgcactgactttaattgtttcgtaatttacaatgtaggatttatagatttttttggcaaatgaaaaacagagtgtttacatcatgtattacgtatatgaatcatacactaaatccaacatatatatgtagaattgctaattaatctttttgttgattaattacttcaaagtatcagtagacaagaaactaaacataacagtgtctcttacacttcccttgatacatataaacttcctcatcacaccttctctagtaaacccaactttttcaagaaccctttgagatccaacattgtccacatcaacaagtgcctcaagcctttcaatctctggaaattcctcgaatacctccgcggtcactagcctcactgcttccgtggcaaacccttttccccaatactttctcgctaggacataaccaatctcttttctgatgttatcaaccgccatgatcaagatgtagccgattggacggtcgtcttctaagcagatggctcggagccaagggtgtgtcaggacacgatcggttatgtatttgatagcttcgtctcggctcgtgcaaggctcccaagtgcaaaatcgagccactttaggatctgtggcccaaaccatgtagtcatcgacgtcggaaagagtcatcggccggagagatattcttcccggaggcgaagagctcattattggattagtttcttctgagtccatctccatttaggattagtgattgttttagatatcatatcactacgtctaagcgatgtctttatacacatcgcgatcttgaaaaactttgagattctcccttattgcttttgactaaaaaaacactaaatattaccatttgctatagattagtgtatttagtgttaaatatacgacataagatgaggtgtcatcgtgtgagtggataattgtctatatttgaccttggactttcgacacttacttggttgccaaacaaagtattgttctagtttcggaacttaatgtgttgcttccagttggatgcccacaatgccacgtgtcaaatcgtgtgtggtctgattcccaaaaaggatttaactgtttctcaagttattctaaatggattaaatattttaatactgttaatatttgtggtgcaaatgatcgtaatcgttgttatatactgtcaaaatcaactcaagaatcaagtcactcaacatgttgtatgattaagtaatttagctaaagattaattaatcgaatgttatcagaatccattcatctaatcgctgtaaaactagctatcacactatctttttattgtataaaatatttcatgtttagattcaaaaagaaaatatatataaatatatatcatgtttcattttgtacttttaattttcaatataaacttacattttttctaga

SEQ ID NO: 8254 - DNA, 2862 bp, Arabidopsis thaliana landsberg
tgaagttataatattcatttctatatcaattaatttgataaactaattaaacatgacgttgtaatattcatggtttccatatctatagggattctcccaaatggaaacttcgagataacccctctcaaatcaaacatgaagggtcgacaaataatcggggctaactctcttcctcattgggaaatcgccgggcacgtggagctagtctccggtggacctcagcctggaggattctatttccccgttccacgtggagtccacgcggttagactcggaaacttgggcaccatctctcagaacgtgagggtgaagagtggtttggtctactctctaacgttcggagctacgaggacttgtgctcaggatgagaacatcaaagtctctgtgcctggtcaggccaatgagcttccgatccagaccgtctttagctccgacggtggagacacttacgcttgggctttcaaggcaacttctgatgtggttaaggtcactttccataaccctggtgttcaagaagaccgcacgtgtggacctctcttagatgttgtcgcaatcaaggagattcttcctctccggtataccagaggtaaatcaattaacatatccggtttagctatagctaatgtaatattttgagtttttgcagtttaatcctttatacttcagttatgtgtttatgcttagcctgtaacattgttttgttctcttaggaaacttggtaaaaaatggaggattcgagatcggtccacatgttttcgctaatttctcaaccggaatcttgattccagcaagaatccaagacttcatctctcctcttccgggatggatcgtcgaatcccttaaaccagtgaagtatatcgatagacgtcatttcaaggttccttatggacaaggggccgtcgagctagttgccggaagagaaagcgcaatagctcagatcatccgaaccatcgctggtaaaacctatatgctctcattcgcggttggtgatgcacaaaacggttgccacgggtcgatgatggtggaagcgttcgcaggaagagaaccgtttaagctttcttttatgtcagaaggtaaaggagcgttcaaaacagggcattttaggtttgttgctgattcggatcgaacgaggctaacgttttatagtgcgttttatcatacaaagcttcatgacttcggccatctttgtgggcctgttcttgatagcgttgttgttaccctggcccgttaacaacttgtggctgttaattcttattagactgaatattcgaaacactatactctattcgtaacgaatttgtggttgcactacattttgttgtttcttgtcattagtcttgcaactcataccagtgatgcagaaaatatttataatatgtatggaaactttgtggaaattaaactaaaattaaaaagaatggtgagatagatttcaatttaataataatttacatctttcatccatataatgtatattgctaaaatatgatgtattcaaagtgaattctgaatctctgatataagaacatagaaattcaaaattttacaaagaccagtttacatggtcaactagaattaataagacttcttctatagctcatgggatatattcattatacaaatgacgtggctaaatctataccgtagataatattcagacgtagacgttagcacagtagataaattcctgtcctctgtatcttctctgagctgagaaaaggaaaacagacgccggagaagagataaagaggtaagaagacccaccgaagacgaaacgtaatcgaacaaagatggccgtcgagaaatcgaacacgacggtgggaggtgttgaaatactgaagccacgtacggataacagagaatatcggatgattgtccttaagaacttgctccaggtcctgttgatcagcgatcccgataccgataaggtttgagatcgctacgatttggtttctgatattgattcctttgattttggattatcgcttactgattcgtaaagtttgattcttttcttcaagtgtgctgcttcaatgagcgttagtgttggatccttctctgacccacagggattagaaggccttgctcatttccttggtacgttgaattcttcaggattttggaatttgccatggaatgattcaaccagtgtgctatatttcattgattaaagcgagtttcaatatggagtggctttgttataacgttgtactattgttttttggttgttagagcatatgctattttatgcaagtgagaagtatccggaggaagatagttactccaagtatatcacagaggtaatatatattcttacactctcctcgaatatgaactcaagtatactcgaagttgttcttgataccactcgatagaaaattttgaagaatatggaatttttttggtgtagcatggaggcagtacaaatgcttatacagcctctgaagagacaaattaccatttcgatgttaatgctgactgtttcgatgaggctctggacaggtacagttggtgttttcgtactcttgctaactaatcttctctaatcttttaccatttttttgcctgtgtaagattttattttgctgcttttaaatcagatttgctcagttctttatcaaaccactaatgtcagctgatgctactatgagagagattaaggctgttgactcacgttcgctcgcttttgttttccttacgtttttcttgctgcagattgtgagctataaacaggttataacgagttttcttttatccagagaatcaggaaaacttactctcacatggttggcgaatccgacaggtatagctataatcaaaagaacaattatcagagttatttgtatgtataggactcatttt

SEQ ID NO: 8255 - DNA, 802 bp, Arabidopsis thaliana landsberg
ttacaggtttatatcttttgccataccccaaaacaccgcctttttaatcttcgatattttttctttttgttcccatggtttttataggggacaaccttactattgcgaaagaaactggacgtagacttggtatgggaacaaacatgtacccaatcacatttttactcggtaaccacaaagatgatatcatcgcttactatcctattgatgagtcggttgatggcttttctggtgtctttccaggtttgttcaatagctttttttttgccatatggttccgaaatacatattgtaacactgtctttttttttccttaccaatcatgttcagagcacaaataccatattgtgaacaagttgcaagagaggcatatttgtggtatgattggtgatggagtggatgacgttccttcgttgaagaaagcggatgttggtatcgctgttgcgggtgcttctgaagctgcaagagctgcttctgatatcgttttgactgagcctggacttagtgttatcatcgacgcggttctagctagtcgagccactttgcaacaaatgaaacactacacaggtgagtgagcaatgctcttattaaactatacacagcctttttttttctttttttctgatgttttctcatgtatcagatttatgcagtttcaataaccattcgtgttgtgggtaagttaatcaatcttgaatgttttctgtaatatcatcaaataatctctggttatataatctctctgtgtaccttttttacagtttggggtcatgttcatcgctcaatatggaagttcgacttt

SEQ ID NO: 8256 - DNA, 607 bp, Arabidopsis thaliana landsberg
  unsure (1)..(607): unsure at all n locations
aagaccactgattttggcctcagtgctctgcctcagcattttagggtacttttaaatatcatcttaaaaccatagcatatgggggcataattataattgttgaatccgttcgagttacaactaattttctctttggcattttaggatgacggattgttgcatacaacctgtggaagtcctaattacgttgcgcctgaggttttagctaacagaggctacgatggtgcagcatcagatatatggtcctgtggtgtaatcttgtatgtgattctaaccggatgtcttcctttcgacgacagaaaccttgcagttctttaccagaaggtaaacctcattttttcttatatatatgccaattcaatacacattttgaagaaataagcttgataattgatttgatttctagatatgtaaaggagacccaccaataccaagatggttatccccgggtgcaagaaccatgattaagagaatgcttgatccanatccagtcacgaggatcacagttgtgggtattaaagccagcgagtggttcaaacttgagtacattcctttcattcccgatgatgatgacgaagaagaagttggcacagacgatgatgctttt

SEQ ID NO: 8257 - DNA, 1723 bp, Arabidopsis thaliana landsberg
acataactatctatgtggttttattggtaccgacgcacaagttggttttgcctttttagtattatatatattagataacgaatttaacacggggtcttgatgattttgtaatcacatgtcgacttttttttacttgagacaaagaagctgatgatttgttttttaactactctctctgcttatttctctaactttatctcacagagtgatatccgaagcttcttttgcttggtgtcaaattgaagtgtgggaaacaaagttggcaaactggtgaagcaatggctttacacttgaaatgaaaatacaaaaaaaaaaaaccagaaatatttttggtagcaagttaaaaagatttgtgtagccttgccttctgatttattgaaccaatcatctccttgggaagcaagattctattggaagtgttactttgagttcttttctgtctgctccaaacgactgcaaatttcaatggaggaaaatgcgtaaatctctagattcatatgccaacaactaccaacgccacagggttacaaaagaaataaatagatgtgaaagagtgggatgtgatagtacctcaactccgcagtctttcacgtacatgtttgtgaatagctcagatgcatctggtatcgggctctcctgaaacaagttaaacagcaaggaattagtttgtgttttgataaataacaaggacaaagatagaaacaattaagattattaccttggcctgagctacggcgtcatctacttctttccttatctctttctccatgtcctttaatgtcaaaagaattttgtcatttccatagtcaagtttgatggttgtatgtataatttttttcaagctttttgtctggaatgggaaggtggtgaacagggtaccttaagctctttttcggtagctatgtcatgagttaagagcaactttcgcaccctttcaattggatcacgcacctaaaggtaacaccgatgaaaactttacagattaaaaagtttcaaattgcatatggttggagcagtagtcttacaaatgaacaaagaactaacctgtctcacgccagagatttcatcacgagtacggtaagtgcttcctgggtcagacatagagtgaccgtggtatctgtaagtgtccatctcaaggatctgcgcaaataatggcaatggtatgttggtcataatcactaggtagagaatggattataaaaatacaataaatgtcaacgctatgtgattgaattcataagatccaaaatgcttgtcccatttgtgttggtgacaaaatgcaataaaggaaaattggttggaagctgaagtcaacatggtataatttcacttcataagtaggtacacaccaaaaactccaagagatattagtgatatctacttatctagtacttttaatagaaatcctaggagcttgtcaatcacgcctgtcacactctcccggaaacagcaaacaaatttaacaacataggtacttaagaagtcttgttttctccaaataaacctcgttcaatccaaatctaggctaggtagaagttaccagctaaccattctccccaaccaaagtagcatcacacatgcaagtaataaatgattctacgaattcttaatttgcataaaatgctaagagtcatattgattaggtatcgatttcataaaaccaacaggagcagctgtaatacttacaataggaccattcttgagagcatgctccttggcaaac

SEQ ID NO: 8258 - DNA, 2105 bp, Arabidopsis thaliana landsberg
  unsure (1)..(2105): unsure at all n locations
attttactagcttgcatgtgtctgaaaatgaaatctggggatgtttcatttattctatcaagtggctgttctcctagttctcaactttgcaggcttaagcattcttggcttgaaccatgaaaaccatgcacatgctgtggaagtgaagaacactatgatattcaatgcctttgtcatgtgtcaagtaagcaaatcatctcttctttcatctatatagtcttaaaagatatggagttgtttttaatcttgcaagtcttccagatattcaacgagttcaacgcaagaaaacctgatgaaatgaatgtattccggggagtaaataagaaccctctcttcgtagcaattgttggagtcacttttatacttcaggtaagacaataacacaaagccactttaacctttttcctctttcttgagactatgatagtaaaatgcttctggttgaaaaatgcagatcatcatcgttactttcctcggaaagtttgctcacaccgttagactgggatggcagttatggcttgcttctataatcattggattggtcaggttggtccagtttctccaaacttagttctcagtgcttatgacacatgtatgaatgaacaatttgtttacttgctctgcagctggccactagcaattgttgggaaactgatccctgtacccaagacaccgatgagcgtctacttcaagaaaccgttccgtaaatacaaagcttcaagaaatgcataaaacatacaactaggttctcagccttcctcatacagaagcaataacagatataacctgtgacaatggcctaaacctctaacctttctttctatcttttttaaaaatggtaaaagtattttcaaatgtatactgcaatgagatccaattcttttgtcccttttcatatttcttctttttgtatgatgtaaaagtgcaactgtgaattgaattggatttgtggttgtactaacgagagtttggctcagtcatggttggttacaaaagtgttgttgtatctacatggaggattctctgtgtgatatcactatatttgagttaacaatggttttagagaaaagaatgatcacatcttgtcatagttcacatggttcttccttcaatagaaaccctcaacactaaaatcaatcttacaaacaatatatgtgtttcttactatagagcaaaatttatagaatgcaaaagctatgagccaacagattcaaactgtaaacctcactgcccaaaaaaaccaacttatattgaaacaaacttacaaattaaaaacaagaaaaataattaaattgcttacacttgatgaaaactgagaaggcccttccatggaagtatgcgtggagattactttagaaatgcgagaaggtcagcaaaagcatgaataagccaaatggttcttctttgagatgtatggagagatgaaatctgtagcaaggccagatgtctctgagatttctgctggaactaacacttgaggcttacctaaagctatccttttgccaacggtgtttgcataaaacagaccggagatggctggaacaaagacatcgcttcttgagcttatgtagaagtcgataacattttcgtactcggaactcactgattcaaggtactttgatctcttacttgccggcattattgcctcctgccatagttaagtgacaaatcaagattagcaacatggtcaaaactttcttggactgaagaatgttttctgatcttactcaccttagtgaatgtttttgggaagatatccttaaggatattgaggctactgtcccatcttggctgagtcagatagatagttgtgtcgctggcaaatccaagctttctcaagaataaagcaatctcttgagcgttgtaacatgtcttggaccctactacaccagttgtatggcaatttttcttctcaagtatgtcgattctaaggtctactgctatgaaacggccaccggatttacggctatgagtcctcaaccgctcagccattgattcagccgctgcattcgctgcaggttgcgactccaaagacacaccccctgctgttcaggctcnnggtgcagtttcgcaggcttgtgcggattatctcaagtttcnggagg

SEQ ID NO: 8259 - DNA, 883 bp, Arabidopsis thaliana landsberg
gaaaataacttaaactcagaagttttagatggggctgatgtatctgctttaagctctaaagcagagggtatggaagaatcgaatactttggctaaggtagagatgaacaatggggaaggagaagacatgactaaaagcgagagcaagttctgttatggagagaaggaaaaggagaggtttaacagaatactaagctattatgttggttcacataacttccacaacttcaccaccagaacgaaagcagcagacccagctgcgaatcgttacattctctctttcaatgcaaacacagtgattaatctcgatggaaaagattttgtcaaatgtgaagttgttggacagagcttcatgcttcatcaaatccggaaaatgattggacttgctgttgctatcatgaggaactatgctcctgaatcactgatcgaagcttctttcaagaagtaagctttttgtttcttattatttccctgaatatataattgtttgagtcgttttgatttgtattgattatggaattggtaactcttcaccagggatgtgagaataaatgtaccgatggcgccagaagttggattataccttgatgaatgcttcttcacgtcttacaacaaaaggtttaaaggcagtcatgaggaggtgtcaatggaagagtacaaggaagtagctgaagagttcaaatggaagtatgtttattcacatattggctctgctgaagaaaaagatggagctgtggcgatttggttgcattctctgaaccagagaaactatcctgatctacgaagcaatgaataccaaccggactccacgccattgtctataagaagattggtgaagcaaataaagaaaatatccatgaaggcaatgctgagctattcgttgt

SEQ ID NO: 8260 - DNA, 1262 bp, Arabidopsis thaliana landsberg
ttttcagttatcttacaagtataatgaaaatgttataaatttatctgaaaaatgaaaaatgcatagccgtttttgttttttataatgaaaagtttaacaatcggtaagatatgatcagatacaatggcggccgcaacgatgtcttgggacgacgggaagcacatgaaggtgaagagggtgcagattacatatgaagatgttatcaactccatagaggctgaatacgacggagacactcataaccctcaccatcacggcactcctggcaagaaatctgacggcgtaagggtttaacaatgttgtaaaacctaacttttcacataaaagatatttacatgagtagcaaaaaaaataatctgacggcgttagctagtactcttcacgaccttctccatatatactacatctttcaatttatggatgttgcaatgggtttagtttggtcggtctcggtcttgtggtcttgactcttgacgggttgccttagtttgattaactgacacttaattactaaatgaaaagaaaaaatgatgggtcctgctaggtctaataatagcatataaaaatgaattagggctaggaaaattttggtctactatatttttgtttataatgatttatttattgtatactttgatcgaactaatgtaatatatttgtttttgtaggtgagcttgagcccagacgagtacataacagatgttactggctactacaaaactacaggggctgaagatgctatagcagcattggcttttaagaccaacaaaactgaatatggtccttacggaaacaaaacaaggaaccaattctccattcatgctcctaaagataatcagatagctggtttccaaggaattagcagcaatgttctcaactctattgacgtccactttgctcccttaccttcctcttcgtcgtcatcgtccagtttgagtcaagccaacaaagttgatgctcaaggtgggaaaggaggaacatcatgggacgatggtgctcatgatcatgtaagacgagtgtacattggacaaggtgattctggtgtcacttatgtcaagttcgagtacgagaaggacggtaagaaggaatcacgcgaacacggaaagaagacccttctaggagcagaagtggtgagtatgtttagttcctttcctatattataactagaaagttcaaatccgttgtactttagttatattatgacctatcttgccaaagaattaacttatttgaaatctctgtatagtttgaggttgatccag

SEQ ID NO: 8261 - DNA, 3192 bp, Arabidopsis thaliana landsberg
ttgtctgttccataaagaaatctgatggtcccttagatgatatatgtagatgccacatgtgtttgcaaagggttagcacatgaagagaacaagttttattgaaactatagtcttttcttctttttcaaagtctgtaaatgatccggttacatctactgttactaacagttgatgcagcttaaactcctgaattcaagaaaatatttgtaaatgtgtgtttaaaaacttctacagagaccaacctggttatttgcaagtgtagccgtctcttttgtatttaagttatcaggagcaacaggtaccactggacctgaagaaccggaatgagcatgtgcagttgttggtgatgtggcaaaagaggtaacactgtctggtattcctggcattgtctgggtcccgaggttaactgcggtatagttttcagtagaggaaatatcacttgtgttccatagttcatagttgtttgttccagggacaacagaaggaacagagggtccaaacaacaaagcttccaaagaattaggagctggctcctcagtggtctttagagatgcaggaatttcacttgaattcttaataatgccttcatcagatagttctgaaactggtacatcatcaattaaacttctaggaatttccattttctcagatgatgcagtcatctgcaaaatgcaacttgttcacatattaactctagacaaaatgcataaaacaaaatgcaatagatataactgtagattacctgattattcactggatccttctttttctcaacttttacaatattgagttcgctggtatggcgtacaatgggaaagcttggcatgtctttgttacttgagaggtcaagtgatttggagcttcctcttgaatctttacgtgcatcatatctcttaacactcccatcgtctctaaacctatcatcgactatctcaaagcgaataggactctttggtaaacctctagaccttggattatgcgtaacatgttgttgtttatggttcttgtcatcaaaataaaaccttagagattcacttccactcctcccagcagcactagatctttcgatgtcagatttatccacagagtgtaaacttctagatccgagaacatgtgcactggtcttcttactttccctgtaatcttctgtgacatcctaaacattgtaacatataatgttgtcccaaaatgagttgcaacacttagcttcaggtttggctaattaagctgaatcaagaaaaaggtaaatgtaatgaagcaactaagaaaagcagtttaccgatttctgctgtgagatcttgtcactgctactgtatcttttgtccacataaacactcctgatgaaatctcggagcttgaaaatattactgaacaaaaagaaagaaaactgaggtcaacatataaaatttttgctactcctagtgttaacttggctgagattaataaatgtccaagaacctgcgatcggggtaaccatcacggtgagcatcccattctttaaaataaatttgtctggctcgctgcagagaacacaatgaaagtttacagtactagaagatggatgattgagacaaaatgagaagctcaatatcaaacctcgtttcctcctgcgcgaagtgcactaacttcgtctgctgtgaacttggccattgatacagatttaacacgatgtgtgaattctcggctgcaaatatatacaaaaagaaacacatgcatgatatgtaatttggaccaacacttgcaagtaccagagtttttccttggattgatagagaaatcaaaagaagaaaaatgaaaggagaagaggaaaagacttactggattccgctgcagttaacgcagacaaaagtccagaaagttgagcatacatattgtggaccctgcaaagattcacatgttagacaacaatgagctattcagatggatcattggctccaacaaatgaatgtacgtatgatcagctaaaaatgttgtaccaaccagactattgcaattgatgcatctccggttctcaggaagcttcaataaactccggatagccttttcggttcgctcgtcttccttcattcttggaaaaatgcctctctcatgaagaaaaacaatatctcaaatgagaaatcctatcaaagagcaatgtcatcatttacctgagaagaaattactatcttaagccaaaaacattgaggttattctcgtgcatctttaaatccttaatcttacgttacatgcgagaaacatgggaaattttaagcttcaggcccctgatgctctaaaatgttcaaacaaacaaaaaaaaaaagagaagagaaaaaccttacaaaaagaagaggaaccagtcgaagaagagaatttggggtggaaagaatgatgagaaagaacttctctcaggaggttgtccaagatatgacaaatttagggtataagtcgcagagagatcatgaagccagcaaacgaatgagacatcttccgactaaactgctaacttcaaagatttcccgccgttggaatttctctcaccaccttttcttctctctcatttttcccaatgttttacaaattataagagaatactaaatttttggaagagtattgacaaatgtgatttgtaactaatttttgtaattatatgactacatggcaagtgttgcaagtttgacttcgtttcaatatttttcaaactttatgatcttgactaaaattgaaaagaaggcagagaagaaatatggagaagaagagcaccgcaaaatacttgcagtagaataatctttttttgctcaaactaaatctctctaccaaaagaagcctaataaaccaaattacttacaatctcctcttttcttttttctctcttttttttttttttttttttaccatctcctcaatttttgtctctcttcttaacctactaagaacattcccagccgatgggtacatgagatcaagtttcagagtcccagttcggtgttattgctgcatcaaaatatagcttacttaaagcagagggaggcaaatttctgtacagtggagctcatctgggtcgttttttaattcgtgtcaagaccagctcgtatgttgaacaggacatgtcgaatcactatctcttcttttgctcaagaggtgacaatacccagacttaacaagagtggtatctattgactcatccttcgcttgagcttcaaccccattgttgtt

SEQ ID NO: 8262 - DNA, 856 bp, Arabidopsis thaliana landsberg
gttctcatctccttcttccctcttttttttttggttggtgaaaagtagaacgagagaattggtccatctcgttttttataagttgaatctcatcagagccttctttgtttttctggtatgaaagattcatgctttcgtggattgttctcgttttctctatcttgtgaatgatattcagatctaactgtagttagattagatctgttgcattgtacttttgattctaatactgtctagttcagttcctagatttaactgatttggagctcgaatagatgagtttcaagtcctaatttactgcaaaacaattcgatttagtgtgagggctctagtttttagtgttaaaagttttcatcttggtgacaaattagttgtgatattcgtgtttaaattatcatttaaggaagtctcatgaatcttttttactattgtggttgtctatacaggaagcatgaagccagtcttctgtgggaactttgagtatgatgcgcgcgaaggtgacctggaacgactattcaggaaatacggcaaggttgagagggttgatatgaaagctggtgagccttttttttctttctttctttcttctgcctcttactactctgtctttgtggttaacctgaatgaattataataagcagtattggtatccactaagtacaatgaaaaagcgaaattcaaatgcatttcatgaaaatccactctcgtcttcattccatccacgagaaggctctggtggactatctccctttggaaggagtactaaacattgaccacattcacctggccacctgatgcaacctggctgaactttggaaggacttcataggaataaatttttaaataaaaatttagt

SEQ ID NO: 8263 - DNA, 1321 bp, Arabidopsis thaliana landsberg
tgcaacaaaaccgagggtaccggggaaggaattaagaaaatgttaaaagaaaagagatactcaaaagccaaaagcaagtcactacctttgataacctgaccacttcctaatttaaactcaaacggatcacccctttcaaaactcgaatcgaatacagttccatcagtaagtttcccctgccacataacaacactaagttacacaacaacaaaaacaacaataaacatttcttcatgacaataatgaatcccaattttgttataagatctagcaaaaacttaccctatagtgcaccttgatcgtatcacctttgtgagcctgaacttcacatgtttttggcttaaactgcaaaaaaaagaaactctttattatctctgaatccaatcaagaaccctaagtatcttacaaatttgttgacaagatcacacttgtcaaatccaaaagactccaactaaaccaaatggtcaaaagacaaaccaaaacagaacacagcacaatcaaaaccagatccaaattcacattccagaaaacaacaatgaataaaccaatattatagctagaaacagtatacgagatcgttcatttcctgatcggaaaatataaaaattaccttgacaccgatctgcaattccgacacatctccggtcttcttggcaaaacctataaacagatccaattacaaggaattagattggaaacaaagagatcatgattttagcacattcaataatgagaaagaaagatgaatggagaaccttggagtgaaatgagagagaagaagatcaaaaagagagagtaacggagactcatcttgctcgccataatcgcttctcagttctcactcttcagttttttccttttcttcagtgtatagaggtaatcttattgggcctaggtaggcctgtggggttctgcatttttgtaaaagcccatcttttatctctacaagcaaagttgaaaatttcggtttaagagttttatcatttcactacgttagagtcttatatttctactagcaaagttgaaaatttcggtaagagttttcatttcatttcatttctttctaaatctactcaagagtgttcactatggtggttacaccggtatgcaaagagttatttaacgagcaagaagacaactacattatctcttaattatattagaatgtttcgcatgcatctaattgtagtttaagttgctgtaatgttttacaaataaaagttttattttataatttcacggtttaatatctttgtttaatatagaagaggaagcaaacaaagatgagaagctcacacaatctcatttgaagatttatgta

SEQ ID NO: 8264 - DNA, 921 bp, Arabidopsis thaliana landsberg
ttggctcatatatagcaagattttacatgtgaaatttgctattgattgacctaatgtttttggtttgtgtgtctaggtacaagtataacttcccatttcttgaaacaaatggctatttgcgcattgatgaaaaacgtgttgaacctctatacaagcatgtctttccaccagcgcttgcccctggacttgctttcgttggtttgccagcaatggttagtatcaattgaactttttctcttggactttcgagttcacgtctcactttattagttttgatctgtgattttctttttaaattcaggggatagtatttgttatgtttgaaatccaaagcaaatgggtggcagcagtcttgtcaggacgagttacacttccctcaacagataagatgatggaagatattaatgcgtggtatgcgtcgcttgatgccttaggtattcccaagagacatacgcataccataggtagaattcaggtaagttcgtcatattccgaataaaactacatgtcctataaatatgtcaaaatagtttcaaacgtagatttctattaaaaaaaatcatgtgaaaaatattaaaacaaaattcacatgttttaataattaaaactttttcatatcatcataaaaaacccaagtgcgcttgaatttcggatttacaattactaaatataaatatttttaattaattgcttaaaatgtggattttttaaatactttgaatataaaattaaaattacatgtaaacaaacaaccaaaggcatatacatattctatttgttaaagaatcaaatgcatattatctacacaagaagaacatcatgtcaataacttttttaataaaacttaatctttctcacagagtgagtacctcaattggatcgcgaaagaatctggttgtgaactcgttgaacgttggagag

SEQ ID NO: 8265 - DNA, 814 bp, Arabidopsis thaliana landsberg
gttctctacagtactttgggggtgggtgtattgtatttaagaagcataaggaaggatggattctttccttttcagggttgattgctaaactattgaaagctttgaataaataggagggtttatctctaaggcatgatgccctgattgttatttttctttgtgtgtgtttgtttttgtttgcatttgagtttttatttattttgtgcttatgtttgaattttacactgattatgttcaccacgtatagatgcaaatattacttccgtttcttgaaaccaatggatatatgagcattgatgaaagccgtgtagaacatctatacaagcatgtatttttccacccgcgctttcccttggtctttcgttcattggtttaccagcgatggttagtctcaaacaaaatttatatcttgggcatttgagttcaagtctcactaggtttttgatctctattttttttatcagggcatacaatttgttatgtttgaaatccacagcaaatgggtgggaacagtcttggcaggacgggttaaacttccttcacaagataacatgatagaagatatcactgagtgccactcactgagtggtatgcatcgcttgatgtgttatgccttcctaaaagatatacacataaatttttgtaaatttaggttggtccgatattttttcacgtttttaaatatgtagaaaaaaactcacgaagatgatccccatctaactataaaaacccttttaagtttatcatagaaacatttatgcctgaaaaaaagccaaccggaacccttttattttccctttgccttttaaccttt

SEQ ID NO: 8266 - DNA, 1051 bp, Arabidopsis thaliana landsberg
gcattgtagaatacgtatatatttagaccattttgatttgaaagtgagactacaaagatggtaggatcaccacatgaccatttcttcatgctccaaatataagcattgctcaacaaagatacaccaaaaaactctttctctctctgtcttctctatagccatcgttgcattctactccaagccaacggttgaaattgtgtaagttcttattagatcaacaagaacttatttttttggtaagaggaaacaaaattaagatggtattggaagatgagatgaagaaaggtgaagcgtcaggagagacatcagagaaaatggggttaagcagaaagaacagtgggagctctttgtctccgacagaggatgatgaagaagatgaagacaagaagctcgaactcggtcccatgatcgctctcaaagaacaactcgagagagacaaggtcttttactttatttattatacgaaatatgtaaactataccagattatgaatgggggaaaaatgttagtagtttactatattcttggcatattaaagtatgaacttggtgaaactaaaattataatagatgttataacgtcaagaataacaatctgatttttcttgtttaaaatggaaaattaaggctttatataatttaaaaatttttcttcgatatttcttattttcgacgaaaatttgataggatgatgaaagcctgaggagatggaaggaacagcttcttggcgtcgtggatttggaggatgtcggaggtaaaccgaattcattacttgatttagattccatggttcgtaagtatggtttagaatatcgattaagaatcacatgtatttagctctaatggtgaaaagattataccggtctcactagttctgattcaaatgaagtattacgtacgaaaggaacgaatcatatgcatgttagttaaatgacattttggcttaccttaggctcggttaaaaggaaaaaaaaatggatacagaattcaaaactattgaatcatgttatcaaacataaaattaataaaaactgagatgcagacacaccgga

SEQ ID NO: 8267 - DNA, 1427 bp, Arabidopsis thaliana landsberg
tattatcaataaaacaacagcctcgaccgccaagaaaccgatattttccacggaaccggattttatagagaacaaaaggataggacaaaggattataaagaagaggaaaccaaagccaagactgaaaagagcaatgtagaaatacgtcacaagaggtcccttccaagatttaaggctcaaaacaggaaaatctttgatattgaagttttcatctttaagagtaatagccgatgcatggacgatgactagaacagaaaagaggttgatgatggaggatacagccgcgaaaatgtatgaagaacccacaaattggcgaaaatctgcaaagactctcataaggcgggctgcgtattccggggaggttggatctgtcgaaggcaacaaacttgcttcaaggatcaagtttgtgatctccggtacgatgacaaagatgttcaagaagtaaactaaacaattgagtaagagagggaataccaagactgagaacatcaactttttgttcttgagaaacagtttgcgggattcatttagaatagccacaacatcctttacaacattcaagaaggaaaatcgagccatgggtttcaagaagaaaaatgagaaaagctcttggcttattggtttttggtaatggtggcgagggtttataagatcaaacctatctgtctagggcttatatactactaaccaaacattcaaaaactactatacctttagattatgaccagctatttttctatggaaaaagaagtctttggcttgtatttcggggtagcttcgcttacggatattcttgtcatccatttgattgagtccaagtacacggaaccctcaatatattattattactacatattatatccaaaatcaaaggatgaaaccaagacttagacaaatgcaagaacaaagaacccgaagcataatgcatcgatgaaaagtctaaaaatgatgacttcctgaccgcgtcataaatgaagatgttatataaagaaaataagaggaacatgtttaacactgcaagttgacttcttcatcaaatgtacgtgatcaacattcacttcctctattcgtgttgaaaatgtcaagaaaccgtgtaagataatgaaacatctatctaaaaaaaaaatttgtttgctcaagcgaacaagtcatcatgaatgagtcataaacagtagggtcaaactatatgctataccaaaccgtcattatatatttatatttaaccgaacatagaagaattagagcttcaaacattctttgaggatgttgcaaattgctaaatgattataacttctaatccaaatatgaatgacaaaaaagaaaaacagagcacttacaaatctagcaaactatttctttcatggaccaaaacatatccatagttctccttcttgtaaacttcctccttaatctaccctttttttttt

SEQ ID NO: 8268 - DNA, 1984 bp, Arabidopsis thaliana landsberg
gccgatcttcttcctccgatatctccattgacccagtcatcgaatgaccacgtgacggcggatcaagaaacaacgatggtaaaaggataagacttttccacacggcggtgacggcgtctgattccgtctacaacacttggcaatgtagagttatgtactattggttcaaaaagattcaagcttctgctggacccggttctgaaatgggtgggtttactcggatcttgcattccggtaagccggatcagtatatggatgagattcctacttttgttgctcagcctttaccttctgggatggatcaggtataacgtaatttgatttgcttcttttgagaaaattgaacattgatttttggtaaattttgaatctttcagggttatgttgtgttgaataggccatgggcatttgtacaatggcttcaacaaacagatataaaagaagagttaagaagcttttgttttttgaacttgttttggtaattagcttaggggtggtgactattgtgctgagatgttgtgttggttgtgtgcagttatattttgatgtctgagcctgatcatatcattgttaaacctataccaaatttggctaaagatgggcttggagctgcgtttcctttcttttacattgaaccgaaaaagtatgagaaggtgttgaggaagtattatcctgaagtgagaggaccggttactaatatcgatccgataggaaactctcctgtcattgttggaaaggtttgttcttgttgcatataattagaaaacaatttgggatcaggtctctttaaagattgtagatgttatgtttttttaggatgctttgaagaagattgctccaacttggatgaatgtttctttggctatgaagaaggatcctgaagcagacaaggcttttggatgggttcttgaaatgtaaaagtcttctgattagaagtagttttgattgttgattgagtagaattgatgacaattgtttgttatcttttgtggaagtataggtatgcttatgctgtctcatctgcattgcatggtgttagcaatattctacacaaagacttcatgattcaggtaatcttatacacacattttggcattctttgaaatttgtatattgtttttatgcgtgtggcggttatgaatggaggcaaaagtgtatcatccatgcctattttcatgagctagtaagatacaatatgaataattagttgcagtattccaagaaattgttaatctagaatgcgtcagtgtggccaaggtgttgatactaacatgagttttaggagagtgaaataattatggccagtgacaacctcagaaagtctatttgttgttgcttgttacatggatacgaatttttcgatgcatttatgaaagagatgatggacctttggtttggttttgtttgtggtaatgaatcagccaccatgggatatagaggttggtgacaagtacatcatacactacacttatggatgtgattatgatatgaaggtaagctttcaaattctgattatgatttataaacaataggacaaaaaatgataaatacaaacttgagaacttgtttactgagattagcatatgatttgaaattgataagagagggttgtaaaacaatgattgtgatgatttcagggtaaattaacttatgggaaaatcggggaatggagatttgacaaaagatcgtatgatagcaaaccaccaccaaggaaccttacaatgcctccacctggtgtttcacaaagtgtggtatgtttacatgtcctgccttcatttttctaaaacacattacccattttatgttccagtcggtgggccgaattacgcggcaacttccctgcgaatgattacaaacacagctcagttctcttcattaatgtattgacaggtaacactagtgaagatgataaatgaagccacggccaacataccaaactgggggatcataaagagacagagagagagaaaccgtaatctatatg

SEQ ID NO: 8269 - DNA, 1056 bp, Arabidopsis thaliana landsberg
ctcgctaatgatataatcaacaaatgggtatgtacaagcagtttttgaagtttgattctgtcgttactcgttacccacctctgttcttaactaacttcctttttattttgcagggtcgtatcatttataataagagcaccagatatgataacatgtttactcaggaggaaattgatgagcaacggaaaatactattaagaagacagaccaaaacagctcctaaggtgtctggaacaagagctagagactttaatacagatattgacctttatgagtaagtttctctttgtgtttaacttggctttgtaccatcatttcagcttaaaaacaattttgtttttggtaatctgaaaaatctaatgggggaaaaaatgcaggaaaccaatatccaggctaggaacttggacaggaagagcaagagcgaaaataccaacaacaatgtcgatggactttaagatccgtcctccatcgaaggttgacattaaccaagaagaggaaccttgttccaagtggcaaatggaaaaaagacataaaaacgtaagtttcctgcattaacatatagaagacgatcactacttgcattgcatcatgatggttttctgcatcaatgactatttttgatttgaaaacactaagagaaaatatgatacctttgtgacagctaaccaaaaaacagaagcagcaaaagaacatcaggaaagggggcatgcaagcattgaagcttagtgtagacggatgcactatgctcaagtacttgtagactcattattaccagagatgttttggacacatcaattgcataatccatggcgaatttctacacacattgtgtttagtgttttatgtagtgagattattcttagtttatagagctcaaaagtgtgactagagtgaatgagtgttatcaaaaacataaagagttaatatatccatttggttcgtaagatttttccaatagaagttattaccaaaaacgtttacacagagtagcatcagacagagaacttgacgccttcatcatctgctgacgttcccttgaacaatgaaagcttgccc

SEQ ID NO: 8270 - DNA, 590 bp, Arabidopsis thaliana landsberg
aagtcctacgactctatcatacagtcccactgaaaatgcagttttgatctgcttatatctggatggtggttcgtatgagttgtacatcataccgaaagatagtgttggcaggagtgacgttgtgcaagatgcaaagagagggacaggtggctctgcagtattcattgcccgtaaccgatttgctgttctcgagaaaagcaccagccaagtgctagtcaagaatctaaagaatgaggtggttaaaaagagtcctctgcctattcccacagatgctatcttttatgctgggactgggaatttgctttgtagatctgaggataaagtagttatctttgacctccagcaaaggcttgttcttggtgagcttcagacaccatttgttaggtacgttgtttggtccagtgatatggagagtgttgctttgctcagcaaacatactatcattatcgcgagcaaaaaacttgttctccagtgcacgcttcatgagacgatacgtgtgaaaagtggagcttgggacgataatggtgtcttcatttacacaactttgaatcatatcaagtactgtcttcctaatggagatagtggaatca

SEQ ID NO: 8271 - DNA, 614 bp, Arabidopsis thaliana landsberg
ttcaacctggctcttgaaagtggcaacatcagtgtggctgttgcatccgctacacagattaacgagaaagaccactggtatagacttggagtggaggctcttcgccaaggtaattctggaattgttgagtttgcataccagcagacaaagaactttgagaggttatcttttctttatctcattactggaaatttggacaagctttcaaagttgatgaagattgcagaagtgaagaacaacgtaatgggacagtttcacaatgctctctacctaggagatgttaaagagcgtgttaagatactggagaatgctggtcatttgcctctagcttatatcacagcttcggttcatggtttaaatgacattgctgagcgactggcaactgagttaggagacaacgtgccctcattgcctgaaggaaaaactccatcgcttctaatgccaccgacacccatcatgtgtggtggtgattggcgtcttcttagagtgatgaaaggaatttttgaaggaggacttgagagtgcagacagaggaggtactgttgatgaagaagatgttgaaggggattggggtgaggacatgacattaatgttgatggaatggagaccagagat

SEQ ID NO: 8272 - DNA, 2117 bp, Arabidopsis thaliana landsberg
  unsure (1)..(2117): unsure at all n locations
gcgaactcgtcatcgcgaagccatgcgtatttatcctctacattaaagtaaaaaagattcattagacaagttaaactatataataacaagacctataagtaagcagtttaaagagctagtaatataaaacagaaccacgcttttaattatataaaagcaatctcttacaactaccaccaccagtccaccactatagcaaaatttatcttttagtggaaacaacaaataaacaaatgaatagagcacgtgaatcatatttccttgttgaagggaatctaaagggaactttcactgttggttccaaatacacacggaagtgatagaactatagcaaaccataaaataaaggtaatgagaatcattaggattcctttttaaggattggtccataaacgggcatgtgatggcacatgtgttaatctttcgaaatatttttcagataaacgaattagtgacataattaaatgttgtaatagctgtcaaaagattaaaagctgtaagaaataattaatgtacttacttgaaactattttaggagtgtcgtatctaagcaagccctcgcttgatttttggagggtagtgacgatcttcggtaaagggaatttcttgaacatatcatcttgaagccctaacttgagaagcaagccttctttgtaaagactatcgatctcaccaaagttagcgaagtcctcagccaaaatgctagcttttagtgaaggtataaggttatgtaaaaccgccttaagtctacatgcagcaaaagtgttctgcttagactcctcgaactgctcatctcttggtacatacatcggtaatggtttctccacccgcctctcagacatcatatcggtgtcggttgaagaccggccggttcgacagcgtctagggtaaggaaattcacggccaccaagtgtgggacgggctagttcacgtgatatgtccggatttcctatgtcgttgtacacatcataatcgtagattctgtctgataattttctttctcctttaccatttcctcttagattctccaattctttctcccttaatgttcttagaccggacggtgtctcgctcggcaagtaaggctgcggaagaaaattttcaacaacagttaatttttcaatccaagatatgtagttggacgtcacatttgttaattaaaaccagtcttggatatttggacccaccatgacatgactatatgatattcacaaattcacattaaatgtgattttgcttatgctttggtcaagatttaattaattacctgattagtgaagagaattcgtttggatggatggtctttttgagattggacccaagagttgcaggggaagtgaacagggccacatgcgaaaccctcgatggtgatgctctcaagaaagaactctttttggtgtttgttggtcacggtgatggctcctggggaaccaaaggctgaatccaccgtgaactcggccgtgtaatggactctttccgcctttgaatttgatttctttgaccaatctttcaaaactgccgctttactcttctttggctcattcgtttctgttacaaaaagtttgacaacaaattttgggtaaattagtccaagaaaaaaaaaaaaactttgacccaaacccatgttaaattagacgacttaaaaatacccacaatgaaaatttgtaatgacttacttggatcaacttgggtactaataagctccaagacaacgtttctaccgattttatcagtaaaagcatccaaatgcttaaccaaagtttctttaaaatcctctttgtttttgttcctcaccgtcgcaactgctctcaccttaaacttcaccgacttctcctcttcttcctgcttctcttgttttctaccgacagtgctaatacgcagcgttttaaccaaatcctcgctgatggccgctacaacgccgcttgagtgaacggctatcataggtctcggatcaaaagggttgatggagaactgtgttctctgtgtcctcttcttgatggagaacgcgattgaacggagcncaagtgatgatgactctcgaagattagcgagacccattacgcattagtaaagcgatttgaaaagattagtaggtgatgagatgtagatataagttg

SEQ ID NO: 8273 - DNA, 2600 bp, Arabidopsis thaliana landsberg
gaaactaacagtttaaagaaaatgtaatgcagaaatcttgcgagaaacaacctaagtggtaaccttccatactccatatccgccatgggttctctttcgtatatgtgagtttgcctttctagaaccatacactgtgagattagcatgtttagttttcttatgtattatagtttgaaatgttattgtgtaggaatgtaagtggtaattcacttacaatgtcaataggagatatctttgctgatcataagtcactggcaaccttgtaagatcgcttacctatcactttagcatagtcatatcacttccagtttccattgatctattgtttctttattcagggacctttctcataacaacttcagtggcgatcttcctagttccttaagcacagtgtccacactttccgttctgtaagtgctttcaaacaatctttaatggaacaatacttaagaagtgcgaaaggaaattccatgataatatctgattatcttcatttgtgacagttatgttcagaacaatcggttgacgggttccatcgatgttctctcggggttgcctttgaaaactttgtaagtttcattgcaagtagaaaaagaaacgaatgtatatattcctccatcacacttaccgtctatgttttcttggcagaaatgttgcaaacaatcatttcaatggatccatacctaaggagcttagttctattcagaccttaatgtaagttttcaataacaatctgttaatttcaatttaaactgtaagtttatgtctttgacattcctaaatgaaacagatatgatggtaattcctttgataacgtccctgcctctcctcagccagaaagacctggcaaaaaagagacaccttctggttctaagaaacccaaaattggtttctgaagagaaatcttcagactctggcaagggttggtctggtggagtagacactggtatagtgttcggttctctatttgttgctggtattatagcacttgttctttacttgtgccttcacaagaaaaaacggaaagttagaggaagtacaagagcttcccaaagaagtcttccgcttagtggaacacctgaggtgcaggagcagagggtaaaaagtgtagcatccgttgcagacttgaagtcttcacctgcagaaaaagtaacggttgatcgcgttatgaagaacggctctataagtagaataagatctcctatcactgcttcacaatacactgtttcctctctgcaagttgcaacaaacagctttagtcaagaaaacatcattggtgaaggttctctaggccgtgtctatagagcagagttccccaatggaaaggtaactcaaaagttgacagctttctacactaagcaaagctaatattctttctttgaactaaatttttctgtgtaacataattctagataatggcgattaagaagattgataatgcagcactttcattacaagaagaagataatttcttagaagccgtttcaaatatgtcgcggttgaggcatccaaacattgttcccttggctggatactgcaccgagcatggtcaacgtcttctagtgtatgaatatgtaggaaatgggaatctagatgatacgcttcacacgaatgatgatagaagcatgaatctgacttggaatgcgcgtgttaaagtggctcttggaactgccaaggctttagagtatgtgcaaattgttatgattatttctagcctctttaatgaacaacattcatcttaaaccaaagttttctgattttgtttttctaggtacttgcacgaagtttgcttgccttcaattgtccatagaaacttcaaatcagcgaatatattgctagacgaagaacttaatcctcacctatcagacagtggtttagctgctttgacacctaacactgagagacaggtaataacaatggaaagaatcagatttaatctaattgaaacattttctgagtctttcatggtttatgcatgtcaacaggtttcaactcaagtggtaggttcatttggatacagcgctccagagtttgcactgtcgggaatttacacagtgaaaagtgatgtatacacttttggagtagtcatgcttgagctcttaactggtcggaagcctcttgacaggtttcttttcatatttttagtagccaatgttgagcaatagccaatgtgagcaaaagcctgatttgagtttccttatgtaaaatgtgctttgtgtatgtgtagctcgaggacgagagcagagcaatcactagtgagatgggcaacaccgcagcttcacgatatagatgctttgtctaaaatggttgatccttctcttaatggcatgtatccagctaagtcactgtctcgttttgcggacatcattgctctctgtattcaggtaaaataccatccaaactctggagaatgtcctaattgaacaaaaccgaaattgttttgtaaagtaaccatatctctctatctttctttgttaatttagccggaaccagagttcaggcctccaatgtcagaggtggtgcaacagctagtaagattagttcaaagggcaagtgttgtcaaacgaagatcaagtgatgacatggattttcatacaggc

SEQ ID NO: 8274 - DNA, 2526 bp, Arabidopsis thaliana landsberg
aggtgatattgtcaagcaattgaggaatgatactagatcgaaaattagaataggcgaagcaattccgggatgtgatgaacgtgttattactatctatagccctagtgatgagaccaatgcctttggagatggagagaaagttctttctcctgcgcaggatgctttgtttaggattcatgatagagtagttgctgatgatgcgagaagtgaagatagccctgaaggagagaagcaagttactgctaagctgcttgtaccttcggatcagattggttgtattcttgggagaggtggccaaattgttcagaacattcggagtgaaactggtgctcagattcgtatcgtcaaggacagaaacatgcctctatgtgccttgaattcagatgagctcattcaggtatctgggaaggaatatgtgtttctttgtgttatgtgttttactttaattgccttttcctatgtgtaacatttatgtttcacttagccttttattttcatctctttttctttctagatatctggagaagtgctcattgttaagaaggcactgcttcagattgcttctcgccttcatgaaaatccctcacgtagtcagaatctactttcttcttccggtggatatcctgctggctcactcatgagccatgcgggtggtcctcgacttgtaggtttagcaccactgatgggttcctatggacgtgatgcaggagattggtcacgccctttataccaacctccaagaaatgacccaccggcaacagagttctttattcggctagtttccccagttgaaaacattgcaagtgttataggaaaaggtggtgctctaatcaatcagcttcgacaggaaaccagagcaaccattaaagttgatagctctagaactgaaggaaacgattgtttgataactatatcagcaagagaggtttgactttctttcattggtcgtctgtcttttagttaagaatattttttccagcttttcttccttgacagtgtctaatctgttttaggtttttgaggatgcgtattccccaaccattgaagcagtaatgcggctgcaaccaaaatgcagcgacaaggtggaaagagattctggacttgtttcattcaccactcgtcttcttgtgccaagttctaggattggttgtatccttggtaaaggaggagccatcataactgagatgagaagaatgaccaaagctaacatccgcatacttgggaaggaaaatcttccaaaagttgcatctgacgatgatgagatggttcaggtaaacttcatagtgctactcctcaaattttcattgcagtttctcctctcacgcttaaggtacttcacatggagcgttaacagcaatagcaattttgatgttcagatttctggagaacttgacgttgccaaggaagctctcatacaaattacatcaagattaagagccaatgtttttgaccgagaaggtgctgtttctgcacttatgccggtcttgccttatgttcccgttgcaccagatgctggtgatagatttgactatgatagtagagatagcagaagacttgaacgcgggaatccttatcctggtggttatggctcaagtggtgtgtctgctgaagggtactcgccttatggtgcgccggtatgtcttctaaaaggttcttttatgtgtaacgtgtttttgaacatattaattctctgttaatgactcttgggacatgtttttgtaggttggtggtagtagtagtactccatatggagtgtatggaggttatgcatctggacgcagtagcagttctgggtgagattatttcttacctgatgtatttgtgacattatacaaagtatttacccgtcatattgcggttatcaagtgtttcgaatgtcaacatactgcataaccttttgcttttcatttgcctaacaactcctggtggctgatccttatcatgtgttttgtcatcaggttatcaagtcattcttcaacctatcgacgcagaaactatgattactagaagctattggtggaggtgattaaaaaggttagattataaatattgtttgtttaagtccttttaaactttagtatacctagctatataccccaagttcatgagataatctgatctgatctgtcccagtgtcagaatctgattcactgcttttttccctttgtgaccttttccccatcccactaaaacagtgtgagatcctgaagcctgaagccaacccacagcccacagttgaagccttttcaccaaacaagatgacaaagctgaaccaccaaactctacctaggagaactgattacatgtggatgagatatttaagtttgtttcaaaactttccatgtcctcttgtaaccaaaatactgccaagttcctacccattaaaccttatccagttggccttggctgtaatgctgtctatctttcagtttacctttgtctttccttggattagattcaaaaaaccttagtttggttgtgcgtagttccgttttgtatgaattatatatgttaaagctctcatgt

SEQ ID NO: 8275 - DNA, 475 bp, Arabidopsis thaliana landsberg
  unsure (1)..(475): unsure at all n locations
ttacaagatgaaacgtttaaacttcatacaaaagtgtttaatattcttaattacttacggagagtgtcaccaactttnnnnnnnnnnnnnnnnnnnnnnnnnttaaacgcatctccaagagtcttagattttggtacgatccaaccattttctcctccaacttcaaattcagtgcttgaaacacatgaaaacatgtaaaatgttacaagaaacataacgataatgatcttctttgatgaatccatttgttgtttttttggattgatatgaaggaagctctaaccaaagttacagagattgttttttttttagtgttcgtaatgacttgtgacttgtgaggttttgagtttaaaaagagtgagacttggagatttgttagagttgaccacttcttgagggatattaatggatatctctttgactgggtattttaatttcttgaatcanaaagatattttgtcgaaacaacatgact

SEQ ID NO: 8276 - DNA, 999 bp, Arabidopsis thaliana landsberg
gaacaacaggtgatcttcttactcttgactcttgagcctcattatatgattatgtgtaactctacttctggtcaggtacacaggtcaaataaatgtgtattgtctattaatgaaagtatcgtcgctgttcaggaatatgaaggggatggaattgattggactaaggtcgaattcatagacaatcaagagtgtctaaatctgattgagaaggtaagttgtagcgtgccatcttactcatcttgtctttcctccttatggaaagggattgtataatgctttgctccaaactatgacattaaggttttttcttacatgttttagaaaaccatttcgcacatcttttgcagaaacccattggtttggtatcgctattaaatgaggaatcaaattttccaaaggcaactgatacgacgtttgccaacaagctcaagcagcatttgaatgctaactcttgtttcaagggagagagaggtcggggtttcagaattaagcattatgccggagaggtcagttgttaccccaaatctaacaacgtatctgcatgaatagttctaatgtgatatgtatctgtcaaattatgaaggtgcaagaaaatgaacaaacatctcactttacattatggtgtttaataggttctctataatacaaatggcttcctggaaaagaacagagatccgctgcatgttgatcttatccaacttttatcattgtgcaaatgtcaattattgaacctgttttctactaagatgcatcacgattttctaaagccggcaaccttttcggactccatgaatcaaagtgtgattgccaagtttaaggtgacaaggcttgaattatgcatttttctgttttggttgaaatcttcctttcgtaaagttttctcacaagaatctctttcatcagtatatctactcactttatgtttacagggccaacttttcaagttgatgaacaagttagaagacactactcctcattttattcgatgcataaaaccaa

SEQ ID NO: 8277 - DNA, 1603 bp, Arabidopsis thaliana landsberg
catgtcatgcgtgaaatcttatcatgtcaaatgtaaattatattgacccatcataaactttatcgccaaatatcttttctttttatccaaaagtaatattcggtatttttttacatgtacaaactaaaaaaaaatatatattaaagtgaacaaactgtacatatgggctaaaaactaaaagtcccacaaacattgagattacaagaaacattttcagtccaacatgagccataaagcattgcttaatggagtaaaactcaatttaacagagtggaataaattaaacaaaataagacgtgaaggagcagaagcaagcatatcaacaaaaacgcctttgaaacgcaaacgctacaaaattgcgtctggcgttacagtagattgagatttgaacgtgaaattctccgagtccagaaacattcctctccttccgtcgtcgtcaagaagatcaatttcattgaaatcgaaagagtgtgcttgaatcacagcttatgcagacgctacaccagtcccaacttctccagaatccggccgaggcggcgaacaatcagtctgaatcggacgcgccgccgaaacaggtggctcaggccatggaacgactcaatcaagcggctagggttatcgccgatatccgcctcggcgctgaccgtatccttgaagctatgttcgtggcttcgcaacctcgtcacacagacatgcctcttcagctctttctcagagaagacgcctccatgcgtcaacatcttcaggatcttcgcttaataggtgctgaaccaaaactgaatcattttcattagtattgattgattctctagattagggcttttaaggatcgatcaatgtttattgcttggttcagggaagaaattggaagaatctggagtgttaactgaatcacttaggtcaagaagtaactcttggggtcttcacatgcctttggtttgtccagatggtgcagtcgttgcttatgcttggaaaagacagcttgctggccaagctggtgcttctgctgttgatagaaccaggtatcagattcgttgctaatcattttaaagcatacttagggtttaggttcgagtctgcatattagggctgttagtgaagcttggtggtaccaacttggagtttcatcagctaaccaattctactgaatctcatgcattctccattttctcgcgttgtgtataatgactgtaggttagctctcaaggccttcacggatcagaaaagacgattcttccctcatattgatgatggattaaagatggaaccaagctcaaaaaaacatcgtgcctcccatttgctattagaaaatggaagagaggagccggttgattacaaaacattgccagatatacaatcgcgtttagagaagctggttccgagtgtgaaggtgtctacttatggacgattgaactggcttaaaagagctaactctttacctgggtcaggtagtgatgatcctacagaagcatcgaaacctattttccagagttctagtaagctgagatcagggttacagactgaagttgtcgacaagattgctgttattgagttatcatttccttctctattcagagctatagtctcgttgagtccagcgggt

SEQ ID NO: 8278 - DNA, 1493 bp, Arabidopsis thaliana landsberg
  unsure (1)..(1493): unsure at all n locations
cgacttgtgttacatcgcgggggaagatgtgtcaatctcgaccgttggattgaaccagtcaacaacttcttagatcggagaactctccacgtggccgaactcgccgttgatagttccgtaattnnnnnnnnnnnnnnnnnnagggaacgagaaaacgtctttaccatcatcaagcccatcggttcgaacggttaagttggatttaagactctcgagaatatcctttggcttttgggtaatggctggtttgactctggtgtcttgtcgcttctccggcgaggctaatggtggtgttcttgtgatcgcctgcgaacaagtgtgtgttcctctgtacgtcacttcgaaaaccgtagcatccccgtctgatctctggacttgtttcgttgcccaacagttttgtgtgctacgatgtgtgcatctgtaataactccttgggaatttggcgcctaaaatgtctttttgaccatattttctccagctaaagacatcatcttgaggtccttctaagcctctctctgggcttattctcactttttctgaccactttggtaacatctttctgcaaaaattacccaaatttcaaattagtttctagaaaaaatgagatttttaaattcaatttggtgaattgtgaaaaaagatatcaacaatttgttaccttttctttgaattgaaaatgtaatcttggcgatgatgactctcgctagaacctcctccatcggcaaactcttcacttctcggacttccgtttatcgatgccggagattctggaacactgccgggatttgccaccgggactacagtaaccggcgtcggaataagttgtacgctcggtgaggatgaccagtttagcagaagaagagatctctcgtaggaagaaactatctgcttcaccagaatctcgttagtctcagcaacagccgtcgccggtgatgaaaatgatgacgacggcgacggagcttctctaagtcgtgcctgaagctttttggccgcatcaaatccattgataagctcgcttagcaatgtcttttgctcccaacttaacatatctcttccttccatttttagtatatgattcccaaaatagattttttttttcctttaggtagtttactctaggaaattgatacaaactatgatgagaaagatgtataatgtgtgttttaagtataaatcaagaattggttatatagatggactgaaagaatgatatgatcagaaaaatataatgtgtgttgagtataattaagaatgggttatatagattgaagaatgatatgatgagaatgagagtgttataggattggtgataaaaatggatgagtgttggttttggtatataaaggcattggattttcagtgtttgaaaatttgaccaaatgaccaaaccataaataattattttatttctttttaaaagagagacaaaactttcaaattgaagaaaagtctttggtataaggaagtatagggccagagtgtaattgataagt

SEQ ID NO: 8279 - DNA, 1838 bp, Arabidopsis thaliana landsberg
  unsure (1)..(1838): unsure at all n locations
gagggtctgactctacatccaaagatagaaatagggtaatttagttaagcaagactcaagtatcaggaagtgagatcactactttgcaacaatctgttgatagccatctgaaatcttcttcagatgctaatctcaactcatggaaacatccatggcacggtgtattgacataatgtagcaagttacaaacttacaatgcaacatatggggaaaatctgaggaaaaacataagaaacgatgaacaacataaacttaactaataagaataatgtggtattatatattatgaaaaaattcaataatctgtttttaatgtaagttaaatcccgaccaagaaatgataaaaaagatatttgttcccacattcttctggtacatgtttccaggtcttctcctcaatctttgcattttaacgctcttcctttaatacatttttttttacactgtattaattatgagataaaccccaaaaaaagtacattggtacacaagcataaatacaaaaatatgcatgcttttttcagaactgtttaaaggtaaagcctttttctgcaaattttcttttcgtgtatgaccaaaaaaaaaaaaaaaaaaaactttattctaaaaaataatagaaaagtagtgtgtcttcatattgcagtgtcttgtaagaagaaattcaaaaacccacactgacactttaacacattgcttcgccttctctaccgtttcgatttcactcttaattatgtcaaatccgtaagcttttgtgatcatcaacaccaaaaaaaaaaacctaactttatggcggcgacttgttctctgctcgcgtcctttctcctctgttttgctcttctctccgccgtttctttcgcggcggaccctttcgtctcctacgacttcagagtttcttacctcactgcttctcccctcggcgttcctcaacaggttcggtgttttactcacttacctttcctgaaaatctcgggttcagtgttttagtaaaggttctcgctttcgattgagagattcaatggcctcttagaatgccttttggtttctgaaactcgtattcttacctctggatctatatatacagtgtgtttgagttagctatcgcaagtttctctctttcggtctctaaagttgatttaaacccattaccatagaatctcaagctcgtcatttacatgggtttaggtattcaactaatggttactgttatatgaaaatgttgtttggcataaaaaaagattggtcttttaatgtgttagccttttttgatttgatgttatcttcgtatattcaggttatagcnnnnnnnnnnnnnnnnncaggacctctgcttaatgctactaccaactacaatgttgttgttaacgttttcaatcatttggatgagcctctcctcttgacttggtgagaccaagagctctgtctctttaaattacctccttattatatgagtttctaaagactaatatgcttcttggtttcttctatttgtctgttgaaataggcctggtatccaaatgcggcgtaactcgtggcaagacggtgttcttggcacaaactgccctattcctcccagatggaactttacttaccaatttcaagtcaaggatcaaattggaagctttttctactccccttcactcaactttcagagagcatctggtggttttggtcccatcgtgattaataaccgggacattattcctatccctttcccacagcctgatggtgaactcatcttcattattggtgattggtacactcaggaccataaagtatgtaatcaacacttctgtatatttcccttctatgcattttgtttttcagcacccatgttttat

SEQ ID NO: 8280 - DNA, 1155 bp, Arabidopsis thaliana landsberg
cccttttgtcttttttcaggcagtgtttgaatcgacatttaagtctttaaagaaagatttaactccttcatagagtggagcaacagattgctgctgcaggagcatggaagagcattctcgggagccatccccttagaagtcctctgtatccatcttttttcactatcgttctaagtacatggctaatagaactactagtgaagcggtcacatccacacacaccctgcacattaacacagatgattgaggccatattttacacattttatagcaaagaaatcatggacattgctcttaaactttatgctaggtcaataagagttttgcaaaagatgtctaagctctatcaagaaacactaatattccagatgcacaactacaaatagtcaaaaacatttaagcggaggatatacaagtaaaaacatttaagcggaggatatacaagtactatgcactagaaagccttaacatatctcgaaatgctaaagattctacagctagacctgaaattatttgacccctccccatctttcacacctcataagatcacatttgaaacgaaacaaattaaaaacttttcctacattcaataaatgctacactaagacagaattaatgatagctcaaccacgaaatgtcattacctgaaacccttaaacacactctacctcaaacttactggtaaaaacattgaaaccaaataaccactcttcctacaacggtagctctatactagtgtcaaaccgtgatgaacataaaaccgcaaccacaaaattatgctgcagctctagcacatgattaccatctgccagtagtcctgatagctctttttacacaaaccactattcacaaaatacaacatctaaccacacaaggtgaaacaagtccatctaagaagctttagaccttcacatagactcgaaatccaacacaaatgcatcaactctcgagactaaaagcatcatttaaagaagcattctgcagcactacgcacacataaaagcataacacatataccgtttactagtaacactaacaccactgtgtacctaatcacatcgccaacattattctcgccaaagccgtagagattagagacaaagagcaacagatcctaaaaagaaggaatcattcacctgacattgcaactgcgtc

SEQ ID NO: 8281 - DNA, 1243 bp, Arabidopsis thaliana landsberg
aaaaaattggtattagtagaagaaaggttcctcaacaaaagagagaaaagtattcctctaatatcttccttttttcttctcaatttatttcattctcaagttaggagttgtatgtacttgccttcaatttatttcctctccaccagtctgaccctaacttgccggataaaacatccaatcaaggatctaaatatgtaccccacgcacttcaattaccatcactagtcaaacccaacatttaattatcatcaccacttccaacgttcttcattttttcttgagatcattacaattaattaccacggtcgctcattaatatttttaccttgaaagaaactaaaacgttctactcgagatattattttccaaaaactcttttatacggagtatacaagcatgtgtgaaactgaaaaacatcaaccctagagagaaaataagtacatataggtcgacgtgtaacgaaaatacaatttggaattattaggtcatcataattggttgagaacataagaggaaagtaaatttgcatatatatgtaaatacaaatatacacatacccttacaaggccaagaaatcataaagtcaacattgatacaaggaaataaaataaaaaagatattcttagatctgtcctctgaacttatatatcaacttcatctcccatctctatcaatctttctctctttctctgtaatttttttccctgcaaacctcacaatactcataatcataaatcttccaaaaaatctctcacctaaaaaagtgtttcagagatgagaaaatctctacttctaacattgttactaggagtatctttatcagcattcttgatagtaatcttctttatcatcttccttagaagaaaagaatcatcatctactgaatcagatcaatacgacgtcgaatcactagaccacaacaaacaaggcttctcctcggaaacagaggaactcgtaatctttcaaggcggagaagatctcacgatctgcgatatcctcgatgctcccggagaagtcatcggaaaatcaagctatggtactctatacaaagcgtctttacaaagaagcggcaagattagggttcttaggtttcttagaccggtgtgtacagtgagatgggattctaaagagtttaatggcatcatagaaacacttggccttgttcgacatgagaatttggtataatctgaaaggtttctacgctggaaacagaggagagaagcttatggttcgtcctttcttc

SEQ ID NO: 8282 - DNA, 725 bp, Arabidopsis thaliana landsberg
ataaaaacacacaagttttcaataatagggagcaaaatcaactcataagtccacattgatacaactaattaaaacatgtttcagatctctttatatcatttacttcatctccatcacataccatctacacatctctctgtatctctactgtaaacaaataaagtttcaattattcatacactttttcttattccattttgtattctcacacctaaagattccaactttaaatctcttgcttaatactcaaaatccaatttccttgtctacaaaagaaaaaccaaaaaatccaacactattccatgagatgagaaaatcccatttggtaaaactgatacttgcagtatctctaccaacaacattcttgatcatgatcgccatcatcataatcttcatcttctgtagaagaacaacaacagagaccaatgaagttcaatacgacgtcgaatctccttacgagaaacaagaattttccgataacggatccgaaacagaggaggagcttatcatcttcaacggtggagaagatctaacgatctgcgatatactcgatgctccaggagaagtcatcggaaaatcaagctacggtacattatacaaagcgacgttacaaagaagtgggaaagttagagttcttaggttccttcgacctttatgtgctgtgaattcaaattctaaggaagtttaatggcgtcatttgagtcacttgggttttgtttcgacat

SEQ ID NO: 8283 - DNA, 882 bp, Arabidopsis thaliana landsberg
acgatgtggagatccataagtttggttccaaatggctttcactgctcagttctctcatggtccattcttgaatacggtgatcaaatggcttctctgacttactggatcatgctaaagactctctcaaatggactactgattttctcatcaatgctcatccttctccaaatgtcctctatattcaggtacacggtagtgatcaaacacacaaatctttcataagttctcaagttatattactgactttaacattgtaggtgggagatccggtgacggatcataaatgttgggatagaccagaaacaatgactagaaagagaactcttactaagattgatacaaagactccagggactgaggttgctgcagagacagcagcagctatggctgcagcatctttagtctttaaagaaagtgataccaagtattcaagcacgcttttgaaacatgcgaagcagttgttcgattttgcggataataacagaggatcttacagtgttaatatacctgaggttcagtcttattataactcaactggttatggagatgagcttctttgggcagcttcatggttgtaccatgcaacagaggatcaaacatatcttgactttgtgtcggaaaatggtgaagagtttggtaattttggaagtccatcatggtttagttgggacaacaagcttccaggaacacatgtataaagaacaagacacttctttacaaatcatgattcatgtttgtttgattataacattttgtgacttatctaatacatttgcagatactattatcaagattaacctttttcaaaaaagggttatcaggaagcaaaggacttcaaggttataaagaaacagcagaagctgtcatgtgtgggcttatacc

SEQ ID NO: 8284 - DNA, 636 bp, Arabidopsis thaliana landsberg
  unsure (1)..(636): unsure at all n locations
ataatgttggaaagtaaatttgaacgcatggcatattgaactattcaaagattacttaaccaattgagcagagggattttgttaaatttacaaaccgattaatatatgtagtttatacatgaatcgaatataacaataacattgtgagatctaaaaccttgattaatcataatcgtaatcgtaaaacttgacaaacagcgcgagcgattacgttcggatcaaacccaagtctgaacacgctcaattcctccaacccacgcctcgtctcagagctttccttcatgaagaatagatgaattacgatgagaatgagcccttgcttgctctacaaannnnnnnnnnnnnnnnnngataatgaaatcagtgctatgctgataaacaaactagttcacgtgaagagagattttggattgctaataaaccaaatttactaagaagatgaagaaacccagaatgcaatgttcacaatatatatttatcagtctgcaatatcaacaataaatcttgcagtgcaattggaagtgtgcattatttagtattataggttatgggtccaatccactctctaacattattatgtattattttcaaaaaagatgacagaacgacgtagtttatatatttatacggttgcaa

SEQ ID NO: 8285 - DNA, 2010 bp, Arabidopsis thaliana landsberg
acgtatgtcacctcatcctattactacatcatggtcataatcatcgatcttaataagaggttaatcaataagaagcatagtggacaattgagtccacgtggcacaataatcaatgggttcaatcctacgtacattgggaccggccaatatctcaaaactacatttcatgtttagaaatttaaggtggacaaaatatgtgttacatgtcttgtctgttatcgatctcttcacaaagaaataaaaccccagatatttttagagttacgtaacaaaataattatgagttatatatggttaaaagttaatctaatcagaatattattagaacaccttaccaaaaaaaagaatattattagtacaagaaaatcttgaatatatgttctgttttgggcacttaattatatatgttcatacctgttgtttacatttcggataagcaattatatactcaattcttgaatacatctatacatgtttgcgtacatatcatcgatctgcctagaattgcttatccgaaatgtaaacctcatatattatacaatatataaattcgtgaacaaaagctaaccacatagcataactcattggattcttttgttttattatatatcccaaatacttcacttatgtttagttgggcatccattatcttttatagaatatgcattaatgtcactttaagtgacaatagtggctactttacttagttggagaaggtttgtgtggaattcgtatcttaatttttttttaaaaaattagatagattcaactgtattatattaggtcgcatgactttgttgatatgtatatgcacggtgagaatgagaacaaagacgaattattttattatgcaatccgaaaaagtttgatggttcgatcggttcaacatcttgatttgcattgttttaattggaggttctagtctatccatcattattttttttatttttattttttgaaatttaaactatccattatgttaataattaataattcaatatacttatccaaatagaggaaatgtctcacgctcactcgtctgcatgtataaaaacataagtactttagaagtattatgattgaaccaactgactagtgttgtacaaatgatatgatgttgattatttaacaatagtaacaatattggaatgtcttcatatatatgaagatcattctatgttatattcgagttcaagatcatataaatttatagtgaagtataccaaccactgtatcatgcatgaactcatcataataggatttctattcgtgtattagtgtaaaccatatgtttcatgatcaaaattttgttccaattatgtaatgatctcttgcacattttaatattatagttatgtatgtggctactaaaattagcaccattgggtgtaaaactttcaaattaaaaaaaaaaaaacagatgaaaaggtgcagtttgtgtcatgcaagtgcggatgtgtggattccacgtaaatcgactctggcccgctgtcggagacaagtgtcaactccttacgatttagttaacgaatcgaatattttacgtctctgcgattgggaattatatgcttacacaaaatccttctgacaaaatctggcatatgtatctaacttttgatttgtcacgtaaaaatcattcgtaactctaattaaataactttgagttttcaatatgattcatatatttttaccaaaatatagaatcaatgtgacgagctgaaccatgcacggtgtcggacgtctgtctccacattttttttttttttttataactaaatatccagaccacacagtgatcttactatctcactgggtctaaactcgcgactaaggaattttaagcctccacttaaaggtccgctggaactatgtggtctgaaacactagagcaaatacgcatgttaattccctggtgactaagaatcgaacctgaatagcgggcgcctcagtcgagtttcctttaccactaaaccacgatgcctgattatctccacatcttttcctatacac

SEQ ID NO: 8286 - DNA, 1332 bp, Arabidopsis thaliana landsberg
tcggaaagcttaatttcatgttgattgttgtttttgcagctatggagttggctctttcattggagaaactagtcaatgaaaagctcctaaacctgcacagtgtaagaccatctctctcattaggatccagttcttgtttatggtattcaagtcataatctagtttcttaatacaacttggtatttgaataatgtggtcaacaggtggcttccaagaacgatgatgtccagttggcagattttattgagagtgtgtttctgaacgaacaggtaaaacaaaagacctacacgttctatgttagtggcaaagatatggggttcttgatctgtcaaaaatggaatctaatgaagtttaattaacatcactttgcaggtggaagccattaagaaaatctcagaatatgtttctcaacttaggagacttggcaaaggacatggtaaccatttgtttattcaatttaaaactaataaaacacacctcaattcgtccacttcgtgtcttacactttgtttatttgtaatcaggaacatggcatttcgatcaggagcttcttggtgctgctgcttaatctgagttttagctgtaatctcgcagtttggttaacttttgagttattttgagtatgagatgtaacttttaaggtagatttgatcaatatcgattctgttgtgagagaaaacaagctattacgctccttggggttaactttctttgtgttttcagtattatggttttgtccacttcgtaatatcactttcctttagaacatttcaaatcagcagttgttttgaggtgtaatgtaatggtcactgatattttctattacccctgcatgaaagtagtatgttttatcaacaaagtggtaccaaaacattctctatccaagaaaactacaaactgagtgagtgtccatactttcaaagttttgagtcaatttatcattttctcatataccaatcaaaatctcacaattacaactactctttttttcttctttatacgatgatctttttttgacacaatatgatgatcatgaaagacaattgattatttattcacatgtatcaaatattctaaatactttgattttatattgtgcaaaaaacaaatatcaaaattaaaattttagtaaaattgtataaattgagaggtagaaaaaaaaagttatttgatcaacatggcatgctatgggtgaaggccccaattcatttgaaaactatgatcaacctttttgttaaaactcactaattatttgaagtcaccaaaaataaagaccatttacggttttggtaacattatagcttagacttggtgaaatcaaacaacaagccc

SEQ ID NO: 8287 - DNA, 661 bp, Arabidopsis thaliana landsberg
taaaaggtcttactctaaggatattccttattcatcgttaaaaatcatttatattgttcttttaagttaacaaaatattttgctaggagataatttattagccctaaattgacaccctctcttctctatataaagtcatcgattcattgaacaagacatccattagttttttttgtttttttttgtttttttctactaatttagttcatgttgtatcatttataatttcatatagctttatatattcttatcgtttctaatataatcattttattatttatgcagatccttagtaaagatgttaatggaaaggcaaaattatagacttgatcgggatgtgatgattaaagtttgaggtattgaagataaacatgttattttaactatattacagaattgaaacatataaaaatgccatggataagtacagagcaattatgatgagtcgataaaattcatatgtaagtgatataattcttcgtcttcaatttcgattgaggagccttctctctcttaacccactcttattcttcagagagagaaggagaattccggcgagagctggtttttcgttttatacatagtttccggcttttgacggatctctctttccgcttagtcagattttaataattttcggtttagcgtgagatcatttccg

SEQ ID NO: 8288 - DNA, 928 bp, Arabidopsis thaliana landsberg
aaaattatgataagccgcacaaattatgtcacaaagtctccactgtgcttattgtttttatttggacatcttcaaaactacatcaaaattgataagaaaagatttaaaaaaacctacttatgttgccaaaattatttcaatataatgcgttgctaaaaccacgtcattcatgattatgatttacactctttgtcgtccattggtcaaagttggcatacacatacaatataatcacatgatcagaaagaaaaaagtataatcaacctaccctttcttaaaaaaatatttaaatataaaaataataaagctaatgtattttatgcatatacatttatattataatcacacgatcaaaaagaaaaaaaaaaagtaaacctacaatttcttaaaaaaatgaaatataaacactaataaattaattaatgtattttatgcatatgattgttgcatatagcataaactgtttttcaagtgaacacaaattatatagatttagtgaagcaactaaaaaaagaagaaagatggaaaacataatagcattattttatttacccaaaaaatagtattttaaaaaataggctgagaagaagaagaattggatcacttacatatgaattttatcaactcatcataattgcaatgtacttatccatggcatttttatatttttcagtcctgtaatatggttaaaacagatagcaaagtagtttcaattaactttaatcatcacatcccaatcaagtctataattttgcctttccattaacatctttactaaggatctgcataaataataaaatgattatattagaaacgataagaatatactaagctatatgaaattataaatgatacacaacatgaactaaattagtagaataaaagagaaaaaataaactaatggatgtcttgtcagtgaatcgatgac

SEQ ID NO: 8289 - DNA, 1984 bp, Arabidopsis thaliana landsberg
attcctgcccccaataagtccactttcttggggagggttcctgaatgcaacaaaacataatcccaccaattaatcttaacaacgacatttgggatatgattatggggttctcttccgtcaacaaatagtaaaccaggccactttccggtttacgtaatattggtctgaaatttatgctaaaacgaattcggtaccgttttccatcaatatctttgaatcaaacaactctttataattcttagtgcaatcacagtcaaaataactcaaatagcttttggtcaaaatatcagatcaaagcacaatgcacttgagagagtctttacaagccaaaagtaaattttcatgaattgaatcaaaacatgatgaacacttagtaactcctgccccaataggtccatttctttgcaggttttcctgaagcaaagcagagagtgcctgcatcgaaaacattgaagcttcgtgtcaatggatggactaaatttatgagccaaatttctcaaacagattctaaatttagagggtctctgaccttcagggagttcaggctgatcaaatggagaacaaagggttttagctgctcctgtttcacctttcgtacgtgccttaacatctctttccacttcctacaaagaatttaagtttaaggaacttaaaattgttatcttcttgagttttaattctataagctggaataagaagtttttgctgtaacatacctcttcatcacaccagggagccaaaatgagtttcttttcgttaagagctttgataaactcatcccaagtctttacctcttgaacacatgcttccctcttttgcttagcaacttcatacatgttttgctggatcttttcaagcagttccttaacatgttcgactaagctacctcttgggatatcttccttaactccgttgtcacgtctcacagttctgacctatgggataaatgaaatccgtttagctacattacaagttacatatttaaaccaggcacttacttcaatattatatgtcgaaggaattgatgagatattaaacggactgacctgatcattttctaggtctctgggaccaatctcaatcctcaatggaacacccttcatttcccagtctgaatacttccatccaggagagtagttgtcccttaaatcttcttcagcacggataccggcttcacacaaggcagatgcagtagcagtacaagcatcataaattccttgggtattagcatctttgtagggaacaggaatcacaacaacttgcacagatgcgactttaggagggagtaccaggcctttgtcatctccatgagtcataatcatcactccaatctataaaaggtttgaaaatgataagttaacagttgtagagcacatgagaaaaataatctaagtacttccaagtatttaccgtcctggtactgtaggcccaagaattctgccacaccatttctgtctctgctttctcattctcaaagttgatctcaaacatcttcgcaaagttttgtcccaaacaatgagaggttgcaccttgtacaccacgaccagtgtttggaatgaaagcctataaaatcaaagttcaacttcacagagagtaaacccacaagaaaaaaggttaagtctcagaacaaaaagattacatacctctacacttgtagtgtaaagtccaccagcaaacttctcattttcactcttcatacctttcacaactggaactgcaagatattcttcatatatgcgacggtaaagctccaaaatttgaaggacctaagaacaacagaagccgtatgatgaaacaatttcacctaaatgatgttgaactgcttaatataacgcttagtttgcagcaaaaaaaaaaggagagattggatcacatgcaaaagttttaggttcacctacctcttcacctgcttctgcttttgtggcgaatgcagtgtaaaatacctgccaaaggaactcacggctcctgcaattaaataggttag

SEQ ID NO: 8290 - DNA, 1391 bp, Arabidopsis thaliana landsberg
tataacacccatatttgctattataataaacatttttccgatttcttattctaactatagagcgggggaaaattgcacttattgacttcctaattggatatttctatttccttaaattttaaatctcttacatatatattcacaattgatttcctgcaaaattttaattatactagttgcaactaaattaaaaatgttgtcgagatcttttattctaactacagaaccgtagagaatcttctgactttgttattacgtcccattttcatttccatgtgtctatgtactctccatcttcccaaagataacacaataaagtaaaaagaaataaaacttaaaatccaagcttttcacttgtcacccttatttagtttttttttggaccattttcttttcttgctctgatgaaaagctgttgtcttctggaagaacctcacaagtctattaatatatgtatattcccaatatccctttattcgttctgcggaaagcaaaagattgagagcgacagagagagataacgagagagagagagatggagaagatgagaggacatgtattagcagtgccatttccaagccaaggacacatcaccccgattcgccaattctgcaaacgacttcactccaaaggtttcaaaaccactcacactctcaccacttttatcttcaacacaatccacctcgacccatctagtcctatctccatagccacaatctccgatggctatgaccagggagggttctcatcagccggttctgtcccggagtacctacaaaacttcaaaaccttcggctccaaaaccgtcgctgatatcatccgcaaacaccagagtactgataaccctattacttgtatcgtctatgattctttcatgccttgggcgcttgaccttgcaatggattttggtctagctgcggctcctttcttcacgcagtcttgcgccgttaactatatcaattatctttcttacataaacaatggtagcttgacacttcccatcaaggatttgcctcttcttgagctccaagatttgcctactttcgtcactcctactggttcacaccttgcttactttgagatggtgcttcaacagttcaccaacttcgacaaagctgatttcgtactcgttaattccttccatgacctcgaccttcatgttagttcatttcctaactactctgtttttgccctagttactctgttctttttgacctagctaccctgtttttcccttagctactctgttttatcacctaatgactatttttctgttctctgatttccgtctacaggaagaggagttgttgtcgaaagtatgtcctgtgttgacaattggtccaactgttccatcaatgtacttagaccaacagatcaaatcagacaacgac

SEQ ID NO: 8291 - DNA, 917 bp, Arabidopsis thaliana landsberg
ataacaaaacattgataatacttaatacataagtacacttgtccatgagcacaaaacctcttcagtgcttgatcatcggagattctgattctgtctatcggagactttgatcgtagaatttcccggtcgtcggagatggagagattgaatgagctttgcgacatcatagagcagaatccgaagcaatttttggataagcttccttggatatgccaacaatgtccacaatcgaagctgcttcgtgccgaatcgcctaggttttctcaaagtcatctcaatgcgatcttagccgtgactcgaatcctctccaaaatcgtcgacacgaccgatgaaaacgccaaattcgtagtgctagatttcctccagactgttccgaaatcgttccaccgttcgttttggccgtattcgttatcgttggagtcgatttcggcgttttattgcagtttcttaggttacgtttcgtgtctctctcagttgtatgttttaattttcaatagttgtgaaaattcatatatccaggggcttgatgttgtgtgatgtgttacttgacttgttctgtacttttactggttatatgaaattcaaaaggtttgctcatattttgaatgtacttactaacagaggatggttgaagggtatcttcttagagctgcccaaagaagtgacatatttgctcataccctcatttggcatttacaggtgagtttgacttcgtcgtgtttgtaaagatatcaattttcttggaaccaaaagataagacttttttttattaaattgctaaactctgtttctatcaccagggtgagtctgttgaggaaatagtgaaagatggtgctttcgataaggtttgtcattgttacccttttgtgcctatattggcattatttttatttggctactatagtaactatgtaact

SEQ ID NO: 8292 - DNA, 476 bp, Arabidopsis thaliana landsberg
aaattcgtttcatgatggtctatagttttttgtttgcatggcttattcctggaaaaatcttttggagatagcaacgttaatacttgagtcataaaacattaaataatcagtagtatattcatatagataatctcagaaaatgttttctacagctctgtattgtttggctctgtaacattttctgtccatgggattgtctctattatattttagaatgcatcattccaagaaatcttgtcagacgttcggcagcatatcgttgatggtttcactcccaaggccttgaattttttcagtagagagtttgacttctttgaaaaggtcacatctatttctggggcattacttcctcttccaaaggaagaacgagtagctggtattaggaggtagcattatcaattgtactttttgtttaaggagctaatacaaatgattcctcataagttaaaagccagataagcgaataatattttttg

SEQ ID NO: 8293 - DNA, 2495 bp, Arabidopsis thaliana landsberg
  unsure (1)..(2495): unsure at all n locations
cgctcaaatctttaacaatattaacattgcctctcacgttttctgtattttgtagcaagggaaaaggtggtcagaatacagtggcaaagcagaagctaaagaaagaagttattgaagccctaattgaaatgctaaacaacgtcaacccttatgttgaaaaattcagacaatctagagagagaattcaagctgataatgatgaactgtttcacatgcggattgttgcatatcgaaagggtgttgataggaggacatacaatatgcctacatcatctaaggttgccgctttgatacctggaggttttgacccgaagatgtacgaccgagatatatatagttcttgaagaaaagactacaggtcatctaaagcggataagtcagattcatatctcctatttggcattgcaatttcctcttattttgtgctatggcaaagatggtttcactcctgatatagagaaatgcttgccaatttcatccaagaagaaaaaaaaagtgtataagcatgcgtcaatggtttgcattcaggatacaagagaggccaaacgagtgcaaaaccttgacacgctcaaagaggttgtttcaacaatttctctgtgatgcttatacaactattgaatctaactgcgtttcttatatcatgtttaatcaatctaagttacgatgtgagaactacagcagtttgaaaaaggcctctgaagctggaactacctctataaatgaagaaggtaacaaggttctaattccaacttcgttcactggaggaccacgctatatggtccagagctactacgatgcaatggccatctgcaagcattacggttttccagaccttttcataacttttacatgtaatctgaagtggcctgggataaataggtattgccaagcaataggtctttctgttgatgatagaccagatattgttgcaaggattttcaaaataaagcttgattctctgatgaaagatttgacagatgggaatgctgggaaagactgttgcctataagatttattctatattcgcttaatacttaataaatgtttttatttatccatgaattaatcttttttttttacttttgtttcaatccagctatgcatactgttgagtttcagaaaagaggactgctccatgctcctaccttcttattcatggatgctaaaagtaagcttccaacaactgacgatatcgataagcttatttctgcagagatcccagataaagataaagaacccgagttttatgaagtaatcaagaattcaatgattcatgggccttgtggtgctgcaaatatgaattccccatgtatggttgaaggtaaatgttctaaacaatacccatagaaacatcaagatattaccaaagtggtaaggatggtcatcccatctatcgaaggaggatgatagacgactatattgagaagggtggttttaaatgtgataatagttatgttgtcccttataatcagaagctttcacttcgatatcaagctcatatcaatgttgaatggtgtaaccaaagtggttctatcaaatacttatttaactatatcaacaaaggttcggatcgtgttgtatttattgttgagccactcaaacaggataaaacaaaaggctgcgacccttggagaacctccaaattctactgagaaaaagaaggatgaaatcaaagattggtttgactgcaggtaattgtttaaaccttctcccatttcataaataagcattgattttaatgtgagatttgcagataatttccatatgtttaggtacgcatctgcctcgaaagctgtttggaggatttataaatttccacttcagcatcgatctacagcagttcaagactatctttccattgtgaatggaagcaacctgcttactttgacccaaacgctattattgaagatgtcctcgaacggataagcaatgaagattcaatgttcatggcttggttgactttgaataggaataatgatgttggaaaaaatggtaaacgtgctagagaacttctatattctcaaatcctttcctattttacttgggatggaaagaataagcagtgggtttagaaaagtagaggattttctttgggacgtattaactacggggctaggaaaatggaagatggatactatcttcaagtgcttcttaacatagtcagaggtcctatgagttgtgaagacatcaaaacatttaatggtgtcttatatccatcattcaaagaagcatgttttgcaagaggaattttggatgatgatcaagtttatatagatggtctacttgaagccagtgagttctgttttgaagattacttgagaattttttttgctatgttgcttctatcagactctctagcaagattgaagtatgtatggtcagaaacataacaccttttggcggaggatattgagaacangaaaagagaagaatttagaatccggtattctatttttttttttaatctgaatcattgcactaatagtaaatcgtct

SEQ ID NO: 8294 - DNA, 646 bp, Arabidopsis thaliana landsberg
gattgctactaaacaagtgagagatatagctacaagcctacaactagaaataaccacaagttgtttctctaagtataaccatttttatctcctttttgtttcttcttttacaggttgttcccaaaagtatcaaatgcaatccgaccatttctcccgattctatcggttctcgacacagcttgctgcgttggagcaccactcgcattgaacataaactcggtcatgtctccatttggagccaccatattgttactagtaacaatgtttcatctctcagctttcctcgctggatacttccttaccggttctgtctttagaaacgctccagacgctaaagccatgcaaagaacattgtcctatgaaactggtactaactctttatggtattggaaaatcttatcaagaaagtacaatttggtttaaagatttgagaagagaaatgtgtttgtgaatatatcaggaatgcagagtagccttttggctctagcgcttgctactaagttctttcaagatcctcttgtggggattcctcctgctatatctgtaagtctcatatccttttgacatagcataatcttttattgatgatgattatagagatttttgttttgctttgcacacggtggtaatgtcattgatgggcttt

SEQ ID NO: 8295 - DNA, 959 bp, Arabidopsis thaliana landsberg
  unsure (1)..(959): unsure at all n locations
cattctaccttttcaattgaaacggacttgctcgggggagcccgcataggagtcgacaacgagaaacgctcaaccttctttctctccctcgttggtctctcactagtcggagtcaccgtttccttctccgacgatttcttacttccacttccttcttcttcttcttcttcctcctcactttctacatcgtcttctttatctttctcacccaattctccttctttcgcttcaccctcttcttcatcttccttcttctcctcctccgcttcgccaattctcggcgaatccactttttctttctctacctccttctcctccttcggaacaacatcaatttcctccttcgccggagaattcacttccggtgtcttctcatctagggtttcagtcgccatttcaaacccaaacaacaggcgaatcaaaacgtgaaaagtcaagaaaaaagaaaactcaaatttcagatttggggaaactcgaaattgtaaaaccctaattcaacgattatgaagaagagaaacaaaaaaatttggggattttcaaaaattctggtaccaaaaattagaacacaaaggcgggctcttttcgtcacccccaaatattttcaccaaattcagctcgcggcaaaactaaacccaaatttatatacatacacatatacatacannnnnnnnnnnnnnnnnnnnnnnnnnnnnnnnccccattttcctcctaatgagcccaattgcgttctggcttctaaacaaactttttcaaaaaaaaaagcaaaatagaaaattgattttggaggggaaaaccaaataaaaattcccataaaatttcgccggtcngaaagaatatgcagtagatcgggcgcacatgcatactccgggtactcctccgtcgaagaagaagatattgaaaaaagaacaagcggagttggtgattctgttcagagctttggtattgcttcatctatacaa

SEQ ID NO: 8296 - DNA, 1586 bp, Arabidopsis thaliana landsberg
tgtaaacggtggttggagggttgggatcggcgtacggtgcaagtgtcttggtgctctatgaaactttccactctgagaaataagagtgtattatataagttaaactaaaatggaaagcacaaaggaatatttgtatctcgtgacagataatataaataattaagttagtggagttaggtatcttttggattatatatttgagtatgagatatgcaagacttcgaggtttagtatggtatatacttaacaaagtttgataatgaaatctattatggggtcaacgtgagtaatcaaaacatagttcctaattattaaattaattaaaagtattttcagacaacagtacatccaaacaaacctcatcaggttccattagtaaacgttgtttcaagatctatgtgcgttatctaaaaatcaaaacatggacacgccatactagaaaaaacattctttgatttactttaaggattccgataaatatatatcctaaatatataataaaaataaaaattaaaaagctagggtttgttactaaggaatggaacctggaaaaaactcggccgcagtcacaggagtggccgcgagtgccacaggttttgagatgagctttgtaatcagattgaactgcgtagccttttgagcatcgctcgcagatccattgcttgtggttactatgtttccgtcggaagtgtttcttgattcccacgagatctccgagcgcgtggcaagggttgtggtggagacatgtcggctccggacagacgtagactcttttcctcacttcctcgttggtctctcttttaagaagcttccatggaactttatgtcgtcttctatgcatctgtagattctggtccctttgaaactcttggttacagatctcacatacgtaccgatccgattctagtaacgttcttggtgataaagataccacctccgcctccggatctgccaccggataaatcaaaatctttaacagaactatttgataactttccggatatagaatctaacaactagtaattcttgataagaaaattgttaaatacccggtgtcccggcgggtctccgtttccgcttctgagtcacggcggttccattaccgtcgggaagaagatcagaggaagatgaagatggaggagggttgtgatgatgggtgttgatgttcttggtggtattgcttctctcgtagtctatcatcggatgaggtttttaatctcttctctttttgtattttatctcaagacagtgtggtttatagtgagagaggtactgtgactaaatgaaaaataagaacaaaattgaggaatcttttgtttttcatgtagagaaagaaggagagattgttttttatgtttccttatttatttggtagagagagtactcatctttactaatagaagaagaaagtataagatgagttaagagagagaaacaaagggctttgtttttctgaaatcatctttattttttttctcacataaagggataatagcttttctgttcccttttactatccaactttttataattttcttggaaaagaaaaaaataaatgaaactttcaactttttgttaattgtttc

SEQ ID NO: 8297 - DNA, 2041 bp, Arabidopsis thaliana landsberg
tcggtctcttaagcttttctgcttcagcctgtttcttctcccattcttccttcaccttctgattcatttcgttgatttgtagccgaatatctgatgtgataaaagtccggtgcctagatttctcagcatcaacccgctgaagaagcatttttagcttcagacagaatttatcaaacaatgttgaaccaggtagtaagagaaagttagactgacctgctttgacaaccgaattacatgggataatagtcctcgcatcctttcctccacacactgaaagcacaaatacatgagaaaaggggaaaaagaagctcaagtattgaatgcaaacaatgcacacgaagttgacatctcaccaaagataagcaccgttcgacatcattgcttatctgctttaaaccggctttagtcactgccagataagaaaagcatatgtaagcttcgtctccaagtgattcaataactagaaattaaaatagaagaagatatgggaagtatcccaactaatttccgccagctttctttgcagaggattcttctgcaagattaatctttcttcttcttcgtgcacaactctccgagatgcttcggaaacacgaccatcttccttgcccccagaaaataattgttcttcctcttcctaaatcaaatgcagacaaaaaatgatttacttcagtaatctacatccagatcaaaattgaaaactgaagctaccaggaaacgcaccctgagattaacaccactgactgcagtgacatcattgagctgttcaatactttgatccatagaattccctgctactttttgcttcttgctgcaagttgatccatgcaaaatgattatgattttatattacttggggactcgaaaagaaaagtggtttacgcttaaaaaatccatacatcagaagtctattattaacgaagaaagagtgacttaaaaaaactgttccctgtttctaagcctgagcagatcaattaccttggtggtggaggtgaagaacctaatgtctcaagaggttttttctgaccaacagaaggctttttgggtggcatcctagcattagctcctccttgagaggttcccaatgggccacgagaattcatctgatggatacacaaacaatgttaatgagagagattgtccaattgaaacttttcctatttactgtttatagtagaaattataaaacccaaaacaaggaaaaacaatagatgtccaggttgtcggacataacacggaaaatatgcaagggcttttgaagcgccatagttgccccaggagctcaaagagaagaggcaaacaagaacagtggagactgacttttataatgagaaaactatatattaatagatctcttacagttgtgctggcgtctagttgagttgtcatggaaggagaaacagagcttgcaggcgccatgttgttaggcgtggataaaaccattctagaggactccttctctaagtcctcattcgaagtcattgaggctgcattattcttttcaaaactttgatcaactgattcctgctttacgtgggacactgatgatccttgaccaggtgcagaatttagaggcaatgatgagctgctctggaagtgcgatgtagcgccaccctgaaccctactcggatcatttacagaacttggcctctcaaacttgggcatagtcatcatgtttgtggtagactggggcggtcctccaagaccagttgatcccataggctggttatgtgccacatgtctcatatgggaatcatgaaggtgaggtctcaacgtggaaccagaagcattggtgtttggacccgggaatgagtgaaaactaccagaagtggtatacataggaaaagaacttggtggatgctgcatctggtgctgcggatgtttggtaagtccctgtaccggaactgaactgcctaagctgcctgaagctgaggacggtagttggttaagatggactgcacgaggatcagactgagatttttgattattgatttctgcgaatgaatagatttaatcaggtatgatattggctcctgcatgg

SEQ ID NO: 8298 - DNA, 1418 bp, Arabidopsis thaliana landsberg
ttaaaagttaattattttattttgaacttattggtccaccttgtttttcgatgataaatgtttctctagccaaaggtttattggttcatgtttgtgtttaaatttagctaatgccttcataatgcctccatatactacactttgatgtcttagattcatattactacaaaagaatttatgaatccgagaaatgaaccatctcattgtttttctaatagtcatttccatatattttggtttaaatgaaagttggacaagtagtaccatggggttgcaaggataacacattagaatttcgaaatgaacttgctcccaatagtattctcaaagttaattgcacatctaaagacaacactatatccgtccacgatgtcttattcaatggtaagtatgaatttagtttcggcgagcatgtaagcaaaagaacaatatggaagtgtcttttaagacaaggtcaatatcatcatatcttatggaaagcatatagaggagcttctaagcggcgatgtcgtcaaaaacgaacatggattgcaaaaattgatgggatttacttagaaaaaaatagtggaccgcaaacacgtatgcatgttggtttaaaaattaatttgtgtgtgttttttttgtaaaaaattaaaatgcatgtgttattaaatggatttaagccgttttaagtgatcttaagaaagtgtatttttagtgtattttctaatatctaactatacagacataaatctataacttttaactcaataatatacatatttataaccgtttatatgttgtttgatgtgatttaagtgagtgttgttgtctaatttttgtttagaatttctcatttttaacacacaatttttttttttttgtcggccattttgattgataaagcccaaattgggcagattgcagaaggtccaaagaggattacatatggaaattaacaggccaggcccaaaactaaatcaaacagagaaataaaatacaattaaagtatagttgatttagggttggacacgtatatgatacgtggtcttcacattgccacgcgtcagatgcaagttccgccgttagtttcgccggaaaccgctaaaaacttcgatgagccaccaccgatcagctctgaagcggtgaacgtcccctttccttctgtggatctcaattccaaagctaaacgtcgagaattttctgaatcaagaggaaaaactgcttcgaaattcgctgaacatcaccatctccagggaggctccaccactgactacatcgagaattgatgtaatctgttctttgctcctatgacatgagcaaaaataagtgacgaagatataatttcacaaaagattagagatcaaacgagatttggaagtaaaacagaggcttcgacatcgcagttgtaaaaaagatctaaaccggactttgccggt

SEQ ID NO: 8299 - DNA, 434 bp, Arabidopsis thaliana landsberg
tagtagagaatacaatcgtagaagaagggaaaagactttctcctcgttcagcacagagctccacggtcagggcatgggctgctttatattactcaacctccctctgcccaccactagtgattacatactcccagatctgaggatctgtacgaatgaccatcttatgtgtacagcatggtgattacaacgcaaagatccatatctgaccatgactagatataaatgcctcagccacagtaccatatgaaagaggagaaagaatgccgagacagaaagcgactaaatactacatattgtaagagatgatggagaaaggatagactctcaatcgttgctgtgtcgaataatagacgccaactgctgcttatgtgattgaacacaacacccctggcgatcatagactacgtcacgcaccatatatgataaggcatctg

SEQ ID NO: 8300 - DNA, 2019 bp, Arabidopsis thaliana landsberg
tcaggtcgactctagaggatcccccaaacaataaataatcaatcgggcccatttcccagctgtgaaacctaaagctgtgtctgagccccacgtgtcatcatagtcaactacttcaccaaccaccttggccgattcataacacacaatttgcctaaaaccggaaagttacaagaaagaagcaaaatcataaactccattggtaaggtatctatctatccacatatacatgtaactagatctccattccaaagtcaagaatacaactacttcaacacatgaataaatccaaattatctaatatctttgatggttacaatgcatcaaaccccggtcaaggaggaaactgttctcttggtgctttgtgtataagcatcagtgtgtggatcagagggtaagcagaagaaccaagagcagactcaaccaacaccattaggccagttatacacatatacacataatttttatctaggatctctcaagctcttaacgccctgtttttgggcgtttcattgcatttgaattgaaaggagagacactaccgcttggtcctgggctgttttctctcaagtttgaattcagcaacgctagctctcgcaactgctgcctcttgatgtaatcctgcgactcatcctgtgaaaagaatacaaagcatgttatgtgagtaaccttaagttatctgatagttcaggagaaaagtctcttgactctcgaccaatgcacaaaccaagatcctaaaccaatccataattcccaaatgaattctcctagccctcctttaagactatcagttctcaactaactggcgtaaggtctgttaccacttaccacctgctgcttgttactacagactaacccaaaactgagactcctttactacggaactcccaccttgcctaactaagacttaaaacatgcaaataacaaaaagaacattgatgaacttgttgcaaaacttcaaagcaatgtggctctcaaaaataaaatgagaaaaagtatgttacaacacgcaccacaggcttgaccaactcctcgattatttcttgggcctgccgcagctttatatccacaatatcaattggaagatcagcctcaatgaggatatgcaactgctcattgagatgctcatagccaggcttccctttcagtttctcttcctagcaacaaacatatcaatgcaaaatatgagcatagtttggtaaaaagatggttggaaacagaaaaaaatgtaaacatgtcttactttttcaggatccttaattgatcctttccctctaatatacacacggcaacccgtagttgcttccacacgctttaatgaattccctctaggacccagaagccttccaacaaaattgaactaacaaccaaaagcagaagaatggttaattcacctgaacttcattgtcgcaaagaaaacaatacagcgaaacttacattcggataggtatcaactggaagatctaaacgcaaaatacgcttcactgggtatgaacttgggctagcaggcgcaccttgccactccattgccattccatgaggaccaccaattctctacgagaaataaaaaggctacatttttattacagttctgaaatgagtaaaatggcaatgaaacatcatctcctagaagaagggcttaaagggtatctctacaagagataaaaaggttctagttgaagctctagatagattttctatgaggaattacctaaacagtcgagacttcttatcgggcatacaaagaccgaaacttctaactcttgaacatgcaacgatctataggctacagatggcaccacatattcaaacaaggagatggagagctaaactcataccttatattccttgcactaggaatattaggctgctccaagaaaagaatacatgagccatccataaatattttcatgtgcaagtgggtttcaaccacaatattctgttaagaaactttctatgttctattaagataatcagggatgaaaaggtagcttcttcaacaaagacatgaagaaaaagctt

SEQ ID NO: 8301 - DNA, 1612 bp, Arabidopsis thaliana landsberg
  unsure (1)..(1612): unsure at all n locations
tcactgttttttattttaagcttcgacatcttaaaaagcgacagctgggtgaacgcttccgctgtttccaagatcatgaagaagtatgataaggtacttaatttctgttgataattttgacaagcttttacagcatttactctagtttaatatatatgctctactctttagatagccaaaagaaatgctgcgaaactgtatatggagatggtcgataaatctttcctcagtagctccgaagaagtaagtatccttcttctatctaggaaaatcgaaacatgaaactttagtttgaagctttaaacatgtgcaggttcataagttgatgctaaaggttgaatctattttcattgaacatttctccaattcaaatcggagggaagggatgagccatttaagaccaaaaatttatatagaaccgtatcttataacgttttccaccggtatatatatcaacactacaataaccaatcttttgacatgtattttcaagagtaattcatcattttgttctgttttttgttttgttttaggcttctttttcggctgtggtatttctctcattgtagctctgggtttgatcatccatgctcgtaatatcatgggtacaccgggacaaagaacttatatggaaacaatgttccctctttacaggtcagtaaaacgaccaaatataaaccaaacacactatctctgtctctgtgtaatattcttgagatatatacatttcatttgcaggttttttgggtttgtagttttgcacatggacatgtacgctgctaatatctacttctggaggcgataccgtgtgaattactccttcatctttggattcaaacaaggcactgaacttggttatagacatgttctacttctcagctttggtcttggtacactttctttatgtgctgtcttattaaaccttgacatggaaatggatgctcaaacaaaagattacagattagtcaccgaacttatccccctctttcttctcgtagtaagttccttctatctctctctatttctcagtacattttacacaactcaatctttgtttttagtaagactcgtttctctgcatattgcagttagtgattatcattgttctctgcccctttaacattttgtatcggtcaagccgattcttcttcctctcggttctgttccgctgcattgctgcaccattttacgcggtaccaacaacatatcctcctctccattcatctgaagcataaacagaaatgttaagaagaatgtcttccatttttgcaggtgcatcttccgnnnnnnnnnnnnnnnnnnnnnntaacaagccaggttcgagaaaatctatactcgataagatagcttcatacttattttgatcgatgatttctgatttaaacaatcaatgctaggttcaagcactgaggagtctagagttctacatatgctactatggttttggagatttcagatatagacgacgaaacacttgcacatcaaatattggattcagaacattctacttcatcgtcgccgttataccttactggttacgagattctacagtgcatccgaagaatggtggaagacagagatctgagtcatggctacaatggcatcaaatacc

SEQ ID NO: 8302 - DNA, 1751 bp, Arabidopsis thaliana landsberg
ggtccaaaatcatctacttgtagttccaacttccaagcctccatgtgagtaaatgtaatcttattacttatcttcaaacactctcaaatcttactttttcaacacccaaattgtctaaacattacacacgagaccacgataatgtcgtgacctcagcttcaagatgatacctaagcttaggatatacattggccctatactactacttcacctctcaattttcatctctcaataccattcaaaatttaaaatatgtttatgcaaaattcaaaagagaagagaagtttagggacacataaaaaatatgacaaaaataaaaggttgaaaatgtcaaatcaaaaagttttcgtcctaatccgaatttttgacagagtaaacagagaacgacatttttttttgtttaatagaatttgacctgaggaaggaaaaagcttcgtcctttcgcaaacccagggaaggggaaggtgaataagctctgcaaaatccctcccttcccttcttcttcttctacaagatttcaccatttctccatcctaaaccataacaacagagatatagagaagatgaagcactacagtcacggaattgatggtttacgaagcggtctttcaccttccgctaaacctttcgcaatcggttcttcttcttctcctgccttctctctcaaatctgaacacgaagattctatttggggtgattatactttagacctttcctttttatcctctgatgatcagagaagtggtctcgatgatgatgattcgttatctaacttgtctcgcgatgttgagactaataaaggtataacacaaaatcttaatactcttctcttcttgttgttaaaagttgtgtgtttgaattgggaatagagtttttggtgtaaagttctcatctttggtgtaaagagctaatgttgtggaggttacttgtgaatttttgcagaaggattggttttagaggagaagatagctagttctggaaaggttttggtaaaccctaatccaagtttctcgaaattgcctgaggtattgatgaagtcctcagatgttgttggtgatgcgaagttgggtttgtcctgtgtctctgagaagtcttctacggagtctgacctagatgagtctgaggaagattctccttgttggaaaggaatgctttctcataagagtctggcttctggtactaaatctatgacttccaggcgttctactgatgatcttagtgggtttcgtaagttgaatcctttggcacctcagtttataccatctagttctaagaagaaacttgaaacggatggggagaaatgtgaagagactagttcttcgtcgttgaagaagtctttgtcctcgacttttccttcgtcgtctggagaatttgatttaactgaccctcctcttgaagatggaagaaatgatgcagcagaaaagacaagcatcttgacccacaatgcagatgaaattctcggttttgtaactagtgatagtgtttccaagactgtgagcatgttggattctagaaatgaattccaaccatctaaaaggttggatcctttggcccctgtctttgttccctctagtgcaaaactaggtccttctgttcatgagaagctaggagattttgtggtaaatgcatattcaacttctgctcttgcttcttcacatgttaagtcgctagataagggcaaggtagtgacatcttctggagaagttggccacagttttaagagtcaatatggtggtcatgattttggttcg

SEQ ID NO: 8303 - DNA, 1810 bp, Arabidopsis thaliana landsberg
tttaattaattttaacttaaaatgttgaccgtggttaacacaagacttggatcataattaatgaattttgtataagacagtcgttttttttttcgtcttttgagacacgcaatcgattttgggttaacacaaaccattaatacaactacatagtgggtcggtcgatgcagtccgtaatgtaacgtttgttaaggaaaattaaagagatgaatacaaagaattgtttttaaggaacaaaaaagtgtgtgtaatgtttatgaccaaaatatcctctaggttagacaaactctctataatattggtcaacaaatacatgcgtgtgcgtctatatataacatagatgcagagaatagacatctttgctggttctttggcttgtacccaaacccatctttgacttcaaaaataaaataaaaataatcataattgacatcatcggataatgcatagcgggaagagacctctatcaccagaatcaatggccggaaatagagaagagaaaaaagagttgtgttgttgctcaactttgtcggaatctgatgtgtctgattttgtctctgaactcactggtcaacccatcccatcatccattgatgatcaatcttcgtcgcttactcttcaaggtaatttcatcagatcctttttccaataattttaattgctatactttataactcgagtgattgtcttttccattggtgattctctttacacataggaatgatttaatcttggattttgcaattggtaatcctttagtggctgcagcatggccttgatcaaatagagatataatttcatgtatggccacaatgcattagttcaatttactatatgatttttttaatgaatgttcatggttagattttcttgaaaaaacctgtcggctttattggttggacaaaattgatcatatttggctttcggacaaatatgattggcaaggcttggttgcaatggtcgtattttggttgagataactagccagagagagttttaggattgtaacatggggaaaacgtatttaaaatgatcaaacttaatttatatcctaattatatcattggtgtgatacataagtatatatatagttaattaccaattacgagagagaggaatgtataaatgtaggtttggcctaatatatagatttcataagtagatgtagaagaggggaataaaagttgatgtagaatgataatatcatatgattcaaactccctttaataatctttacgaaatgcctctacaccgatagtatacgttatattcatagacatgcacgtcacatttaagtcaccattttcatgacaagagtgaacttacaattttcatcatttttctacagaaaaaagtaactcgaggcaacgaaactacagaggcgtgaggcaaagaccgtggggaaaatgggcggctgagattcgtgacccgaacaaggcagctcgtgtgtggcttgggacgttcgacactgcagaagaagccgccttagcgtatgataaagctgcatttgagtttagaggtcacaaggccaagcttaacttccccgagcatattcgtgtcaaccctactcaactctatccatcgcccgctacttcccatgatcgcattatcgtgacaccacctagtccacctccaccaattgctcctgacatacttcttgatcaatatggccactttcaatctcgaagtagtgattccagtgccaacttgtccatgaatatgctgtcttcttcgtcttcatctttgaatcatcaagggctaagaccaaatttggaggatggtgaaaacgtgaagaacattagtatccaca

SEQ ID NO: 8304 - DNA, 832 bp, Arabidopsis thaliana landsberg
taaaatccgaaactcctttcacctccgtcgaagctttttcaacattctccgtcaccggagaaggagggaagttaagctctgcgttaggaccacgtagctgaatagctgcgttatcgtaaacaatggcagcttcctccgccgtgtcaaaagtacctaaccaaaccctaacacgtctactcggatctctaatctccgccgcccattttccccacggtctttgcctcactccacgaaacttcctcgtcgccgtcgtaacaaccaccggaacagtaacaacgctcttctttctcttcttcttcttcttcatcggcttctctttatcagaaacccccgaatcaagcaccacttccttcacgtatttcttaacaggacgtcgttttccagatactgcttcaaaatcaacttcttcttcttcgtcgcttgacgaatctgttgcgtaaggatcagtaacagagattcgtaagattcttgggagagaaactttcttctctgtctccattttttaaatctctctctttaaaactgttgtattagttttaacttatgtgtgttcttctttgtgtcgtgtgtttatatataaagaccaaagttaggaaaagtaaagggcaaaaaaggaataaagagagaaaattggtaaaacaagagattgatgctttgtaacaagaagattttcccgggaaagttgaagaaagcagagagcttttttaatatatgcttatggaatcaagagtttggtgaaggaggacactaaagaaggagatgcttttttcttatttagggatgaaatttcttttaagaaatattcctgggaaatttttttgcagcggaaaga

SEQ ID NO: 8305 - DNA, 809 bp, Arabidopsis thaliana landsberg
  unsure (1)..(809): unsure at all n locations
tctatataaattaatgaatattttatcttcttctaacaataaataacctgcgctgcggaccaaccctaaaagagaagctttctaatcagcaatcaaagaacttatcaaacaactaaatcgccgtcacttagatttataaatcacccctttgattgctcagtgacatcgtccccgtcacgccctttttcttaaagaataatttaggaaaaagaaaacaatatctcgtcgttcttttcggctttctccgattgtttttaatatttctcctaactctctctcgatctccaaaatataggaaaactgattaaaaccaaatatagagacagaaatcgaaagaagatacaaaattaatggagaaaaaacaatctaagcactagaattgaacaaaggcatgagagactttcacaaagcatccctatagaacctgtaaataccaaaagcaccaataagtccggagaaacctcacaccgacgacaaaccaatagcaaaccgacagggaggaaagcaagaatccaacgcgaccaaaaaccaaatacaactaccaacacacctcaccagctaatcggagagagcaagaaacactaggatcaaggcaaaaccttaaaatcgactggagacaaaccacgtaagatcaacaattcttacacgcagacacaatttccttggtcttatgcagcaaaattctcttgtttaaagaataataatttttattttctttaattcggtagagcaagaacacaaattctttattttaccacatttgtaatttggtatgagcatttntcccactttagttatcaataatgctg

SEQ ID NO: 8306 - DNA, 1188 bp, Arabidopsis thaliana landsberg
tcttagtttcctaaaccgtatattgaagatatatgtacagtattcggtgaatttaaatcggaatgaaatgctgacgtgggaaacatccctaactgaagaagatgaagaagaagaaaaggcaacccaaaaaaaggtaattcagctgcttctcctacaaataatcagatcgcaaacccttgccgtgacactgaaggcacccgtggccgacggcttattcatctttctccaatcggagagtcgtcgttttttacaatatcatgatcccgctttgaaatttctctgttttctaatctctcaaaatgggatccagaatcgaagaaggtacaatgatttctccttctccttcattttacatttctgactccaatcgttacgaaaattcgttgcggaattagacaatgcgtgttattagggttaggtcttgaaatatctcttagggtgttatttttttttaatcattttcttcaacggatctctagtttacgtgataaacaaacaaacattgtgtaatcaatctcactctcgcagagaaggaactggaaccaggtatggagaagggtctggcgacggatccaacgagtcctacagggagtactgtagcggacctgtcgccaactccaaccccaaggaagactctggttctgtccaattcgggtaaggctttaatggtgtctaactcgagcaagtccttggggctttcgaattcagggaaaaggtttgatccaacggggaagaagaagtatgttaaacaggtcacgggacggcacaacgacaccgagcttcacctagctgctcaaagaggagacttggcttctgttaagcagattcttagtgacattgattctcagattactggtaccattaccggagctgattttgatgacgaggtagctcaaataatgacatccgtagtaaacgaggtgaatgagctgggggagacaccgctttttacagcagcagagaaaggaaacatagatgttgtcaaggaattgttgccttacacgaccattgaatctcttatgcagaagaatctttctggatttgacgctttacacattgcttgtagtcaaggccatcgatgtaagtcttgattcatgtaaaccaaaacctctttgaagcaaaggatttgcaaatctgtctttctaaccgcacgtgagcttcttttttcatgcagctattgttcagtta

SEQ ID NO: 8307 - DNA, 761 bp, Arabidopsis thaliana landsberg
cacatatcatatatacgtgttatgtatgtgtatatagttgaattgtttctataaatatggacactcatacactagctttctaatatagtaccaactccattgaatgttaaaactcagaagaaagtggagtgatcatataacgacaatgaagaatctctttaacttgttccttatgtttttctttgcaatgccaattctttcactctccgagaatccaaccaatttcagcgagagttgcgaagacgggagtggagaaaccggttcaagctttggcatagggttcgatttggttcttgattttggtttataccggaatagctgccccgaagcagagtctatcgtctactcgtgggtggaaaccacggtgttagaggatccaagaatggctgcttctcttctccgtcttcatttccacgactgttttgtcaatgcaagtcacatctcatcttaagtttgttttaatagttttggtctatcatctaatccccgtcttttatataccattgaaccgggaaggattatattatgttagttaaaccgtgacaaatctaaattgtaccggttaagtagggaatgagtactacgaaccagaatgtgtttttgtttttgacttgcattatgcattgcagggatgtgatgcttcggtgttgttagatgacacagaaggactggttggtgaaaaaacggcgcctcctaatctaaattctctacgagggttcgaagtgattgattcgataaagtctgatattgaatctgtatgt

SEQ ID NO: 8308 - DNA, 2329 bp, Arabidopsis thaliana landsberg
tcttggtcgcaaaactctccacaagactcaccaccgtctccgtcaacgatgttaccttctccatcatcgtcttcagcgccgacgaaaagaatagatccgtccgagctcaaacgcgttttccagatgttcgacaagaacggtgacggtcgaatcacaaaggaagagctcaacgactcgcttgagaatcttggaatctacataccagacaaagatctgactcaaatgatccacaagatcgatgctaacggtgatggatgcgtcgacatagacgagtttgagtcgctgtacagctcgattgtggatgagcatcacaacgatggcgaaacagaggaagaggatatgaaagatgcgtttaacgtgtttgaccaagacggagatgggtttatcactgtggaggagttgaaatctgtgatggcttccttgggactcaagcaagggaagaccctagatggttgtaagaagatgattatgcaagttgatgcagatggtgatggtagagtcaattacaaagagtttcttcagatgatgaaaggtggtggctttagcagcagtaattgatctttaactagggtttgatttgacagaagagaagtgtgtttattcgattgattggtttgtttttcttgtttttcctctgtaaataaattttctgatgacaaatcaaaacatcgtgtaatcgaggaaggtgtgtaatctttgttttttagggtatctctgagcttatgtaagattcaccttctcatctattctgattgttaagtgttcttaagtagattgttaactgtttcctatcaatatagtatattgcagaaccaaccacattcgtatcaatctaaaggcaagagttaaatccatgtcctcttctactctatggttacaaagttcctcacattacattccataaaataagattcaaaccacatctagattacacttaaaccatttacgatcgggaaagcttcaccaattcaaagaatatacagccgcacacatcaatagttggcttagatggcatcttgtttacttcgcaatagcgcatgctctagatgttcgaactccttcaaattgttcactacattctcaactttctttgctatctgattactatgctcttcaacaatctttgcaaaagcatctaactgttccttgtacgctgcacataaccgcttcttgtttcgcagctctatcgtcagttcttgaattctcttatccttctcgtcctataacaacatataatttaccaaaatggtttcatacatttgttgctcaaaatacgtaatgttacactgcacagggacataagttaagtaagttaagtactcaccagggtatggcgagcctcgcgaggtgaaacaacgagtggatggttatgttctttgacgaatttggtaatgacccatttgccagaccggtcatacttaacatgaatcatagctttgcaaccttctcttgtactcggtctaggtttcctaactgatccaaacttaccacgaatactaacacaatgaccttctttgttacaaccgaatctccgggcaagaattcttccgtctttctcggatcttcggcaagacattacacgcattacaaaccctaatcgtctagagtaatcatcatagaacatcttagctgcatcctcggattcaaatataatcccttcacgaggctctatagcaaaatcatctgtgttgttgctgttctttgtggttggatcatcctcatcttccactgccacatagataaggaagaattacagatttgattagataatcaaaagtttgaatattatgtaagctacttgagagttcaattcaactccgagaatttgatttggaaaatctcagaaatgttggaaaaagtttcaattttatgtaatagaagattgttcaaagtttatccttttcatcgacaatgatcagaacaagaatgtgtcgtaatcataatacaattgaaacatagagacgacaagcaatcgaagaaatccagcaaatagctaatcactaatgttagctgaatcagttgagaaaaaaattaagacccaaagatgaaaaattcgattgaagaaattattcatatggagtataaagtaattaaagaccagaaaattaagaggaaatttagcttactggatttgacgaatcagagcagggatcttcagctgcacgagcacgaggccaagagatagggaaagagagagagagaggtgccctaaattaatcttttggaaattgactgggctaaatagtgataatgaaatatttgtgggggtttccgttaaaactagaaaaaaaaaaaaattgtgtataaaaagggcctttccccgaaaagt

SEQ ID NO: 8309 - DNA, 2783 bp, Arabidopsis thaliana landsberg
aatggaacatggatatatatactatgaaatttggactgtaatacgttgactattcagattgtctaagaagacatgctaaaaactcatccaaatgattcaaaatttcaaacattttcttcaaagatccagaagccaatgccgttggatttgtttaagagtgtcaataattggtggtctatgttatagatgatttaagcttgttttgtgggaaaattagattcagttaaatagacgaaagacagaaaacttatctgaattgtttgaatttgactaatctgtatctcatttcattttgttatcccaaatgccaagacatctatttcttcagctattcattttcatgatttgtttctaggtttaatattgcaaacagagattgcattcaatatataaatctaatatcaagaagaagagaaaaaaaaaactagtattgctaattctcctccgctaattacataagacttcaaagtttgttcagtgtaatcatcagaattggagcttgtttgattgtttgcaatttgcaactttcctctaatttagtcgtggaaagctcttcgtatatataaatctcattagtagactttcacgaaatccatccatcatacatggataggctcagtttggactatgatattttgttgggccttaaagattcttaaccgggttgttttgaaactagttggttatataatcttgtcatcgaagaaatacgaaacattttctaaagttaaaagttttgaagcatatagaaaaataaaaggtaagaaattatttaacacacaaacaaatatgcccatgatagttattatcaagacatatgatcatgattcctactattatcatacgtctagaacaaaatgttggtaggaatgtagaatcgaacatcaatgctgttacattgacttgtatatatatgcctactagacaaacacaaaggccaaagatatatgtatcttagttgtttagaaaattctcgaggcaatgttcttggtccagattcctactccaaaacttcttgtaatactctgcataagtgaaatctttgtagactggtttcgtttcatcgtcctcagcttcccacaagggcttggccgggctcatgacagcacagtcagctgggcacagaaacgatgcgaccgatagtctcggattttctgtgtttgttacagcgcgatgccaaacacttttgtatactccattacttaatgcctgaaaatacacagttaattaagatcttaattctagacaaacattcgatcttgatgattggctattattctctgaaaattctctaaccctttattaaccaaataaatctataatatgttcataattttagtaacgtttaaatgatgatatttcttacaacactttgtcttacaagaaaagaaaaaaatcatatttttaatcaatgttaaaacttttaacttctaacagtacccgaacttttaaaataaataaacgtccagaatacattttttaaaataaatattttgaaaagttttgacactcttcctccctaagatttttagaggtactttttgaaatgtccctataacaaattctctgtaattgttttaaaaatctcaatttattgggtagttgagtagagagaaactattgcgtaaagactagtaattcttttctttttaagtccgaagttcatgggccgagtcacatttatttttatggtccgaaactaggccggttggtacaacagaaatcatctattctaaagttgaagtcgaaaccaacccaccactcttttagtaatggttggtatttttttggtttaaactagaaattttaatatcacaagtcaaatggaggaattaaaggtaatcaaggtacctgtaactggtcacctatgttgatgacaaaagcatcaggatgcggattaacggcgaaccactgaccgtcgatcaagatctggagaccgcaaacagtagtgtcttgaagaagaatggttagggcgtttgggtcggtatgagcaggtaaaccgtaagtgagctcaggttcaggacatggaggataatagtttactgccatgtgttgaccttgttcaccaagcactttcttcatgtaatctttttctaaacctaagctctctgatattaattcctctattttaaatcccacttctcttacttctctactgtatttacttactatttccctgcaacaacaacatgacaaagacttattagctactcaaattgtttagattgtcaataactaatatagcttattttctaagagcttatgtcattctaataatagtgacgtagtgtatatcatataattaaagatttaataatgtaccacatatatctcgaaaaatctgcattattatacttagcctatgttagttttaaaggaatagtggagcacgtaactcacgttgtcacttgtcagcttcgaacttacccgaagaatttgtggcgaatatattacaaattataaaataagataagagcatcgatctgtaaaattgaagaccgagtcaatgaaaatgaatttttttacaatttttaaaaatgtaattaagagattggcatgatatcacgacgctgacgccaacgcggtgtacagtgacgtctcttccccataaccacacatatatcatatactattttataaagttatgatttaaccattttacttataaatcatatttttgacgcgttgtgatattttaaccatgtctaagttcttcaaatattaaggaattaatcggctcaacactacaaaataatggtatacgaattttttttgcgttatgc

SEQ ID NO: 8310 - DNA, 1552 bp, Arabidopsis thaliana landsberg
gctcagaatctttgtgtgggtgatcttcttttgtaggaaaggatgagagttctagactgaaactagactggtcaacaaggaagaagatttttttggggatagccaagggactgacatttctccatgaagaatctaggataaagattgtacacagagatataaaggcaagcaatgtgttactcgataaggatctcaacgctaaaatttctgactttggtttggcaaagctgaatgatgatggaaacacacacatcagcactcgtattgcaggaactatgtaaggctctttctctttttactcataagctcaagaagagaattcttaagaatacaataacagaagtttgatgttttcatttgcattgcagaggttatatggctcctgaatatgcaatgcgtggttacttgactgaaaaagcggatgtttatagcttcggcgtcgttgcactcgaaatcgttagtggaaagagtaacacaaactttaggccaaccgaggactttgtttaccttcttgattgggtaaacaatctcataccattcatccaattaataagtgtgattgagttatataataaactaaagtttcaaacttattgcgtcaaatacatgtaggcttacgttttgcaagagagaggaagcttactagagctggttgatccaacgttagcctcagattactcagaagaggaagccatgttgatgctgaacgtggcattgatgtgcactaacgcatcaccgactctaaggcctacaatgtcgcaggtggtgagtctcatagaggggaagacagcgatgcaagagttgctgtcggatccgagcttctcaacggttaacccgaagcttaaagccttgaggaaccatttttggcaaaacgagctgagcagatcgcttagcttctccacaagcgggcctcgtactgcctctgctaactcactcgttgatgcagaggagaaaaccggacttttggattaagttcttaaaattccaaatttttagtgaaattcgcgagagtaatgaagttttcaccaatgaaaagagtttgcttttaagtgtatatatagttggaagttctttagctcaaaatagtgttatatgaactaaactgatctcaaaatcagacgaaagactaatatatatataaaggcggtagtgtttgccgcagccgcagccgcaaccgccagcggtaatgaaacgaacaagctcaaaaatcagacaaaaataatgcttggcactatctctgttcctcatttttgtgttcgctacttgcttctctttatctgcagatcaaaccttgtttaaacgtgagctaaatcagataaaataacttgaatatagcatatatctctctagacataattatgtgtcaatatactaaggacatatcgaaggacacaatcaaaccaactttgataaaaagtttgagtcgcacaaatgcaacaaaagatatatatgtcccttgattaacatcgaagggaaaagaagtaaaccaaaatgaaattagaccctatgattccagttatttcttgacaaggagtagataccaatcactatg

SEQ ID NO: 8311 - DNA, 1545 bp, Arabidopsis thaliana landsberg
agctatcattgaagcttgatcgttggttgactcattgttcataaccggtccgattccaaaatggataaatcctccggttcatatgttgagtcaaagaccgcttctgagtcattctatcggaaaatggaattatggtggtcaggggatcataaaccggtctttctctggcaaaatgccacggttaagcttgatgccttaagtttcccttgaaattgattttatcatgatgtttaactttttttttgtattttttactagagaatttgatgcaattaatcaaataaatcatgttatctttttatttatttatcatccattctttacagtacaatatgaagtactaaaaacaaagattttaggaagaaaattcgtctttagagccaaagcctcgaatcctatataaagagcataaagataagaattcatattcaaaagacaaagaagaagctaagtgaattttacctcataccttccactcttccagcagtagctactgttttcttgtgtggtggtagcctccagctgcagccactaggcgacgcagcataacttgaatgtgactcaccattcagacctttgtagcactgagcaatagaatccacacggaaaaataagtcagaattttcatcgtctagttcaagacaaagagattttttagagcctcattaacaatataagccataaacctgcatctacattcagaataaagtgtgatccttcagagagctagagatcattttatgtaagacatgagcacctcatttttgtaaaccttgagaacagacaaatccatctttcagcggcacttgccgctcttcaaacgcacaactcacctacacagaataagagaagagccattcagtttataaagaataagcaataactatatccaaagttttgcgattgttaagcaagattttttgggtcactgttattggaaaaatccactcaatataatgtcatatgagccttgagctttttcacacatattttcgaaaatagaaaatagattcttaacttgccagacaaagtttaaggttaatatataaaggataaaaattgtaactcactgatttgatgcatctgaacttcgcattccatatgggaaagaactatggtttaagtcaatgaatgctgaatccaagtaaaatcatctgaagaaacagagcatacatgaataagagatttaaaaggaatctcgattggaggttgatggtcttcatacctttgagactcatggtatcaccagaaatcactacaagaacatgcaccgtcttgaaaatgatgaaacctgtttgaatcccttagaattatctgtctcccttcgatctttgatatatacttgaaggcagagtggcaatcaccgcaaactctgaggttcttcattattctgattggcagcgtagagctcctctgggctgcgagaacaaaagctacagcgagcttctcgctgtgatagctcagaatctcctccttgttctcttgctctagatcatacaagaaaaatcctgtctgtggcacataacctgcgtctctcatctttct

SEQ ID NO: 8312 - DNA, 1247 bp, Arabidopsis thaliana landsberg
  unsure (1)..(1247): unsure at all n locations
aacatactattgcatatatatacacattattatttaaaattaattatgttttaactttttcttttgtaatctgaaaccgaccaaatccggacattaaattttgaaaccaaactgaaactaaaaaattggttctagctcatacttttttcctgcagaaccctgaaatctaacaaacctaaactgaaccataaaagtcgaaatccttggacctactagtattaaaagtatattttggcacgttgtttaaaactggcaaagatcaatacgatcatgacacataataaatgtcaatgctgatagaggaaaagacggaattacccttcaccaatgttgaagacgaaagacatacaaaccaaatagtaccactcggtgtcggcgagatcttccggtgaaagtgcggcggcggaagctcgtctggtgacttgagatccggcagcaacgcctgaagaagaagattcagcgacggagagagactcgtaaagctcgctaagctgctcgctcctccgtagaccaagctgatcagctttgatctccgaagcttgaatcgtcttcctcgttttgatatctccattatagtatccatctccccattctaaaactctttttatatatagaaaaacaaaaacaaatatcaaatcgaataaagaaaacaaacaaaacattttcttgaactaatcaagaacttcaagaagaagagaaaaaaaattgaacttttaaagaagatcaagaaaccttatatgagtttataagaaaaaatcaatggaatcaagaaaaacctagagaaccttgtcttgagttgtagaactaaacactagttttgatttgaagtgaacacataagttttatctaattttccaattaaaatcaagaaatttacttcatcaatatctttcaaaatctccaatatctagtgttcaatgaatatgatttaagaaacttacccagactgagaagcagagacagaccaaaagataccataactccattgaatgtttcgaactgaaactgcgaggtgtttcttcagattctctggcacagttgttctgttttgtccggtagccattgtttcttcatccctatatcccatgaaaccacacacagggaaaaagaaaagaaaagaaaaaaatcaaactttttgtcctgatttagaaagaaataagatactatgttaaatttatagcctaaaaaagaaagaaaaagggaaacttgtaactctttacattnnttttgagtatcagagaggatac

SEQ ID NO: 8313 - DNA, 705 bp, Arabidopsis thaliana landsberg
cttttttttttttttaccatcttgttttatatatatttatttaaaattcctcgtaaagttcagtgttttgtgattatatacagtgtacacacacctaaaataagtatccataaagagatttggtcattcggacaccggccttttctctcaactcaaagctcaattcaaccacaacagatagtaacttgaaagtcacaaatatttaatattttcccattatagaaggttaaaaaaaataaagatattctgggttttgttgtcttcttctttcttcctcaggaaaccaaaccaatgtcatgtaaaaatcactaactcatgactagtcataacctttaaatcacttctgctttttttctgtttctcttttgatttattcaaagacaacaaagttttgtttttgacaaaaaatctgatctttgtttgtttgtttgtttgtttgttacatggggatgaagaaacaatggcaaccggagaaaacagaacggtgccggacaatctaaagaaacagctcgcagtttcagttcgaaacattcaatggagttatggaatcttctggtctgtctctgcttctcaaccagggtacaatctcctaatctttatccttcaaattaacttttcttgaaaataaagttttgtttgagacattcttgactttagttcaaaactcagataaaactttatccttacttcaagatttcgattttt

SEQ ID NO: 8314 - DNA, 1710 bp, Arabidopsis thaliana landsberg
  unsure (1)..(1710): unsure at all n locations
tttatctttaaatgacaataaaattctgccgtttcattttaaaataagcaagttgaagaataagaaaaccaggtagtttatttaattttgtaatcaaaccaaaagcttagctatacttaaaaatgtgtccctaccaaaataaaatgatgaaaaatgagaaagagacagtaggagagagtggagaccccagcgatacagctggtctgcatatcaatcaccggcgcgtgaccaacacatcccaacggaaggcgcgtgtatctttcctgtccgaatgaacaaaaaaaaaaaaatggggttgtgtcagagaacgtgcaatgcaaccatcttttgtttttaatttgctttttaaaaacagtttattacacaatctctctgtgttttttctatctctctctttcttcttccactcgtgaaagaaagaccagagagttttctcctgatccacacaacaacaacaacacagagatcccaaatccggaagatatcttcttctctcataactcagtttactcagattcactgaaacatacaattaagtgtacgtacttcttctctttatctttctctcttaaatttgatgataagaagaatctaataatatgatgacatctttcttcnnnnnnnnnnnnnnnnnnnnnnnnnnncgtcagtctctcacctgcagcaaaattcactcttctgctaataatgttctccacagagattcatctattgatcattttgactttttcaggtaaagtaaatttttatttctcttttcggtctagtaaagttttactcaaacatagaaagttacgattttttttttgttttgttttccatggaaaaattctcggcatgcaaaaactttttttttttttcctaaaaaagtatttaccttttcctttttttctccaactctttttcttaaagtgttaattttttttcttcttgtaagcacgcgagcgagaagaaaacaaaaaaatgaatagagtagtaactttttatactatttctcttttaaaatttttggtatttactggtgtttcgcaggaaccagagatgaaaaattatagttaaggttagtagtagtagataggtttaataaatttgtagttaagtaacccaaaaaaataacattaaactaaaatccaacactagaaaccagagagaccctcttaacgacaacaacctctctgtacacaagacaacaaacactctctacaaaaacactactctttccttcttcttctctctactctattctaattctaaagagagagagaaaagctatggatggatatgaagctactaggattgtgctctctagaatccaaagcttagaccctgaaaacgcatcaaagatcatgggtcttctccttcttcaagatcacggtgagaaagagatgataaggctagcttttggtccagagactcttgttcactctgttatagtgaaagccaagaaagagttaggtctcatgaactgttcaaggtctccgtggagtcatcaagatgagttgattagccctaagaacaaccgtggctcttcactcaatccagcttctttgcccttttacgctaatggaggaagatcttctagggatttaaccaacgatttcgagctcatggatgatatgaactccagaagtactgattttttgggctctgtgcatgcgagaagcgatagctgcgttttggacggtttagggtatggtggtgaatatgatt

SEQ ID NO: 8315 - DNA, 1944 bp, Arabidopsis thaliana landsberg
acaacaaatgttttgtaaattgatgatctcacactcttaaaacactcgttccctttctgtaaattcttaaaacacactctttcccttttgtttggtttggtagatgttatcttcaaaagacataaattttgtcggctacacatacaaaaactttgaaatcgtcaacgattatcaagtccccggtataggtacgtatcttagtccttgaacataatcggataccaggatcagaacctctaacattccggtttatatttactacagccgaactaaaaaagaaagagtcaaaatcaaagagaccatcggttaagtcactattcggtacgtgaaaatgtctcagaactaaaaaaaaacgttacttattctctcgtataattgtcttcattcataatcataatcgtgtttacgtttgtaacagagagcgaatcagactcgtcatcttctggttcggagcaacagaccattaaccggagctattctaatccgacgcctcgtggaatggaacccaacctgagacgtctagattctgagtagatatatatctgttatgcctatgtatatgtaaaccaaattaaaccggaaaataatgagcttaaatgtactaaaaacgtaagtaaactgaagataactaactacactcttctttctttaatacaaagaaaaatagattgcaagtctttttttaatcccactttgagaagccaaattaattatccatattcattcattagttttatagtaataatctaaggaacaaatgatttatgatatagtatcgtccacgtctggtagattcggatgagactcgtattttcctgattgggaaaaagaatatgaaatccatatgcaacgacaacacgtatgggcagttgttgttcccaaatttgatgtatacaaatgactactagctacagaaattcatatactactaataagaacattcacatgtcactatgtcaggtcataattaacctctattttccactatataaaatttatttgcaccaacaacaaaaaaaggtaccaaatgaaatactctgccaaattcatcttctgttaaaaatggcgtgtttcgcatggtcataattggagtgaggaaaaaaaaaaaaaaaaacagaatgtcacaaaaaaaaatcatctcttttccagttttcctttgttattcctaacttgtctgtaataactaccgaatcttcttcttctttttattaatgttcaacaaaattcgacatttttgggtctaatccagctcaaaaagttacgtttttatttgggtgggccggtccgtaagagttagttcgatttcttatccaagtaagggggttttcattggctaaaattgacaatcggggcgggccctaaaaaaaaatatgaactgtcaattgtagcagacggttcgtgattcatcgttttcatggccgattcgatttccgatttccccatgagggtttgtcgttgatattaacgcctcccctggatttccataatttgccttgtttagttcgtgttatgatggatctttgaaagctattcccttttttttgggtgtcgaaatcgagaatctgagagttgttgtcacttgaagaatctggattctggaaggctgttgttggtgtgttaaatgttggattggaagatgaatccagggccgtagctaggagacgaagggtttgttgtatatttgcgtttgaaaaatctcggtttttgttgctttagagattgttggagaaaatatggatcttgtgattggtggaaaatttaagcttgggaggaaaattggtagtggttcctttggagagctttatctaggtaacaacaaaaggacaatcctttgttattatctcattactggattttctcaagtctaagttttaagtgtctcctgttgtttgaatcctttttacaggtataaatgttcaaaccggagaagaagttgctggcaag

SEQ ID NO: 8316 - DNA, 1226 bp, Arabidopsis thaliana landsberg
tttttctagttcgttgcttgatggtcgagtcagtgtatgtttttaatcctcacttgcctgcccatttctttggtgtttacgatggccatggcggttctcaggtaatgaatcgatttggtttcgatatgatatgatcggaaactgcaaaaacttggtttttgacatttgtttttgtgtgtttaggtagcgaattattgtcgtgagaggatgcatctggctttgacggaggagatagtgaaggagaagccggagttttgtgacggtgacacgtggcaagagaagtggaagaaggctttgttcaactcttttatgagagttgactcggagattgaaactgtggctcatgctccggaaactgttgggtctacctcggtggttgcggttgtctttccgactcacatctttgtcgcgaattgcggcgactctagggcggttttgtgtcgcggcaaaacgccactcgcgttgtcggttgatcacaaagtaagtatagatgtttctatgaatgaattagtacaatcatatattcattaggacttgcggttttttgttatggtgttaccaatcatagcatgtttctatagattagttaatgtacttatagcgtttgggtctacatttatgtgtagccggatagggatgatgaagcggcgaggatagaagctgccggtgggaaagtaatccggtggaacggggctcgtgtatttggtgttctcgcaatgtcaagatccattggtaattatttaactttctcttgataatgatccatgaatttggttcttttagttgtttccttacattacaacccgtcgcgaacaggcgatagataccttaaaccgtcagtaattccggatccagaagtgacttcagtgcggcgagtaaaagaagatgattgtctcatcttagcaagtgatggtctttgggatgtaatgacaaacgaagaagtgtgcgatttggctcggaaacggattttactatggcataagaagaacgcgatggccggagaggctttgcttccggcggagaaaagaggagaaggaaaagatcctgcagcaatgtccgcggcagagtatttgtcgaagatggctttgcaaaacaggaagcagagacaattataagtgttggtagttggttgaatttaaagggaataaggaaaatctaggagcaaatcattggaattgaaaaagaaggttttgaagaaaagttaaaagaaagttttgatggtgggt

SEQ ID NO: 8317 - DNA, 801 bp, Arabidopsis thaliana landsberg
acatattatgggcctaaggataatttgaaattagcacaaagctttaatgagtttccatttgtacatactacctggtaagtataacaaaatggcaagcttcacttcgtctatcatcccgacactaatgaggttttctgggttggattcaagttcaactgtgccattcgatactaacacaaaatattgttaaaggccaattatgcttactaactcaaagaaaatcgaacagacatcaaatggatcttgattaccaaaaaactgttcttgtaaaaaatttcatatacatataactcaataaggacctataactttttaaaagattattttaccatatttaagaaatatttaactaaacttttgaacatgacctatatatagttcaaacatcctaactagacatataaataaaattgaaaattattggagggtcttaataagatactccccccattataatcataactaaaaaaaaataagatagaaagaagagaaaatttctcaaataagaactttgggtatactaactagaactttacaattgtctctttttaattgttcattttttttaaaattaaaattattaaaaatattaatattttaaaagcattggaagtgctctaaacctcttgtcaaatttctagtttcaaatatttacagctcataattagctggcagtgcaacgaatattttaaccaaattaagaaaaaaaatatgccccaaaaggtataatatatgcatggattcacaatttatctctaaaataactgattttcttttagatccaatcatgaattacactta

SEQ ID NO: 8318 - DNA, 1346 bp, Arabidopsis thaliana landsberg
acacctgatcgaaaaatgttagagctacccgcaaatcacgcataagtaaataaataaaataaaaaagttcccataaaggtcatttgaactttgagactaattttataatcagagtctgaaatgtaacaaatcaaaatttgtggggttaaaacagaaataattaaaaatatgccacttgtaataattccaaagcaagctctggtgacacgatcatcggaacaaaatagagtacccggtgacgatgatgaccacgttaacggcgacagtgccggaatttctacccccgtcgctaaaatccaccagaggatatttcaattctcatagtgaatttggcgtttcaatctctaaatttagtcggagaagatttcacaatccgaccagagtcttcgccgtttcagatatcagtaagctcgtgacggagtttgatccgaagattccattggagagagcatctactccgccgagctcgtggtacactgatcctcaattctacagtttcgagctcgatcgtgtcttctatggaggatggcaagccgtaggttaggacaattcacactcactgagtgttaaaactgtttctctaaagtttttaactttagccattacatatgtttcaggctactctgatcagattaaggagagtcgtgactttttcactgggaggttagtaaccacatgcattaagatttgttcaatgtcttgttctatatgtatgagaattttgggagaaagatagaaacattggtgcaggcttggagatgtagagtttgttgtgtgtagagatgagaatggaaagatacatgctttccataatgtatgctctcaccatgcctcgatcttggcttctggaaatgggagaaagtcttgttttgtttgcccttatcatgtaagctccacgatgaacttgaaaccgtaactcaactgattatgcgctgaatgaatacggttttgagtcatgttatgttattctttgtggcagggatggacttatagcttgagtggatcgcttgtcaaagctactagaatgagtgggatacagaatttttctttaagtgtatgtggtctctcactttgtttttgttttataagacgatatagtttgagttcttacatttgactgtttaaggatataggaaatgggactgaaacctttaagagtggctgtgtggggaccttttgtgcttctcaaggtgactgcagccacatcgaggaacggagaagttgagaccgataattagtggcatcagaatggcttggtactttcgtggggaggttgagccaaggtggagttgattccccgcttagttatatatgcagacgtgaatacaccattgaatgtaattgga

SEQ ID NO: 8319 - DNA, 1888 bp, Arabidopsis thaliana landsberg
gcaggtcgactctagaggatccccaaaatagttactcagtacttgggttgggtacatatacgagatcgaatggtgatagctaaacaaggaacaaatgaatagaacaagtgtgattaatgcgaatcaagcgtatagaaatcatgtaacaacaagaaaagttgaatagtactacatatataaatgcatgtagctataacaaccacaaattctgtacccaataatcaaaaatctattaacatatgatttacatgtctaacaatgttgatttttcgtctagattttatgctaccgtttatcatgtttaataaagacagttatgacgttgggctttaaagcctattaagaaaaaaaagtctgttggaaagctgtttacaatttttatgaaacgcaacgttttaacgtttgtgagaaacgcagcgttttagaaacttaaaacctgtcttttgttggtgactgcacacggtttggtcatcatcacttcggcgatggcgcacggcggatatgcgaggcggagagttgcagagcggaagacgacggcaggaactagtcggagatcgaaaggattgcgcgtggagaaaaaaccgaagaattcctctctcaagaatcaaattcgttccatcggtcgcatgattcgtaaagtaactactcttcttctcttcctacgaaattagcgtttagagttaccttctccggccttttagattgaaaatttagctaatcaaagtaggtttcagtgttttctcttaaatcttttgaggaatttgtttcttatgattataataggatcatggtcgattaacttgcttatgagagatcatgaattgatttcgagaagcaatatgtctttaatggagaagagatgaattttgatgtatgaatatgtacaaatgcaattgtctcttaggatcttcctcctgaagtaagagaggctctagaaaagaagttggatgatctgaagaagcagcaagatatccatttccgtcttgcttttgaacgtaaaatcttcctaaggaacagaaaggtcagattcttcggtgagtgctttatttttgatgcattgtatatttgtattgttctgagttgtttttccgctgaatcatttggcttactcggacaaaacaattacatctttctttgtgtagagcggagaaagattgaaaggagtataagacgtctcgagaagctacatcggagtacatctggtggttatgtgcaagatgcagaaataggtgggcaactcaatagactcaaagaagaccttgaatatgttagggtaagcattttatacaatccaaatccagtttcctgtgttagtcggaagaatagacgagttcttctttttcacaatttcttcagcgtgttatcctctgctacatttcctagttatccaatagaatgagtctgttgaaataatgctactgagatcttgatatgtgcaatgcagttcttccccaagaatgagaagtatgtatcgctatttagtggatctgatgatttacaagtatctgagcggagaagtaaattgcggaagcaaatcaaagccaacataatttttgctgctgccagtgggaaagagttggaaggtaatgatgatatgtggagatgtttatatgggtcctttttcccttgaatttctgtttaaaatttggggcagcgtgcttttttttgtcattgcatgcattccgaccttctgttggcttttgaaaaaatactgattatgttgatcattaatattttttggttcgtgtgaaaaacagagacagggagcgaagatgatgctcttttggacctgagtgacgatgacttctccctcaacgccagttcaagtgacgaagcagatacggatgaaaagtggactgataaaagcacaaagtaccccttgtaaatg

SEQ ID NO: 8320 - DNA, 1719 bp, Arabidopsis thaliana landsberg
atctagaggatcccctgattgatggttttatcttttgcagagggttatgttacagtctggtgcagtggaaaccattgtggtgtgtctgagtcaagttgttactgaggatgagcttagagatgatgaggagtatggagatataatggaagacatgagacaggaaggcggaaagtttggtaagagacctcttaattgcgcaatatggtctatttaggcatataagattagtagcatgttgatctgtctctctgtgttcttggttgtgctgttttacagtcttttgctataaagaatcagcggtaacatacacagacaggatactgcataaacctcctaatctatttatcaccagtggccactatttcttaaaagagaaaactgacttgtttttgtctgtgtaggcttgtctagtattcgaaatgtatcgttgtttgactcttaaaatgcaggtgctttgaccaatgttgtgattccgcgtccaagccccaatggtgagccagtggcaggccttggcaaggtaaacttatctctctctctttctctctacttcttgtatatttctatttagtcgtaatctgactgtctgatatatttaatgtgcaggtgtttttgaagtatgccgatacagatggctcgactagggcaagattcgggatgaatggtaggaaatttggaggaaatgaagtcgttgcagtgtattaccctgaagacaagtttgaacagggtgattatggagcctgatcacttctttgtttgctttctattacttaaaagttaagtactttgcttcagtttcaggacccttttgcgtgattgtaagagtatgagattatcgacacgttgcttattataacgtttttatctcatatctttggtctatttcttaaatatttatctcaaaaattattcacagaataacatcatgagtccctcgtaaaacatcattcgtctctcgtaaatgtgacatatgttctaaatcaacacaagaagttgagtaatctctctattgaaatattcaagtagtttggttctcttctgatagaagaaaaaagaaagaaaaagaagcaaacttgtaaaacccaaaaatctcagttaagccactaaaaccctaaaggcgtctccttttctcgccaccactctccacaatacccatttctgcaaaatggcttcttctcgtatttctctccgccttgttcgccgatttgcctcagccgccgctgacggtacgaccaccgctccctcttcaggcaaaatctctgtctccaaagctaagtccactctccggaaagaacacgatcccgacaaagctcttaagatctacgccaatgtctccgatcactcagcctctcctgtttcatctcgctacgcccaagagctcactgttcgtcgcctcgccaagtgtcgccgtttctcagacatcgaaaccctaattgaatcccacaaaaatgatcccaaaatcaaagaagaacctttctactctacgcttatcagatcttacggccaagcctctatgtttaatcacgccatgagaaccttcgagcagatggatcaatacggcacacccagatcagctgtttccttcaacgccttgctcaacgcttgtctccattccaagaatttcgataaagtcccccaactgttcgacgaaattcctcagaggtacaataagatcatccctgacaaaatctcttacggtatattgattaagtcatactgtga

SEQ ID NO: 8321 - DNA, 2969 bp, Arabidopsis thaliana landsberg
ttatctagcaattatgtaagaagtctggttagaataaattgatggcttgagacatgccacattattttcggaaaatatatttgtccgtatgtattcgggttgcttgagatctttaaaatctgactatttctttttttttgttaaacggttttcttaaataaatgaaagaaaagtttacaaagaaaaaatacgaaactgttacaaccagaaagataagaaagaggactagcagactatttcatggtgtatataatcattttttttttttgtcaaacataatcatatatattatatatataacatgagggattatattattgcttggacgactttcgtaacatataatagtaactatatatattattcattattacatgtatacgtcaatgggttatgctaatttatttggcgtttacgggtcggcataaattttttttttgttctaatggtaatgttggctctaatgttctgagtattgtttaatttgttatcaattaaaatattttatattttaagctaaataggagtacaggactatagaaggcgaatggtctacaaatgtgaaattgacacgttaactaagacctaattcgatttgagcatcttggtattttctttaatattcgtagacctccgcaatgcctgaaattagagcatcttactgtcgcctaacatttatgcgtcttctatattagtgttcatatgttcaagaggagatctacgttgtacgagttgtttttttgtaatggttaaaatgagtatatcttcacacatctacaaatctagagcttaaacaggcttaaaatcagatctcaataaatcatcatgtatccaaagccaaaggtaagctgatttcaaaggtgtcggaggaagaaccaaaaacatagagaatatcgaatacataaataaatgaattaagtacccccacttgccacaagaatataaatttgcatcaaactttctcttattttacaaaccctaaaagagctacatctttcgcgatcactaatgtttacatcaatcaactatttaagtaatagaagctttccaaaaagaaaaataacaagttgaagatagtcgatagtgattatgattaagtctcactttttttaatacaaaagataaagtaggtctggtgataaacaatccatttgatttttaaatcacaaaagatatatttgtttttttataacaacggaacctacttgtgttataaatatatgaattacaacaatacatattgggaattttacaacacttggatataatcttactaacaaaagctatattcaagttcttcttgtgaatctttgttatttggtttttgaaaaacattatagattataatagaattttatgcgctacatgataaaaaattgtcaacgggtatatgagtaaacacatatcacatatatatatgatatgaacgtcgaagctgtctttctactttttgtggtcttcaacattttcgggtcgatgtctcaaatgttgtttgttttttactaaacaaaagaaaaagaaatcatagaacttattagtaaggactataactttttaaaagattttggttgtagaaattaggctgatatttattttgtaaaaactataagattttgaatttttgactttgacatgaatattagtagggtattacgtaaaatttgcaagaaatgagaattcaaaaagagccaacaaaaccaagtcctgaaaatggacatgactaattaaagaaagaaaatgaaaaaacaaataaacttccttactatagaaattattgtttctttttaagtcaatggtttgtttttttttggtttttttttcatgttacttgttggtacatccatattagtcttctattatcatcatgataatacaaagttttgactctaccaaattataaaaatcataaaagacgaggagctccaatcacgttcaagtaatagtatagatataaggaaaggaaataattaaaagaccctaattaaaatttagttcaagacctactttaaagccttttacaaaaaaagaaaagaattctctaagtcgaaatcgttatcgtagtacgttcatgtcttttccccggccaccgaaacgatgccatctgtttagtgcgcctttataattcaacgaccctttgtacttttccgattcctctttctctataacttcatctctcccattctcttcactcttctcaaaaattcgatctttagggtttttcttttatcctcttatcgctaatctggagctctatagagactataaaggtatgtttttttttcctcaattacaggctcggatgctcaaattttgtaaaaaatgactattttctattgctgaattgctcgaattgttgtgaatttagggtttttgattgattcgggagctcgagatttgacttcttttagctgattcggcaagtttgtatctagaaaggatcgattggtgaggtcaatagtggttggtgggttttagtaatggaagacggtgagcttgatttctccaatcaggaagtgttttcgagttcggagatgggtgaattaccacctagcaattgttcgatggatagtttctttgatgggcttttgatggatactaatgctgcttgtacccacactcacacctgtaaccccactggaccagagaacactcatactcacacgtgcttccatgtccacaccaagattctcccggatgagagcgatgaaaaagtttctactgatgatacagctgagtcttgtgggaagaagggtgaaaagagacctttgggaaaccgggaagcggttagaaagtatagagagaagaagaaggctaaagctgcttctttggaggatgaggttgcaaggcttagggcggtgaatcagcagctggtgaagaggttgcaaaatcaggctaccttggaagctgaggtttcgaggcttaagtgtttgcttgtggatttgagaggaagaatagatgagagatggatc

SEQ ID NO: 8322 - DNA, 481 bp, Arabidopsis thaliana landsberg
  unsure (1)..(481): unsure at all n locations
gtcctcgtagctcttcttgactctcgttacactgagctagctgagctcgtcgataaagctcttctccttcagacacttgaagacgctgttggtcgtcacaatattaccatttttgctccccgcaannnnnnnnnnnnnnnnnnncttgaccctgagttcaagcggttcttgctcgagccaggtaatctcaaatctctgcaaacactcctcatgttccacattatacccaatcgggtcgggtcgaaccaatggccttcagaagaatcgggtcgggtcaagcaccacacgctagggaacgatcaggtccatttaagcaacggacaaggaaaaaagatggttgatttagctgagattatccgacccgatgatttgacccgacccgacggattgatccacgggattgaacggcttctcattcctcgctctgttcaagaagatttcaatcgccgtcgtagccttcaatcaatctccgccgtcttac

SEQ ID NO: 8323 - DNA, 541 bp, Arabidopsis thaliana landsberg
  unsure (1)..(541): unsure at all n locations
cggcaatgctgagtttacttttacaaacagattctgcaaactttaaattaagtttctaatctcttctgaaaccaaacaaggtttttatttgttacctccaagcacaagaagtgataagaggttgattcttccatcctaaatacaatgctccatctctttcttcaagtgtatacttctctgaataactctcaagcaatcctttgattgttgcgttcacataagagctcaaaggatacggtttaaaacccgccatgtgaaaccgagacctccatttccctagtggctcatgcctctcttctctttcgacaccttcgcaagctataagattcacaacctctctagccaaacaatgctgctcaacattgatcctttccttgtgatctctagcgagtttcacatctattgattcgaaaactgccaagtaatggttcattgtctcgacaaaccggngaagaaacggcgcagtgtttgtattcgcttcttgctcaaccagagtcacaacgtttgggtgacaagtgttgaccaatctcaacaatctatc

SEQ ID NO: 8324 - DNA, 2019 bp, Arabidopsis thaliana landsberg
gatgtctattgagcaggttgtagtcgtaattatcatctaagccttttcaataagcatccttttgttgccgttatattttaacatttactattcatgatgcctggacagatataaccacttgtcaacccaactaagttaatatgggatatgcatgtcgtaaattacgagtggcatgagttctttccaaatggtagtgatctttactcatagcatcctcatgcatggctatcaactacttttttaattaacagaatatatgatattcatgcagccactcataacattggggtaatcatcgccatatggggtccaattgtcttggtaagtaatctgtgttgattaacttgaaaagaatatttccaataccctgaagtttgtgattcatatttaggtttactttatggatacgcaaatatggtatgccatattctctactctttttggagggatatatggagccttcagccatctcggggaggtaattgttgcacttctcttagtacggaaaattttataaatgaaaatcttatgtgacaacaagtttgtgattccccaacattctgtatatttttcttctttaacctccatttttacttttgcagatacgcacacttggaatgttgcggtccagatttaaagttgttccatctgctttctgttctaaacttacaccgttacctctaggtcatgcaaagagaaagcacttggtattagccacacatacaaatttaattgataagatagtgtacgccaacaagtttcggtttgtgggtgaaaatgtaacatttgagtaatgcaggacgaaacggtggacgaaaaagacattgcgaggttctcacagatgtggaataagttcatacatactatgcgggatgaagatctgatcagcgataggtttgaggactttttgtttctcttttatagagtcatcacaattaccttctaagttcgtttcataaacatactcgtgttctttacttctttgatgtgtagggaaagagatttgctacttgtaccttcgtctttctggagatgttactgttgtgcaatggcctcctttcttgcttgctagcaaggtaaataagacagctctctcaataacctcttcacgccatcaattatctcttctttgctgaattgtggttaccttttggtaacagattccaatagcattagacatggctaaagatttcaagggaaaagaggacgttgacttattcaagaaaatcaaaagcgaatactatatgcattacgcagtggttgaggcttatgaaaccgtgagagacataatatatggccttcttcaagatgaatctgataagaggtgagtatttttttttttccacttcattattaaaattggccccaacatctaattgtggatggcctactaactatactactgctgtctcccaatctatataggattgtaagggagatttgctacgaagtagatattagcatccaacaacacagatttttaagtgaattccggatgactggtatgcctttgctcagtgacaagctagagaaattcttaaaaatcctggtaatgtaaatatagattgttttttctcgttcaatgccaataattatcatttgtttatgttaattcactccccctctctaaattaaatttggtcctgttgacagctaagtgattatgaggaagatgattacaagtctcagattatcaatgttctccaggatattattgaaatcatcacccaggatgtcatggttaacggtcacgagtaagtcttgatagttcatatgtaaaaattttgcctcattttctatgcaagaaaatctcctctgcttttcttctttctagtttccaacaatccttaaatgtgtaagcccaaaaactcgtccatgaaacatgctttgtcattctacctgtagaatccttgaaagggctcatttacagagtggtgatattgaaagcgacaagaaagaacaaaggtttgaaaagatagatcttagtttgactcagaacatatcctgagggaaaaggta

SEQ ID NO: 8325 - DNA, 439 bp, Arabidopsis thaliana landsberg
  unsure (1)..(439): unsure at all n locations
agccacttgtgtttaagactggagaggatgcattctatgtggcggtcccgtttaaccgaacatatctatttacacaacactacannnnnnnnnnnnnnnnnnnnnnnnnnnnnnnnnnnnnnnnnnnnnnnnnnnnnagggctactgatacaaggataacctgctataacactattaaagcaggaccctgcgtccatttatgcataccacagttattaatgatatgcaatgaacaccttatcttccaaaaaaaatatgtaggtaagactaccattttgggtacacaaggctttaatgaacatacattgcaggatggattgcatgcacctataatcgatgatcctttacgagcaccataacgaactgagagatctataccgatagtttcacgactgcctcttgtacaaccattatttcacccggctgtcgtcttgatgat

SEQ ID NO: 8326 - DNA, 1805 bp, Arabidopsis thaliana landsberg
ccatatggtaaaaagagagagaatagcttgtaatatatacctcaagagtctcaaaagatttcttcaagtattcaacctcggactcaaagttggctacatagagcattgcatcaactcttttaaaggcgaaagggatgtccaacattgccttaaggaatttctcagcatgtccaagcttaacaggcgaatcatcattgtacgctttcaacttgcgctcttcttcttttgtcggtgccatcttcagtaagctctcaagaagttcagtccccagtgtatcagcattgcctgaaaaagcataactaagaacatcaatgtaaccaagaatctccacaccatcaaagaagcaaagctttcagaataactcaaccatatcatcgaaaaaccattaacaaatgcataagaactctaattctggagatcaaaggagaagaaaatgagaaactatgtatgtgacagcatagtttaccttcaagaagagcctcacaaacttcttctatagtgacattaagtgcacgaagcaagatggcaatattctgagccttcttcgggtccaggactctgttctcttggttcgggctcgggagaacacatcttggagttgtctgactctgatttggtttgttgtttaacgacttcgccacaaacaacgtctcaatcatctcctcatctaatctgcaaaccacattcataatctcaacaaccacattctcactaaaagcatatagtatcatataaacgagtatgtcacattaactcacttgaaagagcttgatcgaagatgatcccaaaccatctcacgatccgaacttgctctaactttatcccaatgtaacgcctttagcttcggtttcggagtttcctccgccgcctcactcgcacaaaccgtctctggagtctccataggagacgaagtcactggtaagttttcagatgggatcacaaaaggatgtgaaggcggtgtaagagaaggcggtctcgagattgtgtccgctttagtagtcacctgactccgtcgtccccacaacggcaacggtgggggaggaggaggagggcggaggcacacgagactgtaaaatttgaggtgaaatgttcgatatccgtggtgatacatctaagctatgactaaaatctctatccggagaagatgatagagactgcgaattccgggaagataacttaggagatgtaactggtgacttatgagaagctttctccggtgaagaacaaacagaagaagaagacgacgacggtgaacgagaacgtaatgcatctaactgcttaaggaaaccttgtcctccatgagagttagaaggagaagatagtaactgagattgcaaaccttgccggagattactcataaacgccggtaagacctccggagatttctgaaaacatctatacggtgatgtagaagcagaagaatgcgacggagatctcaagtaagcttctggtgtatcatttggtcgtcgttccggtgaagttgaagtagatgataatggagagttctcttttttgttattctccggtgaagttgttagagatgtaaccgtcggagatctaaagatttgattcaatcctacttcatcggagtttttcaatcccgacgataaagaagctaacgacagtgacggagaccgaacaaatctataatcggttaactccgcggttctggtgtggagataaccggcggttttggttcagatctcttaggactcattgaaggagagatactgataaatgttgatcttctggtgaccagagcttgaagatgagcagagatagtgtcattgtacagatctagattt

SEQ ID NO: 8327 - DNA, 2409 bp, Arabidopsis thaliana landsberg
tgctgtaaatccatcgtcgccggcgggtcgacaagtttcagcgttgatcggaggaaaattaaaaacgaaaccagggactgtgattgggcctgtattgggccttcagacattgatgttggtataacgattttttttttttttttttttttttttttttttttgattcgaagtttggtattaacgatttttgaaaagaatatattacagtgtaactggaagatatctaattggttaaaaagtaagaaaggtggagtcaaagtatatgtatagagatttgtacatagatgcaatggttggagtcagcgaggagcgatgctgggaacaaagccgctgctgagatcgcttcctagaaggctcgacgactcgtaaaggtctcttgtcacatttgacgacgatgttgacagcactgacgaagatgacgccaattccactcttgtctccctatcgggggctgcttggagcagtgactccagctccttcaccacctccgccattcctggcctcatctctggtgagtcgtggctacacctcagtgccaaagccgcaaacttttcaacacttttcatcgaccacggctccattctcttgtctatcagcgataccatcatatccctctgctcagccgtcttcacctctcgtactatattttttccatgggatatggcgtgcataccagtcagcagctccaagaacacaactccgatgctgtaaacatcgctcttgtccgtcagcttgtgtgtcaggaaatattcaggatccaggtacccctacaacattcaataaaactaagcaatgaatctcttgtgccaatatatgtttcacatcattcattttgatgactcactggagtcccacggacaacggttgagacgtgcttaggcacatcctcttcgtcctccaaaacaggagcaagtcgagacagtccaaagtctgcaactttggcattgaagttggggtcgaggaggatgttactggctttgatgtctcggtggaaaactggcgggttggcttctgtgtgaaggtagagaataccttttgctgctcccaacgcaacacgaatcctcatcccaaagctcaatgactccttccccttagctgcatcaccaaatattccatcaattgagaaaactaaatgacacacatccgaaaacgccccatgaatcattgtgaattactaccagacaaccagtcgcgcagggtgccatttgacataaattcgtacaccagcatctgcaaattcagcaacttcataagcaatttttatagacatccaactgataacaccttactcaggcggttctactgggtatcaagagagtacctgctcgctttcttcatcacagtaaccgatcagtgacactagattccgatgatgcaacctcgagagcagctctatttcattcaagaactccttttcaccttgcaaagacccttcatctgctcgctttattgcagcaacagtattgtcagataagacacctctgtaaacctttccatagcctccgcgcccaaccaaagttgagctgctaaaatcgtcggtggcctctgctagctctttgaaactaaagcctcttatcccagaattcaacaaggaagccttcgaggctgacaaatacaaccagattcagttaaagttggttgtaaatttcagtgggataaattgggaatggaagatttggttacgcttacatgaccgtcttctagatatctctcgctcgtgcttgctgtatcttctaagcaacaaggctgcaaccacagcggatatcgcaacagcagtcaccacagcccctgcagttattgctgccaatcgtcgccagctgacgcctttcctttcactgttgaagttaactgagaggagataaagaagactttcacttagctcttagcagtcagtctagatctacttgggtaaaaaacacttattaggctaaaaaggcacaccatataaataaggcccctgcagagtgaagttaagcagttcatacgggccaattaagtcactcccagaaaatctccataaagcgaatatgcctcggattctgacaacttcactctcgttaaatgttcttgaataggtttcattcactttcggaaaaagttccatatacatcctcagacaaggccctttctcccattgatataagtcgatccagagttgatatggttccatttgatgcaaatcggtaacatactcgcctcattgatcaatatatggagggaagtatgagaaactaggtcttttgcgccgaaatccaattctaagaggcgctgcacaaaagcctcgtaatggggaggctggactgtattcgtagcagtcaggagtggcacaggcaacagcaggtcagtccagtccacatttggttgcatagaaaggtagtgatatcaactctttgcctttgcactcacata

SEQ ID NO: 8328 - DNA, 1556 bp, Arabidopsis thaliana landsberg
gtatttttgtccggtacatttagcaacggatatcttaatttggcttaaacgcttgactaaaatggaaacgagttcttggtaacaactttcccgcaaatccaccacgctaaattgtaatatttactcacagtagaatagcaaagtttacgtgttagacctaagtccaattacaattttcatatttttgataaatattataattttatttatattttcattggtaaatcatgagtatagagggtaagtaaaatgagagagcgaaatacaaacacagtgataaaaaaaggctttcttatcacatttacattgcctccgaaagaaaacagattatgatacactttacttacacaaagtataatacaataatgttaccaattttgttagatcttgaagttgaaaactcttgttctcacagaaagagggattcttacattatggccttcattgtcggcccaagtcaagctcccaaagagataatcagtattcgctctatgagtcgtggagactttcaccgtgaacgtagtcttgttagtgttggaaccgaattcaagagtctcaggactaacctgaaggttaataccttgaggcgcttggatcacagctttgtaaaccgaaccaaccggcccaacattggtcacagttcttgttattgtgatctcttcactaagatatgggattgtgatggaaggcatgttgacatcaagcattgatggaattggggtagggcaagtgtagatttctccaagtagttttgagatggatgtgttgtcatagcctgcggagcacaagtaatgaacatactcatcgtggcccatgtcgtaaacaagtcctgggtccgctactttcaccgggtttacaaggccgcctccatagtcaaacgggtcggcgagtttgcgtggggaaccctcggctgcgataggctctcccgatgggtcggtttgtaacgctgcaatggttaacagttattcccgggtgtttcttgtggagcaagaaacaagttttttgcgtgaataaaacttatgtatatttaccggttgtgacgagagcagatcggatcgctgcaggagaccagtcggggcgtttttttctaagaagtgcgactattcctgacacgacaggtgtagacattgatgttcctgacatgaaatcgtatcctccccctgttggtacggctgcgagtatacctgaacctggtgctgctatatccggctgtacttaaatttaaaaagtaacatttagaaaatgctaaacaatttgaatgtaagagagagtaaaaagtatcccaccttgagaatggcaggagatagtgaattgggacctctagaagaaaatctagcgaccttggtcgctaaaggtcggccaacgaacgtcttggtcggactgattttagctattggtgatctgcagaaatcatccaaggaaattttttctattacatcaaaggagttcatagtttgattttcgacataaatgtgaagaggatgagcttacttggttgtttggatgtacaataaaatgtccatgccaagttcgttgtctacgtaggcaatagcgat

SEQ ID NO: 8329 - DNA, 2413 bp, Arabidopsis thaliana landsberg
  unsure (1)..(2413): unsure at all n locations
cccgcttttgctttgggtcataaaacgtagccaacccgaaatcagcaatctttagtattccatcattatctataagaagattagaacctttgatatcccgatgtaatactcctcgactatggcaatgctcnnnnnnnnnnnnnnnnnnnttcataaagcatttaacctgaagaacaaaaacaataacacaccatttagaatgatctagatataattacgacaaaagatcaagcttattttttagacctcaacttttgtatattcatatacaagttgatatcattgttactgtactttccatactaaactaatatgtaattactcaacttaacagcaagtaaaaatatcaaatatgcagagataataaaagaaccaaatccaatgaacggcaattcataaaggatgttgaaattttatcacaatcagaaaacataatgcaaattgggtccaccgacaaataattctagcaacaccaaaagcacaccagaaacaaaaccaatcagacgataacattaccatatgtgaccaaaacaaaagtaccctaaagaaaaaaatagaaaaacataacataataaaagtgattggttcttgaaaagaaacctgaaaaacattacaagaatttactaccaaacacattaacttcttccttatctgttccatgctaatttaataatcttctattgataaataatccactgtctatggtattaaaaacacaacacattagtcatacctgaggaagatcaaacttaagaccttgggtagcagcaagaccagaaagatcatgctccatatactcaaaaacaaggtagagactacaggaaacccgtgaagtaaccaaaccttgaagcttaataacattaggatgattaagccgtcgtaacacaagaatctctctagccataaatttaacactctcagcttccaaattatcaaacctaactttcttcaaagctacaatcttcccactcaataaatctttcgccttgtacacattgctatacgttccttgcccaatctataacaatcaaaaacattacttcattaaattaaaccaaacataaactaatcaaaacaaaaccgaacactttctaattataccaaacctagtaatgattattactttattaatgattagtgtttttgtacctaccttctcgagcttttcgtatgtggtagctctgcgaggtgttaagtctttgatcgaatcgccacaagcagcaataagccaaggtggccatccttccggcgtacggagactcatccccggacggcgagaagagccggcggagaagtcgccagtgtgccatgttcttctctccggctgaatctgaatcgaatctaaatctttcttcttcttctctccgatttcgacagaaacggcggcggtggtggttgaagaagaagaaggtaaatcctccgtattacggaggtctgccggaggaggttcatcgggattattgtgtttccgtttgtctccggtggattctttgcatagaacgcatcccatcggctaaatgattttgaatcggtgaagctttctctctttagcttaacattatcgccgaaagagctcaaaaattgatttttttctcttggagagagtgagaatcggattttgtgtaaaacgacggcgtttttgagtggagtcgagtcttttgcacgtaggagtgaaaaatggcggttttccgttactagtttattaagtaacgagtggtttcaccttacatttctctgtaacttaaaaaagctaaaggaattttggtatttattagaaaggcctgaagaaaagtggttaaaaaggttaaaaagccctttttgtcagctgtaaaaaatgaacccaaaagttgttatacttttttttcttgttcaaattaattttgacttggtagtttctttatgcttttatattttcttttgtgttatgtaatagtatattttaatctcactaggcatttgtcaactaatttgaaaatcattattggtggaattaacaataaaatctacagtatgttgtattttaccaataaaacatgtaaagctttggtacattctgatgtataagtcaatttaaaataatcgaattagaaccaaaccaaaaatacttgtagcatatagaaaatttttatcaataagcacagattgatgttaaattatctccagtttaaaaaggtgaaattctacagtctaatgatattttttatagaaccttttttttttacatttatccgtgtgatctagtacttgtcccttccaataacagtactcattccacttttaatttatcaatttgccattaagatagttaagatgaaagagagtagaactcgatcaatgctttaccagtcatacaggaattagtaaatgaaaaattaagtcatcctcgttgatgcagttaagcaaatctcaccaa

SEQ ID NO: 8330 - DNA, 661 bp, Arabidopsis thaliana landsberg
acgagcagaaatgagataaacctgccacaattttctggtggtcgaaggctcagctgaagagggaagggcaaagacaacactaaatagtttcaggtcagaaagataggtaaccgctgaaactggtccattcccagatatcatcaagtcaatctgcaccaaagaatcaagttgtgtaacgataaaccctaaaaagggaggtcgccagagaaactagccatattgagcaaacaggaagtatacctcattcccaatccgctctctgctaattttttctccaagagctacccttacttcctcacttgaagcagcttcttttagttcttcatccaaagtaaaaccaaaccttgcacctgttatggcagtatattaggacggacagacaaaatgacaaccacagagctcaaaatagaggatctgagatgggaaatgtaataacatataatgaaaaaaaaaacaagaaaataaaccacacgtaccaaagcgaacagcccggagaactcgcaaaggatcatccaaaaatgtggcttttgcaggcaagggtgtaacaatttttccggacttgaggtcatcgatgcctgtaatcatatcagctccttttaaactattattttgaacgtcacagggaatgaatgatgtgtacaaaaggatatactaacctctt

SEQ ID NO: 8331 - DNA, 2105 bp, Arabidopsis thaliana landsberg
tccactacatcatgcacagcaactgtttcccttttgtgaatcaaatccaataagatccctaacatcttcatcatctcaatctcattcacatccattccttcttcatcttcgctccgccattatcagcagcatcacttggttgtttatccttcttcttagtaatagtagacgcattctcgtcaacggaatcagtcactactcttttgcgattcctttctttctcatcgtctactgaaccctggcgaggccgttttcgcgacggagcatctggagaaggagacctgcgcctgtggtgtcgttgacggtcccggtcccggtcacggtcaatcgagcgggaacgagagcgatacctctccggagagcgcacgtggcgagcacgagcgtggtggtctggagtacgagatcgggattttttgtttctaagccctcggtcacggtcgcgctctctatctctttcccggtctcgatcacggtcacggtcacggtcgtctctacctcggcgtctatcacggtctggttcacggtccttatccctctctcgttcgcggcggtcgcgctctgacatggtggtgatgcgactgaggaaggtgctagtgtcagggtttaaccaatttcaacactgtaaattttcttccccaattttttctattaaaatgaaaatttggggttttatcctctatttttccaattttcttatattcatcatactcaatggaaaaataataataatctcattttgtctccgaactaaaagtatgaaattggaaatgaaaatagtggtccaatagcataagaagagaaaggatcttattaaagtttgtaatcataaataaaatttacagaatatgaacacaaatgcacttctcaaacttcaaagagaacaacagaaacaagcactacagagagaaagagagagatgacattttcactatatatattatataagcactaaaagtcctcctaatgaggaagaaagaagaagaaggacttaaaaaatatgagcagtaccaaagtcccaccactgagtcgctctcccctaaagctccagtatcctaaccgagaaccctttttcatcttcttctatggctgggttctctttcatacataggctctctttggttacgtgagatagctcgctagtgataattcgtgtagctcacttagcatccattcttctccggtctgaccacctagcactatcgctcgtgttcctcccacaacacaagtgccatgtccccaagcaaaccgaggcggtcttcctggaatgtttagtattctccaagtcggtttgtcctccgttgggtcaagtagataaagctgagacgctgagtgaagccctgccactgagccgccaaatatcaagattctgcctccagggaggttaactgcaacgtgatctagccttggtggtggtgctactcctcctgggtttcctgctccaggcattccgctaccggtcacacacctccaacaaggctcctcttcgcttagatccattgtgaagacatcactcgaacggaatttcaaaggcccgctcttagcaagaccaccaaacatcaagatctttcttcctccataaaccgatagtgtgtggcctaaccgggaaggcggagtccaggcagctggaatctctctccacactggtttctctattgaaaggtcgaggaggaacgtgtcacttagaagaacgccggaatctgcacagcctccagagactatcagtttggttccgtcaagggtgcatgagctgtgccatgatcttggtagaggcggagccaaacccgaaatttccctccaagtaggcggcttagcatcgagattcaagacaaacacatcgttcagcaaaccttgctgaccacagccaccaaatacaaccagattggagccatttacacaagtgagcgtgtggccccagcgtcctggaggaggggagctcactttgacatgttgccattcagggtaatcagaattcagatctaaaacaaaggtatcattcataggctgcatattcacaccttctcctccaaacagaacaactctgttcccgacagcacaagcactaaaattacagcgagaaggctcaacagaaccttcaaccgaaagtt

SEQ ID NO: 8332 - DNA, 611 bp, Arabidopsis thaliana landsberg
tataactttggtcaaggactctgaagctaaatctcaaggtaatgctttcatccgagttaatcttccagacactggagatcatcgtttctcataaggcacacaagacatataccaaaaaatacccaaaaatactataagagtatatcaacaaactttaaaatcttccaataaaacttttaatctttgttaatgatgtgagtgtgagcgatacacaaaattgttctgattgaaaatgaaattgagcgaatcagatgaagaaaacttacactttcaagagatttgagaacatctgccatagcaacgttggtcgtataggctgggtttttgttcctcttgcatagacatagaagatctcttctcaaaaggctgtggaaccccttttccgcaaatttgagagaaagagagagattgagaaatttctgattgggagagaaattgaaattggcaaagaaaacaagactaaatccctaaaattgcatgagtgaccattgtttgtggagtggaggtttgcattttgagaagaggaaactgggagaacttccataaatttcattttcttggagaagactaaatattttcgtttaattttacatttttataaacatatctta

SEQ ID NO: 8333 - DNA, 828 bp, Arabidopsis thaliana landsberg
tcactcctcgtgatattcgtgactacgatattgagagttttatacgacaccatatcgtgctactggctaacacctagacgaatcaagaagatcatggaacagcaaggcgtaacgggtcctaaaccgcgtccgttaaccggaaatatccttgaaatctcggccatggtttcgcaatccgcttccaaggattgtgactctattcaccatgacatcgtcggccgccttctcccgcattacgttgcttggtccaaacaatacggtatggtcttgaattgtaacaagtttgtgttttcttggtcgtgaagtctatacatagatttcgttattaagttggtctgttaattgtaagtgacatctatcaatggagccagataaaatgacggaaataccctccatgtattttttgttttttctccgtaaaacatactgaagaatgtttggcctttgattaaaggagggttacatgtaataaaatgagtaatccttagataaatttacgttttgatgaaacagggaagaggtttattgtgtggaacgggacggatcctcggctttgcttaacggaaacggaattgataaaggagctgctgatgaaacacaacggtgttagtggaagatcgtggctacaacaacaagggactaacaattttatcggtcgcgggctcctaatggctaatggccaagattggcatcaccaacgccaccttgctgcaccggcatttaccggagaaagactcaaggcacgtcaataaactagcctcatgcaaaaaagaccgcttagtttctttgacttttaatgacgtgaagtacccttatgatgtagggatt

SEQ ID NO: 8334 - DNA, 1730 bp, Arabidopsis thaliana landsberg
caaaacgacctttattttgaaaggaatgcttttttattaattggaaattacaaacgaaaacaaacaatttgtgtccccaactatattttttggaccaattaactaatcactaaaggtctcatgtggagacttaataaaccttaaatgtaattgtcattatgagtttgaatgacgttatgctgagttcaatgaaaaaatatggttggtaattggtagttgtgtgtcataactcgtaattaaatcacgccacaaataattaactcgatgctaattaagaataaaacctcttttcaaaataaacaaaattaaaagctttccatgtcaaagttgcttcctttggcttcttcctacacacttgcttcacatgtctactacactgactgactgacacaacgataaagtacacttatcgtgtttcttggtctcatcataagttcaatggcggacaatcgaagaagaagaagcctattcgacttcctacttttctccgtgtttctaggactggcatgtctctgtttatctccgattccggcaacagctcaacgtcggaaactcaggttcagtgttaacggcgagttcaagatactacaagtggcggatatgcattttgctaacggcgctaagacgcagtgtcaaaatgttcttcctagccagagagctcattgctcagacctcaacaccaccatcttcatgtcgcgagtcatcgccgccgagaagcctgatcttatcgtcttcaccggtaagacccccaaattgaacaaaaccctaacttttcttctcgtgatttgaaaaatcttaactttcaggatgtttacataaaccctaattgtgaaatttcgaatctttttggggttttgtttcgtttcaggtgataacatatttgggtttgatgtaaaagacgctttgaaatccataaacgctgcgtttgctccagcgattgcgtctaaaatcccatgggttgcaattttgggaaaccatgaccaagaatctacatttacaagacaacaagttatgaatcacattgtgaagcttcccaacactttgtctcaagtgaatcctcctgaagctgctcattacattgatggttttggtaattacaatctccaaatccatggagctgctgattcgaaactacagaacaaatctgttcttaatctttattttctcgatagtggagattattctagtgttccttacatggaaggttatgattggatcaaaacttctcagcagttttggttcgaccgcacttcaaaacgtctcaaggtacatcaatgatgaacatgatcaatcttgttttttgatcatgacattgttgttttaaccctggttttgatgatattgcagagggagtacaacgcaaagcctaatcctcaagaaggtatagctccaggactagcttacttccacattccattaccggagtttttgagttttgactcaaagaacgctacaaaaggagtgagacaagaaggtacatccgcggcttctacaaactcgggtttcttcacaacattgatagctagaggagatgtgaaatctgtgtttgtgggtcacgaccatgtcaacgacttctgcggtgaacttaaaggtttgaatctatgttatggtggtggatttgggtatcatgcttatggtaaagctggatgggaaagaagagcgagagttgtggttgttgatttgaataagaagagaaaaggaaagtggggagctgtaaatcgattaagaca

SEQ ID NO: 8335 - DNA, 1599 bp, Arabidopsis thaliana landsberg
  unsure (1)..(1599): unsure at all n locations
tccggtgttggacaaatccgaatgggtcaagggacaaagcgttctcttccgtcagccttcttccgcttctgtcgtcctccgcaaccgtgccacctccctcaccgtccgtgccgcttcctcctacgccgatgagcttgttaagacagcggttagtttcttcacacatatcctctcttctctaccacgtgtttaatgacttttatctgcatgattcgtaaagtgccttttgagtgggaatgtctagattctgttgttctgttttcctctgtttccacttttttttcagaaccaatttaaaccgaatttaccctttagatgttttgtttcagttttgatctagattttggtaatactatatgattcaaaatgttttaagttagatttataatgcaattccatttgattttcttaattttggttggagtagaaaactattgcgtctcccggacgtggaatcttggcgatggacgagtcgaacgcgacttgcgggaaacgtttggattcgatagggctagagaacactgaggcaaatcgtcaagctttccggactttgctggtctctgcaccgggactcggacagtacgtctccggcgcaattctatttgaggagactctgtaccagtctaccaccgaaggcaagaaaatggtcgacgtcctcgtcgagcagaacattgtccctggtatcaaagtcgacaaggtaactaaacgcatagactgtagagtatatataccaacatgcatggtgcttaatttgaggaatcttaatgagttatgtgtatggaatattagggtttggtgccacttgttggatccaacaatgagtcatggtgccaaggactagatggtctatcatctcgaactgctgcttactatcaacagggtgcgcgtttcgccaaatggtacagactagtactctcggttctcatttcatttcctactaccaaaaaatatgcctaggttcgatttcatagtgatttattgtctctgatggttgattaggcgtactgtcgtgagcattcctaacggtccgtctgccctcgccgtcaaagaagctgcttggggtcttgctcgatacgctgccatttcacaggtaacaaacatagcgtgtatcccaagaaacatgtcaaatcggagtgtatcaagctattcacacacgactttattttccaggacagcggtttggttccgattgttgagccagagatcttgttggatggagaacacgacattgacagaacatacgacgtagcagagaaggtttgggctgaggttttcttttaccttgctcagaacaatgtcatgtttgaaggtatattcgttataaagtgcttctcttaatacaacttataatgtctgaaaaatcactaaggaaacttttacccacaggtatcctcctaaaaccgagcatggtgactcccggagctgagtctaaagacagagctactcctgaacaagttgccgcctacaccctcaagctcctccgcaacagagtcctcccgcagtcccggaatcatggcaagtttnctccttctcttcacagttaaacattgttcgattcagatacacgaaaaggtgttttatgaggcaaacctaatattg

SEQ ID NO: 8336 - DNA, 632 bp, Arabidopsis thaliana landsberg
aacatttgttggatttctacatagcatatatcttagttaggattgatttgtttcgttagatgtatggatgttagggacgggaaccacaatagttcagtctgcttgaatgtttgcccctagagaagaatgcaatgatatgccgccaattgtgcaagcaggaaatctaagggaaaaaatgtcattgtatcagttcatccactcatcctgcaaaacttgacaaagaaaagatggtggaagatttaagcagtgctaggtgaagattttccagtgattctatcttatgaggttggaatccattatgtcttatttgtgtgtaagatggactatttctacataatatagcatatatgagtagaacttggtgtaattctaggaaaaaagtaattctgcaattgtgttttattttatcccatggaaaactttgcatctatgataattgatcattaaagtagttctacaattgtgttttggttttgtattcttattgtgttttagaggtcacctatgtgtcttcttgaagtgtcaacttatacccttaccaagaaaatgacatataaagtgatttcatcagtgattcttacacgtaagtctatctcatctctcgaataatattccatatgacattaataaaa

SEQ ID NO: 8337 - DNA, 2230 bp, Arabidopsis thaliana landsberg
  unsure (1)..(2230): unsure at all n locations
agaccggagaggggaaggagtggtacgatagcgcgctgcatatttaaagttattttgcttaacggcggcgattgcgggggcgggccacttctcatcgtcgtcggcgatcattctatgttcctcactactttactctacagagagaagtctcaattttgaccgaattttctgagatcttcgcgtattgaaactctcctcatttaaatttgttctttcttcattatcagctttaactttaaattacatggtgacataactcattaggctacattagtcttatctctcacaacttcaattttgacttttgagtaagctggtaatttaaatttcgtaaatacatcacatgatttagaatttgatttaccctttttcctcacattgattgtgtaaaagcctttctcaaattaaagaattgacaaatctgaccccaaaaagaacaaaaatgaaacaggatcaagtacattttgagagactattaacttctcttctttccattctaaacaaggattttactactctttgtctgcaaaaacagaccaaactcatggacacagcttccatttatgactttccataccctggatctggtaaaagagcaaccgtatgcttttaacttggggatttaactttattatgacggtgaatcactgtagcatttttctaaactagtctcagtgaacaccttttctgcttctttgcatcctagtctaaggccatggactatctccttcaagtccacaaggccacacccgggtattcgtcctattttcctctccttcaccatctctctcactctattaacatcctcccaccgtcccgtaacactgtaaatattcatcagcaaatggtaatacttgtagttcaaaggatctgtctctatcagggacttggcaatgctctcccctagagtcgggtttcctgtaaaacgcgacgagctgagcaagtttgcccactttgtagattctggtgtcacatcttcgtctggcagattcttcagagcttcctctgcttcttcagggaacccggcgctggagtaaagattagccatgcaccattggtgtccaaagttgggtttgatctggaactcatcaaccatcagagaatagtaactttgtccttgagaaacaagcccagctctagcacaactgcagagaacaccaacaaatgtcacttcatcgggtctaagcataccattgatcatggcttcaaataactcgagcccaccttcaggacgcccgtgaagacaatgtgccaaaatcatcacattccaagtaactttgtttctaatagatagactatcgaatatcctacgtgctaaacctacttccttgcactttccatacatgtcaataagagctgtatcaataactacactcgaattcagaaaggttcttatcaaagaagcatgaaccgacctaccttccttcaatctagctgatctaccacaagcattcaacaacaaaaccaacgtactctcatttccttggaaccctgctctgaccatctcacggaacaaactaatggaaactccaggattattcgcacccaaataagcactaatcatgatattccaagaaataatgtttttgtcaggcatttcatcgaacaacttgtnnnnnnnnnnnnnnnnnnnnnnnnnnnccatcccagctattatagagttccaggacacaatatctctcttaggaatttcaacaaacagcttctttgcaagatccaaagcaccacaacaagtatacatatgcattaacgaattttgaacaggcaaaacttgatcgcatccatgcttaatggcttgcccatgacacattttaccagaatcaacgcaacaagtcttctcaatacaactaatcaacgaaacgaaggtgtatgaatcaggaacaaaaccaaatcttagtatatcgaagtaaaaccccaacgcttgtttcggagaagacgagaccaaataagccttaaagacgggatttgcgcagtaaagcttgccaatgctgcggtatatcgaaacggtgtagctagaatcaccaaaacgcgaagaagacttcaacaatctgatagcccaagatgaatcccagaagttaccggaggtgattagcttcgcgtggacttggaagaaggtgtgtaatagagttggaatcttcgacaagtttgaaacccttaagcagacccgttccggggacgatgatgtgggatgtgacgaattggcgaatagaggaagcttttgccattcatc

SEQ ID NO: 8338 - DNA, 827 bp, Arabidopsis thaliana landsberg
aaaatatccatgctcggtgactgaagaagatatatatgctttcattttttttgtttttgtagctttaactaaacaattagatgaactccgaaggctagaaaaggaggcaaatgaacgagggagtgtcgactattctcaactactgaaacaactgaaacaaagtgaagagctccttgctgaaatcaaccgatttaaagtagcaactggtcaggggatgaaaaatcccaaccagttcgagggttcaaccatgcatcaatcggaccaaaacgtgttccagccgcaactcaacacctatgagttcaatcagcaccagcaattggacccaaacatattcaaagagcaatgcaatgtcaacgagtttaatcatgagcaaccaaaccatgaattttatggacataactaaaggattaaacatgtcttcaagttgttttagatttatctatatatgattataaatttgtaaccgtgagagggttcagacaatatgatttttttttaatatttttgtttagtttatttcattaaagctttgttctttcatttttttgttattgagattaatttttattttatcaaatttgttgaatttgatagagaaataaacatactctatatgtaattagaccaaagtagtcttttccgaccagtggatgattgctgctttggtcaacgtttcaaaagaatcgttttttcttttagttccttccttatttcgctattttcgccattgattgctgaagaaaccacagagagagagagattcacttccccatttcaggtcaaatttctttctttctaatagagtacatcttctctatttggggaaa

SEQ ID NO: 8339 - DNA, 729 bp, Arabidopsis thaliana landsberg
attgatcatcatttttagtagtatgtacactaatcaaaatgataaaaaaaaattaattaaattatattatatatttttctatatatagaatcaattaaatttgacaaacaaccttcaactatctaatatgcacgtttctttataaattaacttttattttcctaatattaagtaatgcatttatttatttaattgtttttcattattcttatgtacataattagattctaaattttattagaagttccaacaattatatctttataatttaaatatttgatatattaacaaataaatttagttttgtttttagatgaaaaaatttatatatatatgaagtgttattagatgacataaattattattatctaacaaaattgaatttaatatttcattttttgtatgaactaagataaataaaatttataatatttttaacgagtataaaaaataactaatataataattcttctttataacacaccacttctaattattaatttatgttagatgaaatttgtattgagttaattaatatttcttttaaccaaattttactactatatatatatgcttctatttaatagactttggaagtaagcattaaatgaaagtactaatgaaagatctatatttataacattttcaacaagtacatatatatatgtttccctccatatttaatatatttgatatacattaacaaatgaatttaagaatttctattat

SEQ ID NO: 8340 - DNA, 1623 bp, Arabidopsis thaliana landsberg
agaagtttctgtagcagctaggagaaggaatgctagattgtcttttgcgtttgtttatcctaacaataaaggtggctataatgtgagagaggtaagattacgttctcttcacaatcttgatcagataagttgtcaccgtagccacgcatgatcattgatgcattctagagtttctgtgttttcccctgccacacctctttgtcgcacatgtagctaccagtatcattcggagttttgtcaacaatgtttctcttgtacatgtctttcgcttattgacaactcatcttctcatggttattgatttttgaaacttcagagagaccacataatcatagctagttactacagaatgaagtaatttgattgaatggatgctttcagattcaatcgttatggctttacttgttctcttgtgatgcttgcatatgtattcaagaacccatgagaagagtctgatcttgtggtgttgtttctgttaattgataaaggttggggagacgatggcttatccaaaccgaaaacaaccagatgacagtaaaacgctttccgaacttccgtttgaggtaagttttttacatgcatagaagatcatcttgtatgatggttatataatctataacattaatttttcatattctgttacccaagtagctataactgatgttgatcaatctatctgcagattggagattatctggatgtggcaatttactaggaggtttctgtttcttgttaagtgggatttgggtgcgtgcacaatggaagaagtacacattcatatggttgtatcatcttaaacttcgtttagacatgtttgtattttttggatctagtctatgtactaatgtctaatggtttagtatgttatcctgctttttttgtttaacgtgttttcttttctaaagaaccaaaaaaaagatggaagaactcaagccattttatatacaaaaaggtataaatttagactatctatagactatagcacatgaatatgtattaaattaagatttcaacccaatttacttttattagtagaattactactcgcacttaacgtcggagaagtagctgagaaaaagaaatcgtgaaaaaaatgagagaagaggatgaatttagacaacattaatcatcaaaactatagtgataaacatagaagagtgggcaatgcatttcaaatattctcaaaaataaagatatagttatggaattatacaaaagtttaatagcaaaatatgaacgttacgtttacgattccctatattgttccaacgttaagtttgattagacttgaaagttgaaagtataataaaatttaaacgttgaaacggtaacattttattaccgttagaagataatattttattacaaaaattcagataaatgactctctataaatactcccatcttgggtcagaaatcggaatcctcttcattggttcatattttacaaaatgtcgagaaacaatctgtttttatttcttaattctggttcttccacttgagtcaagacctcattcaaacaaacataaagcatcatccttacaagggaaaatactctggtctaaatcctctagtgtttaccgttaaatggttttttttgtttgttatgaaagggttcttaga

SEQ ID NO: 8341 - DNA, 1867 bp, Arabidopsis thaliana landsberg
tttccactttcaagtctttcagtaaaaactccttctcatgaacctggtccccagttttgttaaccaacaccacacaatttgcatcagaagccattagtaacaacaactcaagaagtcaatatccatatccatagtttgtgttaactcaccgatatgttaggatccatataaaccttaagaagggacttcaaggatgggtatttcttcgacactgctacagcgtatcttggctgtacctttggtattgctaccaacactttcaacctatcgacccaatgcatattaaacaaagcatgtgatttataaaaagattattgaaactgggtttaaatctctaccataggctctctctaatcaagtgcttatcaattgcattcttggacattaatgtaccatcagcgtatactgataaccgagttaacttcttcctgcgcatcagacagtttgcttcagaatcaaggtcatcaagaaaatggaacatccactgggcatcatatcgaatcaaaatctttgggaacaaaattgaaatagcatagatattaatacctgacttggcaatgggctagactacttgttaaccgaacaacatggtcagccacctcagcctcgtctacacaatgccgggaatgtactccaatatagtgagtagttaacttcgcaattgcctgtaacacatcagagctttattaaggacataaaaggagcattaaggagtttttctttttttccctctaaacacattttgattaggaactgtagtacctcatcaataggaggctttctccaaccacagccatttacagggtccttgtactcaaccctctccctagaagatagagtttttagcttcaatatggaaacattaatgcaacaaaaatgtactttctcaaacgcactttttgtttacgtaggacagtaacttattggtgaggtagcacattgtataagatgggtattcgtcacgaactctgtagacgttttctagaagttctttcttagcaacaagattacaaaagtcttcagcctcatacacgagtaaaacatatggaaccttggaccctagaggcaatgtctgcaatagataaaagaagattaaatgaagagtataagaaatactgggtacagctgatttacataataatcttctaaggcccttcaagccaacgcacaagcgattcatttctttacttcatttaatatttcataatctgtaacccaattccatgacaggttgtatgaagttatattagatcgattaacttctaataggtacatatcttattcttaaagatggaggtttgaaaaaacaattctaacagaaacactcgagcaaaataattttgacaacacacaaaagagagcacacactcaatgcccatatgcctggatctgaaacacacaaaaagagagcacattcgactttacacggatatttcaaacctcgtgctgttagaagacaatcacgagagaggaatcatagcttgtcttccatcaatcagagtatgatgaaatcacattcgcaacacagaagagaatgatgcataagtcagggaaaaaacacatgttcaactaacaagcttatccacataggaaacagaaatatagaccagattggggcattgataacagttgcgagtactgggttctaagaaccacttgtcctcaaagatattgcagttatgaaattcaagatgcaagccaattgattaaaattggcctatactacaaaatttgactgaattatggtacctgagcaatatcctctggaagtgtcattgtccacacaatggatctctgaatcggattagtggttacatggtatgtaatacccttctctttcaaccccgaaatgagaagtcctgtaatg

SEQ ID NO: 8342 - DNA, 2517 bp, Arabidopsis thaliana landsberg
gtataaataattgaaaatatcaactcgttctctaaacacacctcgtggaaagctatgacaccgctgtcggataatgactaataaaagaagtatcgtgcacaagttccatgttgatcaacagccacttcactgggtgatgtctctgttgttcaaatagtgacttacggcattgtcttaaagggaaatattaaaacgctgcgtttccgtgtgatggaataattttgcaaccgttgccacttttacttttgggaatttggttgaacagcaacttgtttttttttggtggtaaatatttttggttgaacttgtcattcaatgtagcaaaacttagtaaaaatgctacaaaacataaagattttcaaatgtgccaaacctcagctctatggacgatttccctgttctaactattctaaaatgcatagttttggtgtagtgattaacaaaaatatgtatggaatataatcatgatgataatgataatggtaagattatgcttttacttttgattaaaagctagtgatatgatttgcctcttaatttgagtagatgattttcaatgtttggtactattttcattgttttagtgggaagaaaacaaagagatttggtgttcaatgtagcgttagttaagtagatgaaaagagatacgttgatgctaatgatgatgttatgatgtttgatactttatatgtttaatcatcatattatcattaatatgctttgtttaaatggtgatctttatgctctgttttggcttctactatatatatatgctgtatttttctataggaaagcaaagtataagtaacgacagttgaagtccaagtaaagtactagattgtttcatgcccattgtgcaagagccatattttatttattaacaaaacatccaactgagactggagatacataaaagcttggaacataatccactttcaagtgtttgctaatcaccgagtgagacaatgaaccaatatgttatcaaacaaatgtgataaacaaatacaaattctccaatcgattaggcagaaccgcagcattagctagtggataaatcaagagttcaagaatcgaacacacaacattcatgactcaaaaatgtattacaaccatcatcatcattaggcctcaatgcatctcttctctttgatctaaaacatatagacaatacaaggaacaagccgccatgagtgatctgagacaactttccttaaggtaagtaaactggtcatggcatttaatgcttttgagttccagagtctggttgatgtataagggaagatttttaagtttagataagggaagtttcactcaaatatcatcttttggtgtcgatcgatatttcatatttgatattttgtcccacatttttgttgataatgtcaatattgatattattttaggcatgaggtcttgatatcataattcaattttcgttttagtcaaaattgatgacttcttatttttcattttttaaataactaataggttctaggcctaggggatttggtattatgttgtgcttatatataggctaattagtttatattcttttcagatataatcctattagaagatagcatattcgatataagtttggttatgattcttaaagtatattctccttgtatatagaacgatcgtagatatcactagatatggggaactgtaatgcctttatattgaaatcactacagaatgatctcctcaacggagactttcattagctttcaaatccaacatacttattaagtagggctccttcatctttttcttttctcctcctccatcgtacgatatgtcttctccagcagcctccaccaccaacgagccacggcacgagaatattcatagagtttcgtcgtcatcgttattctcattagtaaaaggactcataacaggtttactccaaagtcaactcatgagacgagctataaacttaatcaaccgaaaccctagaccatacgatattgccgcggaccaatcttctttgttgttttcgtcattaccttatgatgtagttttgaactgcttagctcgtgtctccagacgctactacccaaacctctcttgtgtttccaaaagcttccaatcccttgtgcgttctcctgagcttgcacatatgcgatccttaataggcaaagatgatcccgtcgtttatgtttgcttttccgatactaagccttttttgggcaggagacttgattggtttactttgaatccaaacgagaagaaaacaagtgttcttaactcatttcaggttttttcttactatatgttgtattgtccctccgtctccataggttcaaagatctacttcgttggaggatgcatgtacaaatgtttgccgggcctattgatctttgattcctggtccggcgagttgtgtgtgggtcctagcatgaaggaggctcgcatgttaccgggcgtggcagtagtaaatgggaaactatacgtaatgggagggtgccgcgaagaccaaatccaagtggaggttttcgacccgaattcacaaac

SEQ ID NO: 8343 - DNA, 2326 bp, Arabidopsis thaliana landsberg
aatcaaaaggactaaatcttggggtttggtatccaaatgtcgcaaatttgctttagttgtttgactattttaccgtcgtggtggggacattgctggtttaatggtttttataaagttgttgaccaagtgttattagctcaattaatattcgatgcaaagtttagatgtcgttggttcgagtgacgtttgcaacgaaactaatattatatgttatgatttcaggtctggtaggattacgggctttgtcccaaaaccttcaaatattcaaaaaaaaataaaaaattgtttggtcggaaaaagatatatgtttttaaatttttatacagttaaaactaatttttttgtttgaaagagcaaaaatagaaccaaaagttagaagtagtagtgattaaaaagattaaaataaactttgtgacaaatagatggtgattaaaaggtttaaataatccatttattaccaccagacaacgctaatacatttgtaaattttgaataaagattatatatatatatatatatatttcaacacatgaagtaaacatttaacatcgttcagtgattttgtaatgcctgttaatggctattaagtcgtacgctcaaatctatccataattcaaagatgaatttttttaattatatatattttaaatgggatattttttccaactaaaatatttggcgtactaaacgtccgataaaaaatatatggattctttttagtatatttttcctgtttaaatttaccgatgtttactgattacattatgagcattaaaagttgttaagttgcaagtaggggcggacccacgtctagagggggttgggcacgtgtccgacattctttttcaggatgttattttattttgttttcatatctcgttatttctggtcgactttcatgacctatagagtttccataaggccttaaacaaacgtaactgtaataacattttaattatagatagtttcaatcatttaaacttacaaaattcaaattcttgacacaaagaaatacagactcatacaatataaaaaaacataaacataaattccttcctccaaaacatgtcacatttctatttctcccatccgatactaggaaatcaagagttattaattttcctgcaattctttctgatctcaccactcgaacctgtcaagggagagatattccccatcttgatcatcgattccgcgaattgctcgaagaactcttcttgatcctctgcatacttcttcacgagctcttttcgaattgttcgttgctagagaacaagacttggtcggaattcaacagtcccatgttctcaatcaagttcttaaagtagctgttatcaaatcttccagcactgttgatgtcaagctcggaaaggttctggtccccacccgatctagggcacctttggcgcaagatagcagcgtaggatttctctaaggttgtgtcgggacttccgcttccggattgattgtaaagtctctgtctgaaactagtgcatcttgagaatccaatggtgtggctccctgaaatttttttcggtcagaacgtatgacacgaccattttgtaaggtttaacgttagcttccaaagcaagtaaagtcaaaatcttccttgtgtgtgaagtaagcttaccggatagagcaacgagatcagtcagattgagaccttcattgctaaatctcaagaaaattgtgtcgaacaagttgtcgggttcaggaaggtctttgtttggtttagcccggcttgcagttgccgaatctcttcttcccaaaggaaccgtccagcttggcccacctgtctacacaaaaccaaacgaaattgaatcttgacaactcaaagaagtaaaagagagagcaagagaaagaaagcgacttacaagaacagaggagtctctagcagctagagttaaggcgtcagcacaagagacagtgttagggcattcattctctaatgctgccttgatctcgtcaacaacttcaaacccgcgagccgatctgctgttagggttagagttcttctcagtaactatactcccactggtgtctagaagcaacgatccatcacaaccctacacattttcatttaaatagataagattaatgatgattctcagcattagtaattagcttgttgagcaagttctaaaaatgactctctagtacctgaacgaaacaatcgtggaaatggagcctcatgagagaagcagccatacgagtctccctttcaaatgccttggctacaacggacctcacgagctcctccgctctaaggcacgagctcctgaacaaatatgggaagaggtcccttttgttgccgccaaagttactc

SEQ ID NO: 8344 - DNA, 608 bp, Arabidopsis thaliana landsberg
ctccaaacccaaaatcatataccagagacgtcgtcagagcaaacccatgcaaattttccttcgtagttgaggaaaaatttgcaaagtaaattatcagccgctgattttcttattgtgttgaacttttcgtacctcacatcgaagctcataaggactttttcaacttcagaactatcatcgactccaaaaggtatactcgcttcataatacacttgcccgttgatacatatacttagtattagtccctcggcggatagagggacatgtttaggggtattttgtgtcactctccatgattcttgaggtcccaaagtaaaaacaagaggatcttggtatctagagcatgagatgcacaagactttatacttaccctcgaccggatcatatcctaaagagctacattcaaatgcgacttttggtaaggtaacatgttgtctcatgattggattccaaactacaatatgccccaagaatctcccaaacatatcaagccatggaccgactgggaccattcgtgataatcaaatatgagagtgtctttcagataacgctccacatgtggataacatgatctgtccggattttcatgttggggcattgcgcagaaa

SEQ ID NO: 8345 - DNA, 606 bp, Arabidopsis thaliana landsberg
  unsure (1)..(606): unsure at all n locations
gaactctgctgacctgatcgaacttgcgagtgaaggtcgccattttcccctttttctttggagtttcgctcttctggtttggaaggaagcaagcattaaaggcctctggtaaggactgaaatctagacctcaacattcctagagttcggatctgcaaatgaaattaacttcttttcagacattctcttgccgggaaactcaagaagtgagagtatgcctcttgatcatgaacaaactaagtttgcaaggaaagtaagtatgaacctctccaagacgtcgaaaagctccatttaaacctcccaccagagttgaaactatagcataccatatttgagtgtccatgaaataaacctgcatatgaaagttagcatagataggggaaagaataaaaaggaagcatacggcaagaaagatgtgccgactcacaagaataacaggtgaccagagagcgatcaccacacccatattactcttggctgaaaaaaagaagcaaaaccaactagattattcagtaagaactcattatgcaatgagataatacctaaatgctattaagcattaccgtgagggaaaaactcatgccagcngtagactgatatatgaact

SEQ ID NO: 8346 - DNA, 794 bp, Arabidopsis thaliana landsberg
ccataacccttaaaaagatttattagcatgtcatttcctcatgaaataagctgttcctaaattcttttaatatttatggtaaagaaagtatgaacctctccgatgtgtcgaaaagctccatataaacctccaaccagagttgatactatagcataccatatttgagtgtccatgaaataaacctgcatatgaaagttagcgtagattggggagagtgtgagaaatgaccatatggaaatgaagaatctattctaactcacaaggataacaggtgaccagagtgtgatcacaacacctctattgttcttaactgaaaaaacaaaacaaaaggaaaaaccagattattgaataaaggcttcactatgtaataagaaaatatccacatgctattaaccattaccatgagggaaaaactcgggcaaccagtagcctggcataggaacactcataatttctttggttggacccataagaggcttaatctgctttgaagatggaagtatgagaacatatatatggactgacgaaaatgtcactaaaattcagccgtgacgttattagagaaacgcatgtctctaagttttaatgttaatgtttccttacatacagcaaaacaaaaagttgaagataagtgaaattgtgataccttcacataataactgaatgcaagctttgaggttaacatgacaatccagaacatcatgtacctaaaatcattcatagaaaccttattaggaaatttaggaagaccaaccatacatttaacaagcatatgcatgtccttacttgtagat

SEQ ID NO: 8347 - DNA, 1202 bp, Arabidopsis thaliana landsberg
agtatactgcgttcgaagtccattcaataataccgtgttagccacatcaaatcgggatccttaagatgatatcagagctaccaatctgctactacttttattccactgatttaccgagccctcaaccacatagccaaccaaaccatagtacacctagcactcactaaccgctctctaaccaactcacaacagctctaacctgctacattaagtactaggctagattaaagcagacctatagctaacagttgaacacttcaaagcttataatctttacatagcgaccttatggatcctaacacagcaagggaagaaattggtaaccatcagggataaatgaaaaagagaaagcgacgcaaaccttagcagtagggatattgtacttgtggcaaagattcttcataaagttcttggaaccctccaaagcagcagcttgagaagaagggccaaaggtgaggataccggccttaacaaggtcattagcgagaccagcaacaagaggcacttcagggccaacaaccactaaaccaacattccatttctgacagaaagagatgacagctaaactgtctgatatgtcaaggtcaggtacacaagtggcatctccggaactggatataccggcgtttccaggtgcgcataacacagaatcacaagaaggagaccgcttcaaggcgtggcaaagggcgtgttctctccctcctccaccaattacaagaacattcactctctcttctgcagaaatcgaaatcgatattactacataatcaatggcgttcaaattcgatatctttacaataacattcaaccaagtttgttaattcaataatgagcaaaagggtatttaccagagccgccgttaccgatagaaagagacggctgagattcttctgaaacgcatcggagcaaaaaaaggcgtctttggattcggttcgaagagaaacgagagttactaaggacgtgattggtggtagagaatttgagaggagcaacaaatggaagagaattggaggaggcgaatctgagggagagaagaaagggtttagttgggttgctgttgttggagaagagattgatagaagaagatgaaggatagcaattagatgcacacaacgacgacatggagggagactgtcaaagtagaggactctggactcggaccagcgtagacaagggtttaaagtggttcttcccttcctgtt

SEQ ID NO: 8348 - DNA, 919 bp, Arabidopsis thaliana landsberg
cttcggattaaaattcgcgtcgagcataatgttacttgttttaacatcacggtgaatgatctgattctcgcactcttgatgcaaataagccaaagcagaagcgactccaagaagtatttttctccggtgaggccagggtaatgtagtcggagactcgtagagtgctttatcaagtgatccattaggcattagatcataaattaacagaatttcgcctttttctctgcaatagccttgaagacggagaagattccggtgacggagggttccgattagagataattccgataagaattctgtgtttccttgagaaatgtggctgcatcttttgattgcgatgatttcgccggaatcttgtaagattcctttgtagacggtgccgaatgctccgtttccgatgactctcgatgagctgaaacagtcggtggctaatttcagctccttgtaagtgaactctctcggcgatttcattatttccgatgctaaagattcagactttcgagtgtatttgatctttttagagtaaacccagattatcactccggcgaataatgctaagaaaaatgctccggcggttactactccggcgacggcggctggtgattttttacagagtttgttacggcaagaggacgatggatcggcggtttttctccggacggtggatagggatggtgtgattgatgaagacggtgacgacggagaggagaattaggcatcggcggtggtgatttcgatgattcttcgaaagatgaactaaagctccaccaatcgacactgtgaatctcagtgcttccttgtgttgatccagagaatccaacaaacattgaatcgcttacgtaacgatcaagatcgagaggaaccgacaaaattggcgatttaggttttaagtttgagtaagagacgtaaattgttaaaa

SEQ ID NO: 8349 - DNA, 1901 bp, Arabidopsis thaliana landsberg
ctaaataatgtgagcaataaatccaaaaccttcagagtttgcgctttattttggctttataagacttaattttttaagtttaagttctagaagcaaaatataagggatttctttcataaatgataagttttctgattttctcaatcgagagaactcgaacgtcatgattcatgcagcttctagtgggatccggttacttaatttgattcagtataaccaaaatcaacctatcattaattcattatcagttactccgttgtgtgtgcatttgtttttttctctgaatgtcaagaatgtggtcctccatatgtagaaggcactagatagtctatagtttttatattattattaaacaaatcactaatcacaagtagtggtctaaaactacaatcaaatactagaaatcagaaggttgtgatccttaatcttagtgatagattttttacaatagttaatgctcttaatttatgcttattcacattatacacaagagtgctgacactcgttctaatatactaatgcctggactagaatatagcggaaggtaaaatgtatattaatgatttatgtgtattttctgctaattttcttgaagccaagaaaatttggagagtttatttcttttgagaaattgatcaaatcgatatatgtatatatagtaattatgtacaatgtacatcacaatatagattacatgtttacaaattcccacagacctaaactctggtccgaaatcttccctatgaaaaaataaacacaacttaaaacgctactaaaaaaatggcgatcaaagttggtgatcacacttccatcacatgatcttggacatagtccaccggagatctacattcttccgatggcctagactcagctatcttctccgctacttcggccataaccagcctcgtcaacaatagtccagccacaaacgcagctcccatcaacattgtgaaaaccgcggtccagctacccctcgacgatatgtaacccgttagtaagggtccgaccgccgctccaacggatcccgttccatcgataatagctgttaccgtagccaaagctctcgagtttcctttcaacgagctgtgtgttccaagatcagctgaaactgccgttgtaatcaaagcgtaaggaccgttaaccaacatcccggtcaagaacatgagagacgcgttggctaataacgatacatgtccgtagctacggtagaagaacaaagctggaattgagcagtacatgaaactcgcagccgtaatagctcttgcaccaattcggtctgaaatgtaaccagccatgattccaccaaccacacctcctacatcgaacattgtcgaaagatttcccgctgtttcgtccgataaatattcgccttcaatcgctgcaaaatatcattcaaaaattgtaatcagtaacgcaaccaagacaagtaatctagtggtttgtactcactcagtaataatatacaaaaaaattacctgtatggctaacgtaaaatgggagccagtagaggaaagtgtaagcgaccaacttagcaaagaagagacagagcgcgaaaggcgcaactccgggaatcctccacgcttcaatgaatccaacagctcgtttcttgtcatcggtttccgaatccgacgagctcaatagtaacggctcattaacagagtttccgattttctcagacgaagaatcaagaacctcgtctcgctatgctccaacattctctggactaacaggcaagaaagcgaaattcaccaaaccaatcaccacaatgataacaccaggaacaacaaaagaccatccccaaccatatctcaacataacagcagcgatcaacgagccagtaatgttcccaacagaagtatgagcattccaaatccccatgatcaaacctctcttattcgtgt

SEQ ID NO: 8350 - DNA, 2165 bp, Arabidopsis thaliana landsberg
aaattaccaggacagtagtgttaatagatttacttattacacttgttacataattattggattaaaatcaggttcggaaaacgaataatccattttcggatatgcccgatattccacggtagtggaggacaaaaacgtaatttcggtattaccacaattactgacacgtctccagtaaaaaggattcaccaccacgctaagatgaaaacgacaaaaaaaaaaccatttcctctaaaacggtaaaacaattaatatccgacgtggcatttacagtgcctagtcagcttttttacatttgaagtctcttcagcttcggacctctctctcttactcctttataagattaagccaacctctctttacccacacaatccacacacacacacataagaaaagaaattaacaaattatcacaaaaatacgttttcttgtataataatttttctctagatttgtcgcttaccttttgaaattctccggcgatgaatctcgccgggaaaaggaatattccggttattatttctgtttccgttactagtgactcttaccatcgccgtcatgtcttccgtgaacatcgtcggagctgaaaaatcattctcctagactttttttttttctttctctctttgttattattattctttgcttcgtttttgtgaagaagatgatccgctgatttcagaagttttcttcttctggtttttagctgagaggttttggtagattctgtttcttcttcttcctctgtggttttcgaatccagttttggaatttttgaagattttgtttagtttctgttgaagagatctgagatatttgaacgaagcagagtgtatatgaaatcaaatctgtgaaagttctttgaatttgaattgactttggacttgtgagagaagttagatcttcttcttcgtgagctatgccatttacgatgaagatccatccgattgatatcgattcttcaccaaccgtagctagagctgaatcaggaaacaaaccggtgctcaaatctcgtctcaaacgtttgtttgatcggccgtttacaaacgtattgagaaattcaacaactacaaccaccgagaaaccattcgttgtcaccggtggtgaagttcaatgcggcggaggcggcggagtagtgacggagttcgagccgagttctgtttgcttagcgaagatggtacagaacttcattgaagaaaacaacgagaaacaagctaaatgtggacgtaatcgttgtaattgctttaacggcaacaacgatggttcttccgatgatgaatcagatctattcggtggttcaatcgacggttgcgacgcttctgatcatctcaaggtaaccacaacaacaacaacaacaaattcttaatctctcttgatttaaacatgaaactgaatttgaatttgtcgatctgaaacagagtttgattccgtgcacaaccgtcggagagaggaatctgttagccgacgcggcgaagattgtagataagaacaaatcggtgaaacgaaaagacgatatgaagaagatcgtcaatgaaggactcttatcacttaattacaattcttcaatctgcaaatcaaaatgggataaatctccttcgttcccagctggtaaacaagatcttcatcttcttcaacacaacaactacttttttttattcatgaaatttgtgtgaactgatgaatttattaaatgttacaggtgaatacgagtacatagatgtgataatcggagaagaaaggttaataatcgatgtagatttccgatcagagttcgatatagcgagacaaacgagtggttacaaggtgttgcttcaatctctaccgttcattttcgtcggaaaatctgatcggttaagtcagatcgtgtttttgatatcggaggcggcgaaacagagtttgaagaagaaaggaatgccttttcctccgtggaggaaagctgagtatatgcgatctaaatggctttcttcttatacacgagcctgcgtcgttaagcagccggagagggagactgatgttgcgcagagggcccttgctgccgcggagaaggaggtggatagcgtatagatttagcatgctaccgtggagtaaatgattatctacgagagtgattgctaattttcactcctgttcaaacgacggcgatgatgacgtggcggaggagagag

SEQ ID NO: 8351 - DNA, 988 bp, Arabidopsis thaliana landsberg
gtattcatagtatatgactacaaaatttatttgaaagtttttattatgaacttatttttaaatagtgcgttaattcaagatttcagatgaaacaaatttttgtataataatttattgaaagtttttacataaaagtataaaacgtttatatgaataaataacattttttttatgtactcatgaataaataactatttatttaaaaaaatcaaaccaattgggctttgtaatgggccaataaaacttctcgggttactaaaatggaaacggaacctccggcaagacttacacagggacgatcggaaaccgaacatccattggagtgctgcctcacaaaaacccgaagaactcaagttaagagatccagccatggataagagctccctcgtctctgatttcctctcctttctcaatgcttctcccaccgcttttcatgccgtcggtatcgtcaatcatcacccatctcttttccttttgagaactattgattttctgctcaagtctcatcatcgttgttgatccagttctagtattgattgattgatctactatttattatgtgtagacgagtcaaagagacggcttttgaaggctgggtatgaacagatttcagagagagatgattggaaactcgaagccggcaaaaaatacttcttcaccagaaattactccactattgttgcttttgccattggtcacaagtaaccatcttttccttcttcttctgaaaccaatggttccatctattgctacaatgttagagctaatcttttggaaaactttgaacagatacgtagctggaaacgggttccatattattggagctcatactgatagtccgtgcctcaaattgaaacctgtatccaaggtgattttggattttgggatctttttgacattttctccagcgggtttacttaaattttttttgactagaaagtgaggattgtgttgacagataacttaaggtggatgcttggaggttggt

SEQ ID NO: 8352 - DNA, 2301 bp, Arabidopsis thaliana landsberg
agtataatcaattatccattatctttagtttcagcattttacaagggctccttgtatttcttatgttgggagccacaagttacaatacctttggtccaaaaaaaaattaaaggaaaaaagacacaaccaagaagcaaccctttggtgcttctttacaaattcatactttcttgagtaataatttcataagaaaataaacctatctctctatattatataaataagaggaaacactccactttgttaaaatgctttccttatttgttggtttttatatgcgtccgtcaaagttgcggttggaccaaaatagtatgtttaaggtcaccaatgtgcagcttatgctcacccattgggattctcctctttccatactcatccactacaccaagatgcttgcaagcatcaacatcaacttgaacggtctgttttgcccctgccatgacatgaaccttctcgaacgctatcaattgtttgttcacacccaatccttttattccgtttatcggcggctcagcaaatacaaacaccgtgtgtgttccatcgaattcacctgtgtttgatacttcgacgtgaaggggcattttcggaaatgaattgcagttggtgtgagacactttgatggagtgtgatgaagagttgagaatggcattggcagagttgagattggagagtgaaactgatagttgggccaatgggcttttggccaaactatgagtgaaggtagtgtaacttaaaccgaacccaaatggaaatactactggacctttgtagaatctgtatgtccttcctggataattaccggatgctctcatggccattaccgtcattggcactttggccacgtaatcttgtggataccatgtcattggtagttttcctcctatcataagatatataatgttgaatgttactaaaagctaaattaaataaatttaatttttactttgatctaaatgaaaaccaacaacgtaccgggattagcagcaccaaagatgatattggcgatggcagctccacccgcttgacccggatacccagcccaaatgatggcagcaacacgaggatcattcttagcgaaggttacatcgattggtccaccactcataaggaccaaaatgactggacctctagaagcttgagctacacgggtcactaggtcttgttgataacccggtaagagaagcccggttcgatctcgtgtctctgcctctatcgactgatctaatcccatcacaagaaccgtcgcgtcggcttcacgcgccgctgcctccgctgcaccaaatccttggttccctttgcaagccacgccggcacagccagcttggtgaagtgtcctcgcgtatcttgaaatcccttgcaacggcgacgtataggcgcatgctttccctgcatagttgccgatcatagtctcagtgacgtcggagtttggaccaatcacggcgacggtgcggtggcgtctgggggagagtggaagagagcgagcagagtttttgagaagaacaatcccttgatgggctgcttcaagagctaaatgtttatgggccggagtacaaacatctcttggcccaagattagcgtacggcccaaggttaccatcaaacataccaagtctcatttggactgttaatgtattagcaagtgctaaattgatgtcattctccgttaacaatcctttcttcactgcaccttccgtgaaaatcgccaaaaacggcccgcagtccaagtccaaacctgaaaaacgacacgatgtttttcgtatcaaaattgatgcaacggtccatatgcattagatttaacatcaacggtggaggaaaacaactcaccggctttaatggatgcggcggcggcttcttccggagtgctagtgtaatgttgttggttgaagaaaacatcaacagagtcacaatctgagacaatgtacctacatacgtatgcattgatgatattattagtctttatgtaaaatcgatatgaaccattgattatgttgatttttaataacttacccattgagacgccattgaccacgaatagtgttctttaagagattttcatcagcacatgtgggctttccattgacttggttgtacgaacacattacactcgctacttttccttcgtaaacacatgatttgaatggcacgttgtatgtgtcctctaaatcttgttgggtgacctaaacccatcagaacttttataaataacccattcttaggaaaatttcgaatgattcaccactttagtaaatgatataattagcttgaagatcctaaacttgtattagttttaaatggttagttc

SEQ ID NO: 8353 - DNA, 858 bp, Arabidopsis thaliana landsberg
aggatgcgctatccatccatcaaaagatacacagactaaaacctaaacataagtctttgaagtacaaaaataacctgcgaaaataagtcagccaagcaggtcaagagattctcctcagcatcagctttattatttgcataatgttcaagcaattgttcacgaaagcggagcacaaaaataaagagcctgcaaaagagaaaggttcatcaaacaaattagtctatggatgaaacttgttcaactcctggagacttgtgcacaaacatagaatgcaaaacagacctaagatcaacaacccagtcctgccataagctaccacatctataaaaccttttaagaactgatacacactctacatttacttaaaaatgaaaccttttgtcaataaatctaattccaaaagcaaaacgacatggaaactgaaatgaggactcgacctgcaaaacactgttacagtaacaagtgttgccgaaattttcgaaaccgaagtatcgttctccttccgggaactggtcgccgagagctttctcgagtttggaccccgccgcgcccatcagccctagcctccgtaacaccgttaatttcgttccgattcacacagaagattctcagatttcgaaagtgttgaaattggcgaagaagaagaagaagaagatcgatactgaaatttctgttcctcgcgaataataataaattaatggaacttgtgtttgactattttaaaaggaaagattaacattagtatatgataattaaataaattatcctctatttttctgtatttagcgatttttttacatcaaaactatgaattaaactcattttatttttgaaattaaataagtttggcctttgtat

SEQ ID NO: 8354 - DNA, 1424 bp, Arabidopsis thaliana landsberg
  unsure (1)..(1424): unsure at all n locations
aaggaattacgaacgagcacaagacaaaggatgtctaaagagagactaaaaaagtataaagaaaaagaagaggtgtggacttacatgttcatcaggaacctgagcaatctccaaaagctgagattcacaacagaggaagtaaatttagaggtcaataagactgcttacattcttcaatatcataagaaaaacgaaaaagtgagaaaatcaggagttgcaaagagacaataatatatatctccacatatttaattaggacacgtataataagaagagacattgcagaatgcacagacaatctttaacatgtaataacaccaagtttacctgtacttttccttcgtaagaaatgagagttcctccctttacatcagctagtgttttgggtgtaacctccatacagtactcatttttgttctggatcaggtgcttcaagatttctgaaacagcatggagtgaagggcagaaaaaaattagtctctgattgaatgttattatcctgattgcaactaaagcaaaagtaataaaagagaaaagataactaagaaggatatatacttaagtcaacgattgcgcccaagttgtctgagttggcgatgaacacatactccttaccctgaatagtgtgagaaactcagaatcagaattaaaatggcaaacgttgaaagacacaaacatgaacgatacattctggagacaagaaaacattaataggttacatcaaagaaagaacctgtgataagaacgcatcaagcttgccactgttcatgagagatgggaatacatcaccgtgaccgggaggataccttcacaaattcatcttttataagtggtgcaatctgatagataacacagaaggatgtacaaatgcaaatggaatctcaatgtaaatgcactttgactggaaaccataccatccatccttgtcagtctttcctttgcttggccacggcacaaactcatcagcaacaacacgaggatacttgctctacataaaagtcaatatgattagttccatacttgctctactctggatcgtccaaataaatgagcttttaatttcttaacttgttatggcattgccatgaaatacctgattaaaagtgtgaatatcaacatttgacttggtgtatttttccacaatctgaacaaagacaaaaatcagtaagcctaaaagtataagatacatgtagtacaaaaaagatgtgatcctcagtgaaatagacgtaccttttgtgtgtcatcatgtgtattgaatgagttcataagaaccaaaggaaccttgcagttatacttgttgttgagattctgttggaaagtgctatgtgaggttatgtgaaggcatttagattataacaaaataaatgaaaaacgaagaaacctcatctggataacaatcangtcaagaaatgtcaaccatcacg

SEQ ID NO: 8355 - DNA, 967 bp, Arabidopsis thaliana landsberg
tggctatagaataatcaacacatagtttctatttggtagttaaatctcatcacctttctcattaaattttcacagtatttatgaaaaaacaccacatgatttgagtttatctagtccaacaaaaataaggaaaatataatcataaaagcaatgatattctaatcaaattaaaaatataaaaccaaaacccacaaaacttctaaacaaccatatcgctctagcccatcaacattgaggatcaaacacatacctaataccaaagactatatctaagagaaaatgtacctgatgaccgagtacaagattgtacctttaactaaaattctaatgtttaggaaatggaacattaaaacaccttttcccgtataattcacgaactgcctccaatacaagtgttgaatacttatagattttcttgtccaacaaacaaaatagagactttcaatataaagttgaacccaacaaacaaaagaaaaaaacaatagatattgttggttcataatagctaaaataaacaaacgaaagtcattaggcaagaccattttggctttcatctagctgaaagatatataatgaacatgaagcaattaatgttttcgactcctgtcacatgaagtttcattttgggagttataattcaagattgcaattttatattttgtttggatttacattcaagcctatattacatactaatattgtttgctcgttaaacacgagaaatatatgaccaaaaaaaaaacacgagaaatattttatgccaacgagttattcaaagtaagattttaatatacgttgcacattagacactgatgttccaaattttttagaacaatcagtaaataacactgtactaagtggattcatgaatcatcaatcatatacctaaaatccctttactaaataaatctaaacaaaattaaaaaaaactggttggcagttggcacactaaaaaaagaacgtaata

SEQ ID NO: 8356 - DNA, 1100 bp, Arabidopsis thaliana landsberg
acagaaatattatcatccactttccactacatggatcaatagagtgcttggatataacctacctgtccgagttctgaatcctgaaccacagggccgttgcagcaaaactctttcttgaggtccttaagtatcttggtatagctgtactctttcttcaggccctggacggttgtcaagcttttcctaccatttcgctgctggacacggatatgaacgtattcttttgttccggcacctgagtcctcaacattcgcatcagcaaacggatctgaaacaagcaacagcaaattgagagagataaacagattcccatgtgagataaacagcataatcaaacaaaaaatgatgctttgattaacatgtatttacaaatgataacatgttcaagtatctaaaacaagtagaagaagatcagtgactaatacaatctcaagttttggtagagtagaaacataccaaaggcagtgggaacctgggagtcaagttcagacatgaaacttagttgatttgcgggtagtactaaccgggaagctgagatctgcacaagaaggataacctcacgttagaattcagaagattcaaaaccgcagaatatgatagaacatgaaaacatccaatcaaaatcgattcaaacatgaagattgttaacaacatgttacataactggtcgtctcaccaaaaaacgttaacctcattagtttgatatcgaacaatgagatatagaacaaaagattttgcaaggtgcacgagatggttcatcgagtaagaaaattaaactacaaaaacccatctcagaaatcatcaagaacacaaacacaaatatgtttcaatttagttaaaaagatgttgtctgaataatctagatccaaacaattcaagtaaagctgatccagttcaattacattcctataaggttaaaactatagcattaaaaaatcaattgaccaaatcaaaatcatcgttgttgaattcattccaacaacaaaaaaaaaactaatgaccaagatccggaatcagatacagaacacgaagatctgacacataatttgcaattcaatctctctgaatcgaatcgaaaagaaaaattgatgtaatcaact

SEQ ID NO: 8357 - DNA, 978 bp, Arabidopsis thaliana landsberg
tcaagttccaatctaagcttgttgtttaagcgaacctgtgcagagaactcgaaagagcttgttgttttgtgcagcagtcttaagtatttccagaacaactctagagagtccatgaaccaatatggtacaaccatcgaatataaaatcttgactaagcattgcgataatcctacgagcctgcgcaataaccaaacctttataaaccctcttctatcaaatactaattgatctacttcattgatatatgtacaaaaactactaaatatgagccagaagccataaaaggaagtaccttgcaagatatttccccaaatttctcagcacgttcaagaagacgagacttagctgaattgaaatcctcatattccaaagcagacgttctcgtaacgtatctgataaacaaattgcatccagctgtcaaagagatcgacgttttgtcccacgactgccaaaatttgaacatttcttaaatcaacaaagcccacaaaatcgaagaatgaacagaaagtgaaaaatgaattctcaccttgagtatatcagaagcctttttgagctcaatttcaagctccatcatggtgctcgcttcgctcgcacgaataacagcagccaaagctcgtatagccgcgacggcttcagccagatccggttgttttctccagttattgaactcttcaattacattaaacgacttctcgttcccgagatcagttacggatgagtcatgctgggcatcgcctgagacgccgccaacggcggcttgagcttgggctagccagtcgcttgtaatgacaccgtgatgcgccgcgcgagtttggtaataagcggagatggaatcagggttttgaaaaggacctcgtgttgtatccgccattggaggtgaattcgagcttcgtcgctcgtcgagaataaacgacggtgatcttctccgacattgattttttttttcttgagaaaattcttcaaaatggaaaaattgaa

SEQ ID NO: 8358 - DNA, 1598 bp, Arabidopsis thaliana landsberg
aaaatcaccatcttgattttatcacttttctcatgctttcattttcaattctccaaatcatattatattccatgttacataagatatacttcattctaggtcatctatcactacactgcaatagttgcaactgttcaatatccagcgcataagataccatttcattttttttgtgaaaacattttaaaatgttaaaaggatatttttgcaagaaaccacaaataattctaacaataataaaaatgataaaaacttatatcaatcttatgatgatctcgctactaccaaaaacatgtgcattagcagtaagaatcagagacaaactatggctgtgtatagccaaaaaatggtgtttttatttttatttttatacaaaaaaaagagagatttcagaccagctatatgaataagacagcttcagttacaagtaaagctgaatcagctcgtcacttactacagatggagtgagaacaccaagatcagtgaagaggagagtcaagtactgaggaggagtgtagtcccttgcagatctttctacctcaaccttatgaggaacaggaatactgaaatcaataggtcgcaaggctggttctaagtccttttgatccaacgggtagagccgtgcaaacttcgcttgcaagaaaacaagaaagaggatgatggatcattgatgtttctgcaatcaagtttacaacttttaaagttttgagaggttaccttgtaactctctgcagctacatagactggtttattcatactctgtgcgacgagggcgatttgataagttcccatcatgttaattatcccgccactttcaactactccgtcagctccaacaaacaccatgtctacttcatccatgctataggccacggctgaatcgatcagaagcttcacaggaatatcaagttttgcaagctcattagctagcagtacacctgttttatctggccttccctctgtattttgtttccatgggtgcaacggaaatgtgattgtcagttaggaaaatcataatgagataactggaagatgtcagatccaattgatctctgtcttacgaaaagtacctgtgcacaacactcgaaagagtttcttgttttgcgctgatgtctttagtatttcaaacacaactctggagaaaccatggaccaggatagtacacccatcaaatatgaaatcttgactaagcattgcaattatcgttcgggcctgcaaaatttccagttactgttcaaactcttcttctactaactatttatgtaaacaatttccgttcgaagagaacacaaaccttgcaagatatttccccaaatttctcagcacgttcaagcacacgggatttcgcagagttgaagtcctcaaattctaaagcagatgttcgagtcacatagcgcatgaatagatcacatcccgctgttaaggatatagacgttgtgtcccatgactgaaacatgaagacaatcttacatttttagagttctacctcgaaaaccacttaaagctactcaaataataccatctgacactcaggaataacgaaatccatcagctaccaatttccatagagacataatatttcaaagaagtatagcatc

SEQ ID NO: 8359 - DNA, 2142 bp, Arabidopsis thaliana landsberg
agagaacatgcattgcattcccaatctttctgttctctgggtcgtgtgcataagcttcaggcgacgagtatacaaagtagccaccaggtctgagcaacctatcaagttccagtaacaagatcccatctctttgaagccaatctatccgacatctagagcagtgagcaagttcaaatgatctgcttgggtatggaagccgctttgtcccaagaacaccaagtgttgatggaatccctcgttctagagcaaactggatctggttctggtggacatcattaggggcaagagacatggctatgatgtcatgtgaaagaagataggctccgaagctagctaccccacaaccaacgtcaagaacattccgaatgcttcccccattgttgagtttgtcaccagggaatttcagcatctaaagcaataagcagttttttttgtcatctgaaagaagaacttgaaaataaaaaacagagccaaaacaactatgctcggtataggagcaacagaatatcccacataatttttggtataaatggacaacgctatacatcttctagtcaaatagtgtcaatcaataatgttgcatactgctatacccttataccattgacgttcactggctaaagcaacattggtaacaaaaataaagcgaaagatgcacagttgttctaaagattcgagctctacccttgatactcaaaaaaggatagaggaaccaaatgatgataatggtacgaacctgagccagggaaacaatgtatttgtcagctccgttgtggaaatgtgttcctccaccaggaaaattgatcttatcaccattaacaaccatccaattctgatcagacttctcttgttcaaggtgtgtgtgcgggatattcgccttccacacctcgtctctactcacaggccaccttaacgggatctgaaaaactccataaaacaaaatcatcattaaccacaacactagagccataacatatgcaacacagacagagttctgaccttataaccaacaggaggcggaacaaggcaattgaaacgccgttctgatggaggacaatgatgctcatagtgctccattaacgataaattgagtttcaatttcaactggtaatgaaggttccgatccaaacacggtatcaactccgagtgtctcgaatcacatatctgcacaggatcaaaatgagtacaaccactacatgagaaacctaaattcaacgagctaatctacacaaatcttaagttgaacactaaaaatctagacatctctactcaattcgaaacaaatgattcgattcacgaaccggaacacttttaggaacttcgaaacggctcactgcaagcacaatatctcgattcctcaaggatccgattccggtgcgaacgcggttattagatccatcgaactcatcggactttctggatccgggagcgaacgaagagccgtagtagaggcaagtcaagccgagtagagcgatgaaaccgacgagaacgtaggtgaagagcttcggagtcgcacggactcgctcagttctgaagtgtttcattctcagcgtctccggatccggatctagatctgacccgatactgaggacccggaaatctagctgccggtgaagagtggatagtgtgagagctacagtagattccctcgaggtcgaagacgacgaaatagaccagtgtcggattttacgtgcaagggaatatttggttagctgtgatcctctgtggcaaggactagggttgtttctatgctccttaactaaaacacgcggttaaaactaaatgggcctgtaggtagcatacatgtgcttttaaagaataatattgggctttatatagtttcttattgggctttatacttgtgttttcgatttttagtttttgtatcttatagttgtaacttttatatatttttatgaaacggtcaaacactcgaacacattcaattgtagaagataataaatcatcaatagatttctttgatttcaattcagttttaatgttcctatactattatggaaagtatacgaataagttgaccaaacaaaatggagagtacttattaattactaggttcagtgaatcttcttcaggtaccctttgttcccatttttttggtgtaaatgttaaaaaaataaaaaa

SEQ ID NO: 8360 - DNA, 520 bp, Arabidopsis thaliana landsberg
ctcctccttctttttcttccacttctaacagtgacaatcttgtcgggagtcgagcaggcctttgcttccgacaaggcactcctcgtgaccggccgcaacatcacggctgacggtggaaggtcgtcactgagagggaagaagcagaggagagcatcaggatgtaacttgttccaaggccgatgggtgttcgatgcttcttaccctttctatgactcgtccaagtgtcctttcatcgacggcgagtttgactgtctcaagttcggccgaccagacaaacagttcctcaagtactcttggcaacctgaatcttgcaccatcccaaggtgttttcaactttttttttttttcaacttaatttacttaaaacttcactctttatataattcaaaatgttttgtttaactaaaacaatcactttagttaacaagaattttggttggagaatatttcgaagatctcatgatctttgcatgagttagcacaattattactattttaaaatatattttttcatatatat

SEQ ID NO: 8361 - DNA, 1998 bp, Arabidopsis thaliana landsberg
aaaacgaatgtacgaacaatattgttataccacttgcaggatttgtggtgggtaatttattttcttctattctagggcactctagcagggcatagaataaggcataattgagagcatgttgcgagaaagagaagttttagccgaatttacagagacattgacgttttgttttatcttctatagttggaaatgggcttagaatattaatatatccaactagtaagattgatcgtgttatatagttactatttcttaaaattgctgtcctattcagtcttcattaaaatattcaatatgtgactaacatcctcttaagagcttcctattaagcgttgtgtatgtgtgtaatgccacaaggcagaagaaaacatataaagatgtgtacgagtcaattagtttttgtttgcataattttggtgttactgaacggatgttgatttagactcattttatgctcctgagtagtctttcttcagtttccagtggcatatagaaaactcacttgtccattgataaattggttaataatatgtgacatccattctctctcttttcatgagtttcattttcctggtttagatgacggatcatcaacttatctttgctggacgagtggggaaagagcgtttacaattcttaggctgcacgaagagttgcctgaagaagccgttgatgtggtacagtggactagaagatacagcaactggggcaccacagcttaccatcttgaccaaattgttcgggttcacaagagaatagtgatgaagtgcaatggatcacagattgacgcactctttcaagacatcaccattgctgttacttcagatcaacttctcaccaaatcagaggataagtttctcaagtggttgatcctaaatgccattagcggccccatatgggtatatgccccaacctcttttatcatctcttaagtttattggacttttattattccagaacattaaacggtcctacctgaagaattaaccgagagaacttactgatggttctctcaggtctcagattgtcttactgtgtgagaatagatagaaaacagaggatatgttgctacgtgttattaattttagtaggctatttagcgggtggacaggactggaatcgagtagactaatcattttaatgagaggataagactattacaacagttgtctcgcgcatcaaaataaggcggcatgcttttctaaacccaatgactatgtcttgtcagtttaatatttcattagttgcacaactgggtgttttaataccaagttagtagtactcggtttccacttgtgatcttggaattgatcttcattgttttggtttaagcaggaagttgccgcgagctcaatgaacatgaaaatgattgagcatttggagagggaacagtgtgtggagatggagacatcaagatataatctgcagagtgtttggggtaatgaagtatgccaagtggatccgttggtccgagcttggagcttactccaaggtttgctaaatagctgatcatgtagtactcaaaaacattcatccaccagtcggcgattcttcatgtccatacatcaggagagaacgacaatttgtcgaccctaagaaggatgcgctgagatgatacaagtactgatcttacttatattaatttcatgagtgtagacaactacaaaatcattcacaattttgagcttttaggcattctttagtatatcccaaaacaaaacttcatatgtacggatccacacaaacgatttaaagtaatataagatggtaatgtgttaaaatctgttaattagttaatttttaacataaaactcatgattacttaacatgtttcaaacttcaggagtttggttattgacccaaagagggtgacaatgaaacctaataaacacgactcattctagttattgtatttggttttgaactagaaggctatgaaacttaacatgtatctagatcaatttgtgactgagtatgatagtttgcatgattctcaaa

SEQ ID NO: 8362 - DNA, 794 bp, Arabidopsis thaliana landsberg
cagtataatagttaccacgccacttcaactgcaacaaacaaaagaaattagatgcttttcagaagattcttaaacctcatcaactcgaagtagatccacaagaaaccccttattttgatccaaggatcagtattagtaaaaacaagattttgagacctaaacgtatgagtttcaaggagaagcaatcgcatctgaaaaaggcagaggatgctgatatgaatacaaatttgatagagttatctgaacgtgtcacaagagaagaagagccaatccctgattttgtagagtggtgggatgcaaagatcctcaccgatgacaccattaatgagttgtcgtgtgatccaaacatcctcatcatggacaccattactgagaaccatctgaatatgaaagtttttaattgtcatattgagcatccatttcccatagagccaccttcagaggctgcgtctccacctccccaacctcttaaaatgacaaaggaggaacggaagaaactgcgaactctaaggcgtgtggcaaaagaaatggagaaacgggagatgattagtcaaggaagggttgaaccacaaaaatcaaaggtgaaaatgagcaacctaatgaaggttcgtgcgtctgaagcaacgcaaaacccaaccaagcttgaaaaagagatccgcacagaagctgctgagcgtgaacaagctcacatggataggaacgtagcgaggaagctaacacctacagagaaacgtgagaagaaagaaaggaagctttttggtgatccaacgacagttgttagacgattgtggggt

SEQ ID NO: 8363 - DNA, 961 bp, Arabidopsis thaliana landsberg
ggatctttgctgctcttattggttgtgaggcaacatcttcctctactggctctgtgatgctctctttattggtagcagtttcatcaacagtggaatacggtttggatgttttctcaacaacaggttttgaaacctcagctgtatagcttagagaagctggtgtttcagagctattcccatcaacacttttaactacaaaagactgaaccaatttatagccaataagccactagtggagacactatcaatcccaaaaaatttagaagagagctcaacatatgataattagcacatagagacaatcaaaaaggtgaacaaaaaggcattttttgttattgaagacatggtacattcccaaccaactcaaccagagaaaacagagaagcaattcaagtctcaaggagaaccatttctagaaaacaaaagcaaatattcgattacgactaaatcaatcaagctcaaacgtttttgagagtaatcaggaaaagtagaacaaatagagtattgggcatggacgtaatctaatcgagatgagtaaattccaagtctttttcatgcgatatcgagatatttacctggggacgaatcatagggcatggaaacgatcggctttggaagtgaaattggcgattggtggatgagaaacaagcaagctgagagatttgtgaagccatcgtcgagatctgataccgaaaaattggaagtgaaaagtcaaaagggaaagaaatggagaatcggagcgtggtcagcacgagagatggagtggttgatctagccggcgttcaggactgactgactaaaaagacgatactgatcggacaatcttgaccgtccgctcgtttgattttgaagttgttcggtcaaaatgttgcgaagaaattacgcgcatatgacaatttcggtttagtgtggtttaatctttgactttagggatcggagatgagaaaaaacgaatccattt

SEQ ID NO: 8364 - DNA, 1402 bp, Arabidopsis thaliana landsberg
tttagaaaaatagattttgcttcataattggaagataactggccgtactttaattatacatgatccggaacaaaattcttatgattttagcttttaaatttcagcataaaggggtttctaactttctatcgcttatttcccaagtttactcactgtataactgatagacgcattatttcttattattgtttcaggattgagctagcaataacttttctatattacttatgttttagtcttctttctttatctctttttatttatttattactatgatattcgaatatagacaatcaaagcatatctcacaaataagaaaatcaaaactttagattatgacactggaaagaacaggtcacaaacaaaaccaagtgtatcaattcgtaaagagtataaaattacaccagtaatccaacagaccagagttatcaaaagagagaagatctccacttttttaaatctaaacctatgtaaagtcccttcagtatgaaggactagtcgcagatggtttcaatttctttggaggtgggtttcctccagagagcaccacatatgaatagaaacacaacatgcaagcactgcaatgaaaaagacgtattcacacggttacatgaatccacgaaagatcatcagaatctgttgtagatcacaagacgtatttcttacctgatgacagcaaaaaccccggccggaaacagcttcttagtctgcataagtacaacattaagcagtcgaagtcaagcaagcaaaaagaaacaatcagcatgatcacaaagataatgaataccatcgaataagctgtgaagttcttccagaagacgacagctgaaagcactgcaatttcaggtttagaaaaatgagtaagcacaaatgctttcatagataaaatgaacatttcttatagagaatcataggcacataatgttcagagatgaccacttcatagcatgacacagtatacttatctcgattttaatatccacttatcatgagtaagataccagtaatcacttgatgtaatgaattagagatgaaaaaaagtcgtggtaacaaaatatcccctactgttcctgcagacaataaatgaagattacctgcttgtcctagtatataagggaaactagattttccctctcgccaaatctttaagctcagtgtactaagggctagaaggccaccaccatagaggacaccagtacttaaacttgtaagatttcgtgaaaacgcaaaaccaagaagccctccactcacaacgagaccacctgaaaaagtatcatttattaacaccagcgtgttactgacaataagcaactctttgctagaaatgctaagatttgaaagaaagtttgagagtcacaaagtagtaccataaggaatgccgaaacagaagtcgtggatcttt

SEQ ID NO: 8365 - DNA, 2012 bp, Arabidopsis thaliana landsberg
  unsure (1)..(2012): unsure at all n locations
aaaaaaaaagctaaagaatgaagaattcttcaatacatcgttgcaatccacttcaagaataatccaagatcttccattacatgaaaataaagacataaagaaaaaaaaactatacttcatcaaatgattgtcattacaaaacaaattgaacacgattaattctcaaaccctttcatataaatatagattagatctgttcattttactttagaaaatcttggcaacgtctttcataagaccacgattggcacttgcgaaatcaatgaattcttggtacgagatgtatccatcgccatcggtatcaatctctgccatcatacgcttaatgtcctcgtgtgtgaccgagccaaggttcttgagagcatctccaagctcggccgctgagatttttccatctccattagcatcaaatttcttgaaaatacggtcatgctcagctttttctgttgcgtcagccattgtttgtactttgtagttttgttctttttgtcggagagatcagatgatcataagtgttatataaagagatttgaatgtgaagaagttgaggctatgctttaaattaggcgatttaatgagaaaaccgaattaccaaaattagaatttgacttggtctttcattaactgcaatacaaacttgtttttttggtggttgttgttacaacaagaacaaaatagtgaaagaagttgatcaatatttgacgatataagttaacatttttttacctttctatcattttcagctcaaacccatattttattttattatgcataactgaaatcaacttggattctaaaactgattgtgataatcaattggaaaaacattgttaacttttctgcttaaaagaagtttattcataacaatatagtaatgcataagtcgatcaataaattttcttcaaatatgatatgattttactctgtccctaaagtatcaactttctattacactgttagattcagagctacttatccctccagactccagagtgtgatgtaaaatacaaatccataaatcaaaattatactttcaagcaaaatccacttgaaatcaagattgtgtattagaccttttcctttgtttcaaacaacaatgtaaagaatctaaacaaatactctatcgtttgacttggccaaaaaggttggattgagagaaatacatggggggataatcaacggctgaatccaacagttttttttctggctttatgtcgatcttcaaagatgaagttgaactcataactttgaagcaaacataagtcttttgagagtgtaaatagacttattaccttcaaggagctctatcaaaaggcttagtgtcattgtaacaagtatcccacactgcttccatcgcgtctttagcagctacttccgagcaatacgggttgccacgaagtgatttcaacactcttctttttatacattcctttttgaaaaaccgagaatcaggttattattaacaagaatcatccatgattctacaaaatgaactagctaacacaactcttatccttaaagagacttacttgttcatgccctcttaatttaatgaaaccgcgcaaaagttctctcttgaaatggcaatcaccgcttagatgacctgcacgaatctgttaaagaaaacacacacaccaaaacctatcaagtactttgacaagagtatatcaaaggtttgatctaatattgtaatcacctcgctgcaagcatgatgagcacaattagtccaatccaaattcttggctcggcactcgtcataagcatgaatcaactcatgtataactacttggttcacttcatcttgaatggtcagatagttactgcagacagttatcttgaaacatagaaaacaaaaggaaacaaagcaagatttcagcatcaagggacaatcatcaaagagctcgaaaaaaggaaacatggaaatggntttacccctctttctttagtgtaacctncagctacaggtccagtacaaacaacagccttaacgaaattatcaccaactctacacc

SEQ ID NO: 8366 - DNA, 1380 bp, Arabidopsis thaliana landsberg
  unsure (1)..(1380): unsure at all n locations
aaagaatactgttcatatttttcttgtcttatcaaatttattttgtatagtttacagattttagctacagtttaatgaatacatcaaagtattataatgcctccactactttgtaaattcagtttcttattttcttaaaacatctaagtgtatttaattaatgtagttttaaaatatataaaataataaaatatttagatatttatacacaaaagatagaggtaaatagtggaaattttcttggtctagttaatggccagccaatcttaatgaaagtttgagatggtaagaaataaatatttttaaaaaatgatttgtaagtattataaacagagacagaaccatagattaagatttaaattcgataatggaataaatccattagctacttgaatctaaattttgttcaagaccaagtcacatcctaattttgctaagtttaggttttaacttggaccaatttcgttcaattgttgtttaaacattcctccaaaagttcctaagtaaaagcataacctcaactgttctttccactcaaagatttatataatttgatctttgcttattcctccaccaataaaaagaaagattttttttcatcttataaaaacgcgcacacaaccacatattcaccaagacattatggctgatgcaacggagaaagccgagcacgaccgtattttcaagaaatttgatgctaatggcgacggaaaaatttcagcagccgaactcgaagaagctcttaagacacttggctcggtaacagctgatgacgtcaagcgtatgatggctgaaattgatactgatggtgatggaaacatatcgtatcaagaattcactgattttgcaggtgccaatcgtggacttatgaaggatgttgccaaaattttctaaatttttttgccatacttttacttttgaaatgtttgaatttttttatatatattgagagatttggttctaagcatcgccaattcttatttttgttgtttttacacttggtgagttttaatttatatgattgtatcctaattccatgtaatgtgatgtgagtggatcattcttgaaaagggggctagtttgttttgttttggtttgttgaacaccacaacaacgaatgttttgtttaaaaaagatataaaaatggctttaacagtgaagagaaccaaaacattcataatttgttntgttccttaaagttcattatttggtttaggcttctcgcatatacattttaaatcattgatataaaataaagtaactacatttttagaattacttaaaaagtaaatgtattgcggatgcattctctttaacgtaaacctttcttcctatcctttcggtcttacctaagactttctcctaaatccatgttaggac

SEQ ID NO: 8367 - DNA, 1722 bp, Arabidopsis thaliana landsberg
tcaataaatgatcgtttggtaatagtattttttagttaagacttacaacgacttaaaacttcatagtataggtttgtaaacttccttaagtcgttctcgccaacaacatcaaccgttttttttgttcagtcataattttgttttaaagcttctttcgtgtcatgtaccattaaataacatcaattaatacacatagagagtacgtatatgcttttagctagtcaacaatctctcattcttttgtttacatagtcatattaaaaaattccaatagcatcatgacgcgaagattaaagaaccaccactatggacctatggtaaaaaccttaaataaaaatggtcatgaattagaaatataatatcgaaacgcacaaataggcaatatatgctctcaacgttccttcatcgttgaaccagcattaaatatatataataaacccatggtttttgagccaaccaaaatgtaaagtatctaaagatcacaaaggcaaacacatacaaatattgtagttaaatactactacacaaaaacaaaaagacaaacattctaatttacagtacaatgtttatttatttcaataatttcgtggagtagtaatactgaaaatctgaaagtcccttaatgtcgtctctttctaccttcccaagctctatatttccattaagaacaaacaaagctttgatacttatttatttttccaaccagagcaaaagctttgtaatagactacctcaaattgcttgcttatattcatctatatatttatttatatagaccattatatatagaaatggctcactgagtcagtaaggtggtcttgcgtggacccatgtatatggttcgtgccctagctgaccagccccatttggaatcagatgcggcggcatattgtagcctggcccggccatccctgatagatcaggcaggttactaccgattctgggcggtgagtcaccgcctccgtgaatctgtcttgagccgccaccgtcttcctcttcttccatgggcaatctctcataagtagcgttagagaaagtagcagcaatcaccatgaccgaccctatggctaagagtgggcctacaacgctacctccaacgacctgaccctggaccccggctaagtaaaccgttaaaccggttgacccgggtggggaaggtccagggaggaaagcaccggttaaagataagatttcaaacctgccttggagagagaccacacctcctggtgcggcggcttggcggagggtgacgttagcgactgagcctgtcccgctgagaacgcaaacgccgcgttgcctgcgtcttgagaagtgagcgattgtgtcggcgacgtcactgccgtcggagatctccaagacatggctacggagtgcgttggggctgtctcttgtcacaaagattggagctttgggtttgtttttggatcctggtggtctacctcttggtctacggttgaccacctcaacggctccttctctaggatcatcttcttcgtcttggtcgttgtcttggctctgattcatggctattccaagatctcctttggtaagaagactttggtggtgatggttttggtgatggcctgaggagaccgaatggtccaccatgcccgctaaaccactctggttcgtccaccaagggtttgccatgattgaccaaaaactggaaattcgctaaaaagaaagatcaagaaattgttaccctgatgatttgccttgaaag

SEQ ID NO: 8368 - DNA, 1330 bp, Arabidopsis thaliana landsberg
ttttctcaattgaagaaggtgaagcagccaacaagttactgcaactgtttccacgatttttgcttttttcaagattctcgccgtcgggagttttctcggtgagatcatttcgctccgacggaaaattcaagttgcatatctgatcggagattgaaaagtgttggttcacgcagtatcgattcgtttgtttttgatgccagatctgatatattacttcaccgaagattcaggaactctttcttaggttgaattagcttgagtttagcttcgaattttatctttgatctagctaaagaaacagagagttttcagaggaagaagaaacagagagttttcagaggaagaagaaacagagagtagtgatgacatcagggacgagaatgccgacatggagggaaagagagaacaacaagagaagagaaagacgacggagagcaatcgcagctaagatcttcaccggattaagaatgtacggtaattacgagcttccgaagcattgcgacaacaacgaagtgcttaaagcactctgtaacgaagctggttggatcgtcgaacctgatggaactacttaccgcaaggtttgtctctcgaatccggatcttagttttgttctctacgcttcaagtacatgaaagttttgaattttggatacaaaatcattcagtttttgttaaattactgattgcatctaacatgcgccggagccgatcggtcgcgtgaatgctaacgtgttcctgatatacctctccgcgtaggttagctagccttagcttagaggagcgttagtcaaatgttagattctttatgtgtgactttttattatgcgtttctctaaaaaaagattctttctctctctgtttcatggtgtgtgtgtgtgactaattcacttgttgtccaggtcgagtctattctcagatgatactcaccacaaaaaaagaaagtagcatagatctcaataaaaactgataaaaataatgtcctcttgcacagaattcaaagtgtacgttttgatctgtagattttttgggaaagcaagttggcacttttgcttttatgtctcaagtctttttactcaaacttcgagaatcgagtccaatgatagataatctgtcggttcaagaatccttgacctgatcactgtctctttcacttgttttcacattgatagaatcaaaactagttctacttgtaacttccttgtcattattaacagagtaatttcttggtaattcatgtaattagaaggattacgtcacattgatcatgtttgtttgatatgttttcagggatgtagaaaacctgtagagcgtatggagataggtggtggttc

SEQ ID NO: 8369 - DNA, 1165 bp, Arabidopsis thaliana landsberg
agtttttttttcaaattaaaattttgctttttcaaagttaagataagttagagaatatcttaatttatttatgctccaatggttaagaagcaaaaagttattttgggaaaaaatttaaattatttatgctttaataggttttttttttctttcttttgtttatttgggtacccaataaatatacaacacatgttcacttcttaaacttaagaaaatatcttaggtaagatataaatcttagctaatcttagctgcttttattaaatttaattagtttattagttaagatatagctaagatatcttttatttgaaccgatggggttgctctaacacaaggattgagctcgatttgactctagtgttcatatatactatatttaaggctatattttcaaatcgaaaaatacattttacaggatatataaccaagaattattattcccgctggatcatatagagataatattacggaaaatgttatataatgaaaacattacattgtaaaactgaaaaggacaaagcatgcacattttaatcattaaacagactatatgataagaagaagaaaaaaatcaaatagatcctacggaactagtcatatcctatctatttctcaaaacccttgatacaacctatttttgttacttgatatctttctaatatttctctttaaattattctaacgaaactaatattagtttggttctaaaatgaaattatatatccggattaagcaatttcgaataataattggattatacaacgagcaaaataaaaagatttagatatgaaatcacatcatttgctggtatatatatatttgtatgtcttatataagaaattgacaagagaataaacacggacttctaaaaagaacaaacggcaaatacatgagttcatttgtcctccacatatatttcctcttgcatttcatttgttgttacttctcttttatttcactgtcgctctcttctttttctttctatttttttttcttctattgcaatattttttcattttgtctatttgggcaataatgtttttggattcatttagatatgtctggacaatttaaaacattgacttgcatgttcgtatatatagaattagccatacaaaatgactagaaccgacttatttatagaaaatgccctcttgtctaa

SEQ ID NO: 8370 - DNA, 843 bp, Arabidopsis thaliana landsberg
agagaagaagacaaaggcaatgagcatgatctaagctgtgtaagactaacaagacttacctacaatataagctgtgtagtctgttgaggaaaacattgatgagtctataagttgcatgtgaacttaaaaacagcaaagtttagagtttatgtgattacaattaatgatgctattacaaatttcaaacctcttcttgaatttagaattttaaaccttgataactaaatttcataaaatgcaatagagtagctagatgacaccctaatttgcatcctctgttccaatcatcatcatcgatcatagagcacagtcctacacatcgggcaagtgtttttgcggtttagccactccacgagacaaccattgtggaagacatgggaacaactcatgcgagtgggtgctgttttcgaactggagactagactctggagacaaatggaacacgactctgcgttcaaactctttgtttcctctacgctcatgaacccttgtagaaccatcctcgatatctttaatgctgcctcgtcgacacggacgtacttgtaagtaaccgcgacgctcacggtcaagtcaacaaaacctgagctgatagcacttgagatctttgggactaagtgatcgcacaaccaatggtcgtctctatggagtcgatcatggagtaacgattggatgtggtggtgactacaactagggagagtgtaattgatgggaagtgatttataggaaagcggagtggacgttacggttcgatggccagtgccagggtttataaggatctcatccttaatggtattgacgatgaagaagatcgagtttgtttttccttgtgatggagagcgagag

SEQ ID NO: 8371 - DNA, 840 bp, Arabidopsis thaliana landsberg
aggacgagacagagaggatgcgaagaagtaagatggaaaaaatgcgtgaaagaatagagtctcacaaggaagagatagagcaactttttgaacttcacacacaacatcaaactactgtcactttattaaaaaaggaaatcggggggaagaaagcagggatttcaaaagagcttggaaatattatagttgctggtttggtcgtcattttattaatttcttacattacaaaatggaacaaatatatgtatgcataatgtatttggcaagacgggaagtaaactaaatattgaagattggttattaattacttactcaaactacaacaacgataactaacaaagcattctgacctcaaatacatacataactgagaaacacaaaggacaaacaccagtgtaatgctgaagcctacactctgggatatctattgcacccctgaaacccatgtagtaaccgcaacctggagtccccatgtctcgaatttgggtaatcacctgatccacgatatacactgcctcctcgaaaataggaaccctttgatgaaatgtttgcagtaccatattaccctcggtatgagaaccgcaacattttagaaatataccgaatgcaaatcgggcataattactatgaagagcggcttccctgaccatatcgagagatgatatggaagggccttcttgagccaaaccccttaacccttcaacgtatttcgcggtgtagttttgagcagccaaacacctaagttggaatgggcgagaaggagatccaacattcgcgagggagctgacgaatataaattcgtccagacaaacatcgactaatagctcattactataaaca

SEQ ID NO: 8372 - DNA, 1962 bp, Arabidopsis thaliana landsberg
gaaactgcctcatcactgccactggtaaaccctaagaatcctccgcaatttcgcaattttgagaaggagccgccggctaaatttgatggcagaccaaagttcggagatcgtcaatgctctgtcgtcggagatggaagctgtttccgtttcatcaactcaggcatcttcttcgtccgatggattccagtgagttttcttaccaatcattaatttttttcattttcgcgcttcaattttgatttggattatattatttgattagagtggaagagatgaaaaagctatagcaatttagaagtatggaatttaaaattgaaaaagatcttgttatctgcttattggtctggtagatattgaaattttactaattcttcaggatgagtgaagaagttgagaagagatacaaaattgttaggagtatcggtgaggaatgtatacaagaggaagagctaaagaatcttcttgctaagaaggctgctccgatttgctacgacggctttgaaccatcaggaagaatgcacattgctcaggtctgttagttttcctttgttccattaccatatgtgggaaggaagcgttggctaatctattttggttctgttgttttcttaatagggagtgatgaaagtcatcaatgtgaacaaaatgacttcagctggttgcagagtgaagatttggattgctgattggtttgctcagttgaacaacaaaatgggtggtgacttgaagaaaatcagagtggttggagaatactttcaagagatatggaaggctgctgggatggataatgacaaagtagagtttttgtggtcgtccgaagaaattaattctaaggcagataagtattggcctcttgtgatggacattgctcgcaaaaacaagctccctagaatcttaaggttacttttttaaatcttctccattcttgggacgttgtaattatgtgagggaaatgatgggacctgaatgactctggttcttgtccttgaaggtgtgtgcagattatgggacgtagtgagactgatgaactgagtgctgcccagatcctttacccatgcatgcaatgtgcagatatttttttccttgaggtactgttaagcctttgcttgcttataaactgtctttgattctgctgctagttactcggaatcaaaaatttagcttaagcgttacatcagcagaaagtctattatattgttgataaaacacctgataaaagctccaggctagaaataagctgtatatgattgcagattttatcaatgtaatgttacattttgtgtatctggctgatgagttctgtgactactgttaaaccattttcgttacatatgtaggctgatatttgccagcttgggatggatcaaagaaaagtaaatgtgctagcgagagaatactgtgatgacataaagaggaaaaacaaaccgataatcttgtcacaccgtatgctctgcattttcctatttgacttctgttataccacgttttaactggtctagcgtgttgttaatcatttatcattgttaactacttgcagatatgcttcctggtctccaacaaggacaagaaaagatgtccaaaagtgatccattatctgctatctttatggaagatgaagaggtaactataacttagccaaaattctaagtttacaaaagtagataagagttatcacagttgttgacttgttttgaatgtctggatgtcctcaggctgaagttaatgtgaagatcaagaaagcttactgccctccaaaagtcgtgaagggcaatccatgcctcgaatacatcaaatacatcattctaccatggtttgatgagttcacagttgagagaaatgaagaatatggcggtaacaagtgagtttttacccctttttgttcttttctaaaacctttatttgcttggtttctgcatgaaaaatccaatttggattgctataatcctattacataagtcattg

SEQ ID NO: 8373 - DNA, 703 bp, Arabidopsis thaliana landsberg
aagctctactctgttctgcaactttatagctactagtttacctcctcatctttcataaatattgcagatgatggatcacttttggacatcttttcttgtccttgttggagaccaggaagcatatctgcaaagccaataagctattaaaaacagctcaagatgatgacagcactggaaagaacagaaaatgcaaagagacatacggtgggacaagatgatgggtttatttttcctcttaatgtcagcacagtattctcttgctagcatgtttacttttcgctgatccatcccgagctggcaaatatcagcctacacaggtcaaagaacaagtatcaaatatcaataacaatcatagaagtgtatatgtattatataatccaaaactgcatttaagagtacctcaagtaagaaaatatccgcacactgcatacaggggtaaagaatttgagctgcactcagcacctcagtctcactacgtcccataatctgcccacacctgtaaggaaaggtgacatatttcattcagatccgttgtcattgcaattatacataaaccaagcattgggaattaattacctcaagattcgacgtaggttgtttctacgagcaatgtccatcacaagaggccaatacttactccccttgccatttatttcgtctgatgcccaaagaaactctactttgtcattgttcatcccacctg

SEQ ID NO: 8374 - DNA, 1405 bp, Arabidopsis thaliana landsberg
tggtttggaaatattcctgcttttgaatacataactcactcttgttcatatggtcttatgagattcattattttactattcagataagatcagtaccaagattcaagagatgatgatacaaaagatacatagtattgatctatgaacaacaatcacctctcttttccacacattctcaagagttttttttctttttcgaagcaacaaattcgagtagtactcgtctgaagaatgcaactggatgatcatcatcttgctgttctgttgtcgataggtctattgtttatatatccacttgagggattctaccaccagcttggacaatctgttgctcaagctgcaacaaaacaatgcaagacttattcacgaaattcgaaagcaaaaaaccgacacaattcacgtagcttttcactcacattgaacagatcttgaagctttgcttttaatgtcttgtactcaatatccacttgctgcaaacatctcacacacctataacagagattgtttcccaaattagtttcaacaatcaaatgaacatagcagaaatttgagattctcttaaagaagaaccggaaaacaaaagcttacccttcatagttctgagagtcgcaacactccttgagggtaacacaaagacctttgactctcttggcaccaacacttcatagaacaacaagaaaggagctcttcactgagactagatccgagattagactaaaggaccgagactatacagatcaaatgtgacataccttgagctactacctttgagttgatgaacactagaacctaccagtttgaaatctacatttcctgtctgatctctgagtatacatatgaaccaatcattaaaccatatctgctagcttttgatgattaaactagtaaaagaaaagtaaacttacaaagctctagccatattactgataagcttctcacagtcttcaaagaagagagtaacaacctcagccacaaaatcaggactacattcatcttgcagctttttcaattctgtgaattgatcatccaaaaacccctttacaaaaccaacacaaagaatctcagaaacccatttcacaaaattcccaattccaaatacaagctccaagtaccctaaaaacagtagagagtagtcatccctaaaaagaagacaactttgaaaaagagacagtaacccatttcacagaccctaaacccaattcccaaaatccccaattgccatatacaagcttcaataagatccctaaaaactgtatccctgtaaaagagatacctttgaaacttaaccacaatttcaaagtttgcttcaccagaaaagtaatcactttgaaaggagacgactttgaaaatggagacaattacccatttcacaatcagtaaacctaactcttaattccccaatttc

SEQ ID NO: 8375 - DNA, 999 bp, Arabidopsis thaliana landsberg
catttctggcatcgttgaacacttccatgtctcaggagcatcatgacttgctgacttagaatcaagtgttacttgctggcttgctgcaagaaaattttgtgcttcttatgatgcttctgtttctagcattattcttgtgtttgtatatatatgctcttgttcatatggtcttaattatgagatgcaaattcatactattcagataagatcactatcaaagatttaagagtcaaaatagatgatatcaaagatacatcgtactgatctatgaacaacaatcacctctctttacccacacattctaaatagcttttttttctttctttctaaacaacaaatccgagtattaccgctaaggaatgcaactggatcatcatcatcatcttgttgttctgttctcgaccagtctagtttatatatccacctgaaggattctaccaccagcttggacaatcagttgctcaagctgcaaccagagaatgcaagaattattcatgaattcggaagcaaattaaaaccaatacaatagctgttcactcattaatgatatgttaactctataaaagttgaaaatctatatgttatgagaaccatttaaagaaattttttaaattgattcgaattatgtcttttaaataaagtattataaaaaataataaaataatatttaattttacgaaattggattatatgatgaaatgggtttgagtcgatattaaaacgaaacagtgtactactggtgaaatcttatagtgaacaactatgatataattatacaatctaaaacactaaacaacacaaataatctatataacttcaaatttaaaattgtagttataaaaaatgatctttgatgtaccatgatataaaatctagatggcaacaaaaatcagaatataaaaaagagaatttatgaaatttattctacgggaacactggaacctctaaatataatttagaggttaagaaaaaaaaaaggaagattacttttaataatct

SEQ ID NO: 8376 - DNA, 1083 bp, Arabidopsis thaliana landsberg
ggataatttcggaaagctatgataaatcatggacaaatttgggaaactttgaataattttaaaaatgttacaaatattttgaaaatttaaaagataattcggataccttatctctattctaatctgttcatgtatccgctaaaaaaaaaaaattgttccaaacaaataatcatttgaatgggatgaaaaattcgggacggatacgggtcaggacggatttgcgatccgaaaaaatggacatacctacctattccaagagagaatcgaactaaggatcttaaaaaccacaacctttggagagtcctagaagcaccactagccaaaaaagactcacttggtaattgctatatcttactcaaactaaaaccagaagcaaaaccaacatatcatcaatcacattaatttggtccaaagatgttaaattttctcgaataagatcaaagaaccaatacacactactaatttatcaacaacaatcacttgtctctttttttccacacattctattgagtttttaagcaaaacaccaaaatccaaaataaattttaaaaaggagaaactgaacaatccaaatttgaagtcatcatcttgtttcttatggattagtctctctttagttaatatccacttgaggaactctaccaccagcttgaatgatttgtttctcaagctgcaataacaacaacaatggcaataaatttgttcattagtcaacaaaatgattcataaaatgaaccaaaaattggattctatatcatcactactcacattgaacatatcttgaagctttgtcgtcaaggtcttatactcaatatccacttgctgcaaacatctcaaccgatgagtccttaagcggtgttgaacaagcttaccctttgtaattctgagcttcgcaatattccttgaagctaacacacaaagctatgaccctcttagcaccaacactgtatcgaaaacaagagttcaagagaagagcttcatctatcaacaacacataacttgtgctactacagagtatacttattgattgttataggatataagcgagacacaaaacataccttgagctactaccctttaatt

SEQ ID NO: 8377 - DNA, 1629 bp, Arabidopsis thaliana landsberg
tcccagaatcgataataacttttacccaaaatctcaatgttccttgatctcgcaagaaacaaactaaaacggacaagagcatcagaacagtgtcatcactcatcagtatatgcatttccgtgtgaccgcgaactctgacagatgctcaactgatccaatgacaacactgcacgtggcatttccccacagtgacttagtggcctgtgtatagaaagatttaaagaacgtgtaatcccaaccattcctccatcaaagatatatcgatcatttctttttgacagcaataatttttaatcattttatctgtctctctgttctttctctctcccgcagtccctctcgtaattttgctatataagagcacctctataatctgtgtgagacagaattataaaaaaaaaacattgatagttttgtatctaaactcaatatataatgataacacgttcacgtgttcatcgtcaaaagagtgtctcagtgagtacaatcttcaggtgtcttctagttttgatcagacgctctattcaattctcttaattagtcatatctttcttttttccctcgtttcgtgttaattttattttaaaacaaaggattaaagagtcaatctttcttttggtaacatggagccttaatgatcctttgttagctctagctaggattttacgtactacttagggtattcaaactaaaataaaatcaagaagaagaacagagagatggtgaggacaccatgttgcaaagaagaaggaataaagaaaggagcttggactcctgaggaagatcaaaagcttattgcttatcttcacctacatggtgaaggtggatggcgtactctccctgaaaaagctggtactttatttttatcatatggttcaattattagctacgatttaattaaaagaaatttatatatattattgttataatgtgtgtaaatgtatttaggattgaagagatgtggaaagagttgtagattgagatgggctaattacttaagacccgacattaagagaggagagtttagtcctgaagaagacgacactatcatcaagcttcatgctcttaagggtaacaagtaagtatctcttttttcttctttcttagtttggattagataatcattactatatgtgtaatgttgcatgaaaatactttacttttcatctcaaatgccaaccataacttttatttttttgataaagattccaaatcttcattagagtaaaataatatttgttagtattattttattgatggttgtgtttgattattgaaggtgggccgcaatcgccactagcttggcgggacgaactgacaacgaaataaaaaactattggaacacaaatctcaagaagcggttgaagcaaaaaggcatcgatgcaatcactcacaaaccgatcaattcaaccggttttgaaccaaaagtaaataaaccggtatattcatccggttccgctaggcttcttaaccgcgtcgcaagcaaatacgcggttgaattaaaccgggacttactgaccgggatcatcagtggaaactccaccgtcgccgaagattcacaaaactccggcgacgttgattctccgacctccacattgctcaacaaaatggcggcaacatcagttttga

SEQ ID NO: 8378 - DNA, 1355 bp, Arabidopsis thaliana landsberg
ccagcagataaagggtcacttgatccagcatcttctgacacgatttcgacaaatgcgtactgatatttccagggagaaccgggatcagctaaccagttgatgtcaaagctcgtcatgagagatttgtagcgacccttgaagatagcccatgtctctcctattcttgggtatatacagaatttacccgcgctacttcctttattgcaatgaaccaagtgagaaaaccttgtgtgatctttaatagtctcatcttttccaagtttaaacctaccaacagaaacatgcaagtctttttcatacctctgtattggttcctcgtcatatggatcaggctcaagccacgtgacagtaacattaaaaccagaaacaaaaacttctttgatctgagcatacaatctaggcatcccatccactgtatcataaagagcccaggtctggccaacttcaaagtgtacttcttcgctcagcttatcaaagtcattgaaagtttaaacctgctttgctctttctggttcttctcctgcttcttccttgcccaaagacccttcaccatttatgttgctctgtgcaacgaaagcttgccgcttgctatacacagacttctacacagacttctgagactgctctcctccatcaaaacataaatcttctgtagctttagtgtcaccaacaataataacttcttcattctcgttgatgtttccaacttctctttcgcttctcaccaatccttctctctttctctttgcaccagacttttgattttgatgaagtggggcctgttcgagaccaaatgaaggaagctcttgagcaccatcagggttagtcttttccatcacagctttagccttgagtggctcctccaatatgatctcaacttgatcagggttagtcctattcattaacaacaatgaataaataaagtaatcaaaacccaagcaaacatcaaaacagaatgcacaagattaagtaatctaagcatttattcttcagtaaaactttgaaaaaggcaagacaagatgaagtaaacaaccgaaaattctaaaattccaaagtgccctactaaaagaacccacatttgagaaaatcctacaacatcaaaaccctagctatgaattgtgatagagagaacaatacccgaacaataagagaatcatatacaccgggagaatccaaatattaatagaacaattgaaagtcttttttttcatcaaagaaaatgataatcttgcaaaatctaccatattttgcttccaatcttacaatccgtgccatattctacctcagcttacaaaatctacacacagttcattacacatttgcaatcctaggactaacaaacaattacggtgggt

SEQ ID NO: 8379 - DNA, 1229 bp, Arabidopsis thaliana landsberg
gttttttttgctcttcatatgtagccttagaccttctagttgataatttctaggtttaactacttcttttggcaccattactaatactatcacctttctgcattttcagttgatatagaagtaacaaaattttgttttgtgttttatgtatgtgtattcttaaaattaaaggcacctggacaatatccatatccagatccttactacagaagcatatttgcaccgcctgcacaaccgtatcccggggtatggtgtattacttagtccactacgacaattgttttaatcgggatgaatgtaacaaaacatgttacaaatcatttcaggtacatctacagttgatgggaatgcagcaacaaggcgttcctttaccatctgacgcagtcgaggaacctgtttttgttaacgcatagcaataccacggtatactaagacgcagacaatctagagcaagacttgagtctcagaataaagtcatcaagtcacgtaaggtaataatactttttttacatcgcgttttttgttatgatatcttacttcgtttgtgtaaatcttgagagtgtattggtagccgtatttgcatgaatctcggcatttgcatgcgataagacgaccaagaggatgtggcgggcggtttctaaatgccaagaaggacgatgatgagcatcaggaagacagtagtcatgaagaaaaatccaaccttagctctggtaaatccgccatggctgcttctagtggtacatcttgagaaggtcctacaagtagctttgttgtattttggctctgtttggtctcagatcatctatgtctttagtgtatgatatatacaaatctttgtagaaaggtatagataggctcttgggagcaattaggtaaacgtgaagtgggttttagacttgtgattattaaataaaacccaccgaggaaaaagggaaataaattatgtccatgatgtttagttaaatacaatgctactgatattgttttgttataagaaattttggtaataaaacgaagaagggaagaatcctcaaacaatgacaccaaggttgtggtctatgtgcaagaacggtggatggtcgatatgtatttcctcctcgtagaagattaggtactctatctcttactccggaacaagaaccctccctgactttcaagaggaatatagagagccatatcaacgttagtatggttatcgtgtcttggttgatgttgaatacagcaaatga

SEQ ID NO: 8380 - DNA, 1086 bp, Arabidopsis thaliana landsberg
ggaccagaagtagccatagctaatttctcggacctgaggctggaacttgcttctgaagtgttctcatcagaggttgcctcctcctcctccttgtggtctccattttccttcttggcattgagaaaccggccaccacatcctcttggccgtcttatcgcatgtaaatgccgagattcatgcatgtatggctgaaaacaagaaattacaacttattgggaaggattctaccaaacaaattacagcacttgcccgccaggattttaccttttttgctttgatggctctatttcgtgcctcaagttttgcccgggattgcctgcgcctgagtataccatggtattgctttgcgttaacaaaaacaggttcctcgactgcatcacattgcaatggaactcctggctgctgcattcccattaactgcaattggacctgaaaaaaaaactttaaaaataaaacaaaagcttttctaaatattccaaaccggagacgttggggctgagtaataaataatacataccccaggatagggatgtggaagatacgcttgctgtgcaaagacgcttctgtagtaaggatctggatacgggtataatccatgtgccttcaataccaacgcacaccaaaaccaaaaaccgtatcatctcaggttaaaaagtttagcattacttggaatcaacattatcattacactgcatctcaagactgattttcaaagcaatcaaagtttacattcgtacgaagtctaaaactgcagaaaggcgatgatcccgggactttcttgcttgaattatctcaaacaaccaagttttggcattgtaagcatcaaaacaaaacttttagcattgaaaaagagaatcacaagcaaacatattataaccgagagcaagatcacacagaaactaaaccaaatatcatataatcgaaataaagatcactcattgaatgtagcctgcacaaatagttgagattttgggtgagagaaattaccatgggctctgagtagacagagtttgtatcaacagattccgaacttcgtcctgaagaaacctgaagtcgggtttgggaatctggacgttctttcttcgc

SEQ ID NO: 8381 - DNA, 1689 bp, Arabidopsis thaliana landsberg
atgtgacatccgcataaggtgttcgagtgtttgcagcttgagaagttccgagtccaagagacctggagccaaagatctgaaccataaaaatgaccaatcaaaatccattaagccaattcaaatattcactaaaaatgttatagttctcatgaatactaacataacaagtgaaagtaaatttaaaaatgttcatggacctaacctggcgtaagcgatgtctttgccttcagcagaaagtaaattactgacggctttagggacacctaaaaaggcgggtccaatgttgacgacggatttgatgtgtttggcacaccaacctggaccacccccaccgcctccatcaggaagaggtgtttctacccatttaaggaagtgaaggaaatagatagcccccattgaatgcggaaccaccacaactttcttaaacccattggtggcatacattagctcgattttgctcttcagtctacttaacgattggtcacgtacctgctcggtttcaatccaaaaactatagattagtccaaagctctacaacaatatgtaattacatacactaaagtagctaatcatggaggtcttatagtatatcattatcatcattctctagaccaccagtgttgtcaatgtgatcatataggtattaataacgactaatctgagcatacctcggtgttatggaaagagagtctccaatcataagaggccatgtgaaggttcttgccttcatatccaatttttgccaaattctctatgagaactgcccaagcaaagtagcatggtgcgaaatagtctgcagccactagtcctgggactgctcggacacggattcccggtggatcgagaccggtctcactgtctagagataagtgctccaaccagcacaatggcctataaatcaaattacaacaattaaacgaccaagtatacacttcaaactaattcagaattgagaaaatcgaaatgctaaccagaaaatcatgtaaatcaaaaaccgtaacaatcaatatatatatatatattttccagaatccatgttaaaaccataaccaaaaatatatgaaaatttagaaatactaaaataatatgttaaaactgatattctaaatttagtaagttttaaaatgcaatgaaatcgtcattcatgttttgaacataaatatattttatagttttgtaggacgattttctacttcctatatagaaatcaaaacttacggtttccatttccaaattcgaatgacatttaaaaacatatcccaaaaatcacgattaattattaatttcctaaaaccatccatcattacttagaaaataatattttcataaactagttgcaaaacaataacaaaacccaaagaaccatctccacccattaaccaaaatgaaaatccaaagaccatccataacaacaacagtataacactacgtaaagccaattcaagaagaaaccaagcttaaccaattatacatacccctaaccagacgaaccaaaccaatatctgaccgggtctataaaaatatctcgaaccgaacataacggtctaatgtgttaccttctaagaatctcggagaagctagcaccccaaagacgtttacgaaagagtccttcagcgcaaggccgaccttcccaaagctcgagcccgccggttacaatccccggaacaagaatcaccggatgaaacgcct

SEQ ID NO: 8382 - DNA, 1343 bp, Arabidopsis thaliana landsberg
  unsure (1)..(1343): unsure at all n locations
agatgacccatggcattcatattctctaacaattcagctacttcactaaacactttctaagaaatgaataaaagaaaattagatgggctcttaaagaaatgggtgccaaagagatagataggtaaaagcaacaaatatattctacctaggtatcagtgcgagtttgctcttacaatgtaagacctgattctttgaagcatcaggttaccccgtgaataatcaccctgaacaggctgtaatatcacattgctttgttggatggagagatcagaagctggatcagtcaatatgacaacattgctcttgggcatagtcacctaaaaacagatttttcagtagtaatcagtctatgagatagcaaacgcagcagctaagaaacaccaaaattgttaaatacagaggaaaactcagcaagttacctgaatgaagttggcgaatgcatttagaacagccattgacctctctggcttgctgtaggtaacattcccaacaacagaaaccggattggaggatttcacatttccgagcgacgtattataaacagtaaacaccgtcacaaaagaaacgccatttccagcaccagacacatgagaagttgaaccatgagtcttgttcagagccttcgtgcctaaacaaatatgaaattgtaaaacacctgtcaataccattctaatggtgcgtcaagttgcatgaaaacaatgctacaatgtttgtgaagcagaacaatggctaagtgtatgatgtatctcattcaaatggttattaaaacaaaagttcctgagattcacagagacgagacattgtgttcaaattgctggacaaaattgctcagatctgtgcctatacaaaagtgcttaattgtagcaaacctaaaaatagaagaatacgcaaaatctaacctcggcaatgaaatcgatcagacaagccttgtccagctacaggaccgagcacaaggtgatccaatttcttattaggaatgattcgcgcgtcgttcctcgtagccgaatccgaagaaaaatcaacaagtgaagagagatgaggaagaagaaagagcacaggaataagtaaaagaattcgacgccatccnnnnnnnnnnnnnnnnnnnnnnnnatctctccgggaacccattaatatcgtattttcaaccttcaacgcaatcgccgatcaaacgaatccgcggaggaggactgactactgaccgcctgaaaaaaactaaaccgggaagaacccaaactacgtgacgtttatttgaactgtcatcgaatatcatgccgtctcgtcattcacttatctgagtgggctttataatagaaaggcccagtacataatgtattcctaagttg

SEQ ID NO: 8383 - DNA, 1789 bp, Arabidopsis thaliana landsberg
ggggtgggggcagacagcaagtgcaagagataactgattgagtttcttgatgagacacttttctgtctgaatgtgagacccaactttcattaaccggagagtgcgatagaaagagtgtcgttcccaaggataattgagaaaaaaatcaatattcttaacaatctctactacttcgacaaatggacgcataggttgggatgcacttagaagggcaccttcaacaataacaacaagagatatttggaatttacgccaggaaggcatggcacaatcagatttgagaccgctaaccactgatttcacagtcgccgaaccgagttgccccccaatgagtttgtaccagtaaggagattcaccatcagcatatgaagtagcagaacgtactttagcagctgacgggtattcagaacaacacaaacttgtgacttgctcaaactctttcagagaaaaacgtaatggctttccagcaaacacaaacaaggttgcatcaacttcagatgtaaacagctgcctacatagtaactggtgcagaagctgacaagacaaagaacactgcctcacaagaagcgaaaaattgacccaagcggagactggagtagaagttctaactcaggagttccatacaagacattgtaaatatcaataagatattttgcctttgaatatgagttgatgcggacaggatgagaagggtagcaatcgagggcaagcaagcgaggaggaaggtcacctgagaaagatggagtacaagtcgtaagttcctacaacagagaagtgcttggatacataggtctaacaaaatatacacataattgtcagctttttacgcagcaaagtaaaacccttatgctatgactgtgggaaccgaaacagacaaaggtaccaacaatagtataactctaagtaacaaatgaaagttgaaccctaatagacactaatttgggaacacaatggagtaaagttaacacaacagtataagttacacatttacatgtttgcatataattgagtaatttacgcagtaaactaaaaccctaatggatactaatgtgggaacccaaggggacatagtcataaacgggggaattttgggacgcatagaacctgttacacattggtaaatttcgtccgcatcagagcccattactaaatcttcaccgaactgaaagatgcaaaacaatgaataacataagcgcttggtactatccaagttaacacaataacggtacaacaagctgcttgtgaagtaaccaaagtaaatctgaaagtatacagtgaacacaaaagaaggacaaaactgaatacgagagatcgacggaggtgcttacgtttaatgttaaatcaatgatggagaatgaaaatcagcagaacaaggacgacgggtgaaacggaatcaagtttctgtaatttccggtacatgcaaaagtaaatcgacgcatcagaagtcgataacaagttgatctgatggtatacagtaaacacaaaatcgaagacgaaactgaatctcgatagatggacggagaatcttacgtttattgatgaatcgatgatggcagccagacatggccgacggggagaaacggaataaactttttgaaacatccggtatatacaaaagtagatcaaggtaaaatctcccgtttgttgatgactcagagaaattctcaggcggtgttggatgcgtaacaaaactaaggcgataacgatgaggtaacagagaagccaacactggagagccgcaataaatttgagatgtcttgtctacaacagagatgtcgcatattttatt

SEQ ID NO: 8384 - DNA, 1698 bp, Arabidopsis thaliana landsberg
gtttcaggctatgttcccaatgaaaagatcgagagacgggagagagaactaagtagagttcttcaaaataccaagaagttccgagtgagagatggagtatcatttgaagttgcacaggttaatcaacattcataaatggctaaatggattgtcttagactctctactgatactaattaatgaattcatttcctgcagtataatccaccattcactctcccgtttatgcgccgcaacgaggtctctctcgaagttgaaaacaaagaagattagccccatcacaagtacatacatacatgtatatattatatgtatacacagttaaatacttgtgctaaagacaaaacgcgtttacttgaatagttgaaaatgattagttattactggtcttggaagccattttcttcacccaccattatgatgcatctttacttcgcttataggtcactagagatgcctacctactataggctttgaaattaacccaaagaagcagcactcaggaccttttaacttttggaaaattccgtcctaacaagtttacatttttgggttttaatacaaatttttaaactttctacaaaaagggtttcataaactaaaaacccttggaacagtatttctgggaattacaagttttcttcttttctcttgaacaagcttgtgttatctatctatgtatataagtatatgtcacatatatatctagatataacatcccatgggctaatcagtttcaggaatgctatctaacaaaggtctccagccttctttatgacactcatcatcatcatcacacagatgttgcttagcaagagtcttatacaccatttcatgaacagaacctccttgaagcagcttctccagctcttgcttactcacaaccatcttcactctcacaacaccattagtcttctccttggtgttgtcacaacaatctgttaatctatcttcttcttgttcttctttttccacctctggatttgcaaacctgactttcttcatcgtcttcttcatgtgcttgattgaggtagtctcctggggcaatagatagtagagacgaccacagagaagcttggcttggggatgaagatgacaattgttggtgagagagtcaaagagagagtagtgaggagagaattgggtgaggatgtgatgaaccttcataggtcctctgtattcaactactttcccatcatttctcattatctttatcactttcttctccattactaaacagttccccatacttttctttaatttgttttttttcttgctttagcttgtgctttcttctctacatgtgtgtagagatttgttttgtctcgggttttggagatttgttgtttgcatatttatagagcttacggttatgtgaatgccattgcatttggggataattacgaaaatgccattatctcaaatggcccctaattgatctttatctcatttttttgaaaaatatttgatatatcgtggttgggtgctctcctaattatagttctaaaaattggctctcctaaactaatttcgatttttttcaacaaacgaaaacaaaaagtctgacctaaagatatcaagttataagatttgatcaatcaattaaaatggtagggaaaatcatctaatgacaactaattttgtttaaactacacatagtaagtatatggtatgcttcaagaaagttcaagtgcatgtc

SEQ ID NO: 8385 - DNA, 559 bp, Arabidopsis thaliana landsberg
aatatatggcatctaatcgataatcccaaaaaattttttataaattatacaactttgtataatacaaacacaaatctccaagcaaagaacaatagataaacgaaaaagaaaaaagtaagaaaagaagaggaagaagaggaagaagaggaagaggaacgaatatggggaactgtttagtaatggagaagaaagtgataaagatagtgagagatgatggtaaggtacttgaatatagagaaccaattagtgttcatcacatccttactcaattctctggtcactccatctctcacaacaacactcatctcctgcctgatgctaagcttctctctggccgtctctattatctcctgcctacaacaatgaccaagaagaaggtcaacaagaaagtgacctttgcgaatccggaggtggaaggcgacgaaagattacttagagaagaagaagattctagtgaaagcaacagcaatatcgatggtgatgacaccaagaacgtaactgttgtaagaatgaagatcgttgtgcataagcaagagttggagaagctactacctgagag

SEQ ID NO: 8386 - DNA, 705 bp, Arabidopsis thaliana landsberg
catcctcacccaattctctcctcactactctctctttgactctctcaccaacaattgtcatcttcatccccaagccaagcttctctgtggtcgtctctactatctattgccccaggagactacctcaatcaagcgcatgaagaagacgatgaagaaagtcaggtttgcaaatccagaggtggaaaaagaagaacaagaagaagatagattaacagattgttgtgacaataccaaggagaagtctaatggtgttgtgcgggtgaagatggttgtgagtaagcaagagctggagaaactgcttcaaggaggttctgtacatgagatggtttataggaccctagctaaggcaacatctgtgatgttgatcatcatgatcatgctgatgatgatgagtgtcatagagtctggaaacctttgttagtagcatttcctgaatctgattagcctattgggtgtacatatctacatatatatgacatatacatagataacagagactcaaagcttgtgaaaagagagcatgtaattcgcagaaacacaagggtaagacatgaatcctttttcttttagaaagtataatatttgtatttgaaaaccccagaaaagttgaatctgttaggagggaacttttccaaaaggcaaaaggtctgagtgctaaattaggttaacttcaaagcctatatgcatataataggcatccgtagt

SEQ ID NO: 8387 - DNA, 744 bp, Arabidopsis thaliana landsberg
tgtacataggacatatatatatacaagatggagataatactaattaatcacaagagaatattgtagtattaatgataagagaaatcatagggagtgataattgatttgaatatagtctttccttctatacctagtggcctataagcaaagtaaagatgcatcataatggtgggtgaagaaaagggcttccaagaccattaattactactcatattcaactattcaagtaaacgcgttttgcctttagcacaaatatttaactgtgtatatgcatgtatgtatgtatgtatgtatgtatgtacttgtgatggggcaaatcttctttgctttcaacttcgagagagacctcgttgcggcgcataaacgggagagtgaatggtggattatactgcagggaatgaattcattaatgtcagtagagagtctaaagacatacgattgagatttctagttttaatccatttagccatttatgattgttcatgaacctgtgcaacttcaaactgaaactccatctctcactcgaaacttcttggcattttgaagagctcgccttagttcttgctcccgtctctcaatctcttcatcggtaacatagcctgaaacaaagttgaatttgttcatagatgacgactaagaaaatcctgatcatgttagatgcttcaagatgtatctgaaaccatgtgtttgcatttcaagattatgtgttggatattatacattagactagacattactttttta

SEQ ID NO: 8388 - DNA, 1214 bp, Arabidopsis thaliana landsberg
tcaatgagcataatggacgcttcattgtcgagggtcgaaataaggttatcaaatccgatttgggtatggtccgacatttacgagtgtcctacgcaaaaacttaatgacatgtccttttcatatattacagaaacatacttagtaataaaaataaaatctactaagtactaacctttaaataacagtttaaaaattctaaaaacaatggaaaagaactacaaaaaaatgttgctttgacaataatttaacagcaagccaaagcaaaaaatatgatagcaagtgttttgtgttcgtgaatataaaatgttaaaattagattatatgaaattgtgcttattgtttgacacaaatcaaagccaacatgttggatgaagatgtttgttttcatagtttaacaaagctaagtagctaaagaaaaagtcgctaacgatacaccgatttaaaatttcaaatttaactaatcattgcatttgcaactttttttcttcttttcaaatttccaaataaatagaaaaggaaaacaacaacaaattgaaattcaaaactaataattaacctcaaaaactttgtgttattcatatatggccacaatttttaaaaaaccctaaacatatatgaaagtttaacatagttttttttactagaaaaggccctcaaaatttgagacctttatcacttgcttatgttccttggcctctgggccgagcctgagccaggtggcgcatggtgttgactaatccaaaacaagatagattctgctcaaatgagcttatttagataaaaatagaaatagctaattgatgagctttattgaaatgtaaagaacagagaaaggtgaaagcttgagacttttctttaagggaaaaatagatttcgatgatgtttcattaaaggttgaatgtggttgctcaaagaggcaaccttggttacattcatacatgacttacatcatatatatatgagagctcttactacaaaacctcataacatgtacttagatgggcttccctagtgttaatatattaggcttctttgtggcatcttatatattgcattcgaaagctaagattatatcagtgttgggttaaaacaatactcgagaatggtttataacctttgacgtaaaaataaattttatgctcataatgcgtaatttatagcaacggtgactcattatgatcaacaaaagctgtgatcttatttcaagaagagaa

SEQ ID NO: 8389 - DNA, 938 bp, Arabidopsis thaliana landsberg
atcttcaaatgcaagaaatgaaacctactggaatatcattttaaggtttaatttttctgaaaataatccctccgcatgacgtagttaattaccaataaaccgtcatttacaaattttaccaatgaccaatgcttatcctcatttccatccacttatcaacataaatatttcctgtccttgaattctcttgtgaattctccactccattttagtttgattttttttatttatcaataactttattttataaagtatctttaatatccatgagcaaaagttgtcggccgtatatggcaaacttatacataatagacgaattcgactagaacggtggagatatctcatacttaatagcgactggatttttttttacacaaagcccatcgagccaaattaaatacatccctagaaacttcccggtttatacttggtggctaattaatgtttgaagtagacaatattacaacttataagatgtgtgatacactataattaactacccgtatgtcattatccttagtcaactttttgaatcagaaaaggcagaaggaaaacacgtggctctaggttagttcagttcattaattgagcctccttgagcatgaacgagacattgttcaatttaatggcaaaaggatgaaaacatccgagaatttgttacatgtcttacctcatatcttttcactttcccaagttccacgttgacatgcatattgagccccgaggtttcagcaaacctgaatttaagcagtaactagggaagcggtggcttggagttatatatatagacctggctttgaccatgaggaagcggtagcatataggaccactctcttacaatatttgattaggttcccacatttgattattgtacatgtcaatttttttaaatatatttccaagactccatttcatcaattctaatattgcataacgat

SEQ ID NO: 8390 - DNA, 1088 bp, Arabidopsis thaliana landsberg
aaatgtaagtctttcaattaatctttatagtttggtggcataaagtcaatatgctgtcagcttgtctgtatacgacagtttcggatatgatgtaccgcttccttatggtctacatatataactccaagccaccgcttagattcggggttgataaaaccttggagctcagtttgcatgtcaacatggaacttggaaagtgaaaagatatgatgaggtaagatatgaaacaaattttcggatgttttcgtatttttgccataaaattgaacaatgtgtcgttcatgcacaaggaggatcaattaatgaactgaactaacctagaacaacgtgttttcctttcttctgccttttctgattcaaaaagttgaccaaagataatgacatacacattagtgtaccaagtataaactgggacaatgccggttcggtatctatgaatgccctacacaaaaacttaaaaagatgcctttttcatatactgttactatataaatcataccaataacaatagtaataaaaatgttataaaaaacaatagtaataaaaaaaatatcttactaaattttaaataacagtttaaaaattctaaaaaacagtggaaaagaaccacaaaaaatgttgctttgacaatattttaacagcaatcaaaaggaaaaaatattatagcaagtgttttgtgatcgtagatataaaatattaaaattaaattatatgaaattttgtgctttgacaattatttaacacaaactaaagccaacatgttagtttgatgaaaaagctagcaatccatcaatttaaaagaagaaaaaaaaaactaaatggagtggagaattcacaagagaattcatcaaagacacgaaatatttatgttgataagtagatggaacttaggataagctttgatcattggtatttggtagaatatgtaaatgacggtttattggtaattaactacgtcataccagctgaggaattatattcagaaaacttaaaacataaaatgatattccagtaatttacatttcttgcattacatcttgatcatatatatagattcggtgtatccaaatctttattgaggaaacaac

SEQ ID NO: 8391 - DNA, 2667 bp, Arabidopsis thaliana landsberg
tgtaatttggagtcaacttgaatatatgattttatgatattaaataacggaattatattttatctacttaatcattttgacttcaaatgttgttagtcgacattgttacctttcttttcataagaaactaccaaacgtccagacctagtcggttgcatcttcgattgcttcattgggttgataactaatttaattttaagaacacaaaaaatgactactatggtattatattacaagatggattttaattctttccaatagctggttgcaataggccttatgagactcttccaaatggaaacttggtttagtttaattaaaccgttttcttctcttctatggagttcacgttctacaaagattttcatagacaatcaaataataaaacagaaatataggcatgctccaagaaaaaccattcctgccctatatacttacatgcggaaaacaaaattaaaatggttatatgtttgtgtgttcttttggcgacgcaataggcacaaacattttaaaatacggaattaaacacattacaaaaatatagttccttgtatagagtaccaatgttcacattttcatattcaaataacatgttttatgttttgaacattcatttaattgggtttggtgaaatacgcggataattaacaagccagctcaagagcatgttactttcttagtgtaaaccaagcttagaacaaaatagcatgttattttgaaaatagcaattaagtaagtgttattgcgaataaataaaaagttgatagtcaatgtacccaagtcaaaaaaacacatccatcaacagaacttcataaaatactattaaacgaaagagaatgtgattaaggagatttagggacgaaataagacaaaaaccaaaagacaaaaaagaagaataaaaagatggagagtgagatagagaagcatgtggtgagcattttagggtgtacgagtcaggtgaagttatattctcaaggtgcacgccttcaacattcttaactcttactaaactccatccaaactatgttttgtagttgagccagacaaaaaaacacttatgtgaaaataaaattataagacaataataagttcttccactaaaatcgtttttttatatggataagtaacacaaattaaataaccttgcattatagatatacaaaatttatacatattttacagagacagacagagtttattgagtacaaaaaaagaggatgaatattaattttatattttagtactccaaaagagttcttcaagtaaagctaaacttttttaagtagagagagatggaggcactttctaaacacttttgttgataatcatcgcttcataattgcaattatcttacgctatctttactctaataaagtaataaaaggttgaaaatattgcagagactgtaattaacctcttgcggctctgtttttcacaatatttcaaccctcgaattccacagattctatataaaatacaaactttatataaaaagaaatgcaaaacaaagactggaaagtgtaaacaacactgcccgacaccacccttgtcacagaagttgcctttcttgagaactgctaaaacaatcaagacgccatgattctgttgatgatgatgaaactcaaaagtttataatctgtcaacactctggatgatggatttgattaggattttgcaatgttagaaaagatgggtggaataatggaaacgatgtaggagcagaagagaaagagagattggtttggtcaagcttgggtctcaagttttctaaagcttttacttgtgctctaaggaacttgagataattagcagcttcatcaagcattgatgcagtatccatcttcgtcccacctggaaccaatgtttgtaaaaccctaatcttctcacttatcctctcccttctctgtctcgctgcaaccgcttgaggatccgtcgatatcttgacgttcttcctcttaggcttctccacaatctctaacccgaaattcaccggtctaaatgcagccgctctgtatatcatctccttcatttgtgcaatcgcctcagcatcgggctcgacattgtcagacaaacaagttgaatgttggaaactaatgtttgaagaaccgcctcgttctttctctgttcttggtttctttgatttcgattgattctcatcgtatataagcttgaaacctcctttctccgaatcatcttgaggatgaacaagactaaagtgacttcctgtctcgtctcctctgtttctcttcaaagacttaggttttgttgttgttgttgttgttgtagtctcagtagttcctccatctcctcctctgtttctcttcaaaggcttaggctttatcgttgttgtcgtctcagtagtgatctctctgttctcagactctgcagatgagactccaccaaagctccaaagagtctgacaatctgagaaaagcacagatattccttcatcgtcctccgtcgaggtgttgttgctatttgacgtcgcagataacaatcaatcgagtgatgatggatctatcgagctagctctgttgccaacatgttgctgctgttgaatctcacttaagactcccagatcagttataaaacagctgctaagattcggattaatgaggtggtgaaagataagaagaagaaaaacagagttctcgagccattagctca

SEQ ID NO: 8392 - DNA, 1430 bp, Arabidopsis thaliana landsberg
cgcaacaaccaaactctgaccacttccacgtccagaggcagcagacggcggtgatggtggtggtggcggcgggattgaaggtgattcaggaggaaaataaggtggtgaaggcggtgggatggatggagaaaacggagggaaatccggggaaggcggtggcaaatcggtgttgttacaatagttgtttccgtaccaaatgttttcagggacgttcttgttgaaatcgaatttcacggatttggaaccttccttgtatatctcgacggtctccgggatccagccgtcggtaccggaacggtagatgtagacggagcagatagtgttgagacatttacctttgacttggaatgtgtccgatgaacatttctcaaaaccacctcctccacttagcggtttgtctagtctcggtgcgaccacctaataaattaaaagcaaaactcaatgatatacgtatttattaataagatacacataacacatgcatcgtcactaaaatccatcaaaataagactgttatattcaaaataagtttcattaaggttctaatggctttggtttatccggagtttaacaaacttcttacgtgaatccatcaaacaagatggaatatgtataacttcagggtttgaaataatacgaacataacaaatatttggacccacaaatagaacaaaacaaccaaagagtttttgtatatcaaacctggttatcgtcggcgtcacccaaagcgatagtgacctgatctctagaccaatcaggagagaaacagcttgtggtaacaattacagtgtaagggcagctttcttcttcatgaagatcaagagaagagattagtggctcgaaggttagagaaggaatgggatgagtgaagcagagtacaaggagaaggaggatggatgagagagagcactccattgttgtcttcttgaaaagagatctgggagatgagggttaaatagagaacttgagaagttacccttgttatattaacttaccttcatacttactcagttacacttggcacaacacaatccacaaacaagcatatagtgatatagcaagcatatagaagcactagactacgaaaatatctttcatgaagaaaagtgattgtcgagtatttgaagtgtactattttttttctgtgttactattactttgagtactagtattattttcgaagcatagaatatatttaatttacaccaagtatctatcatttcttaaggccatgttagttaggtgaacttatctcccgttcattgtaaccaattttgttatatacttactacatatattggcaaaagacatgacaaaactgatccagcttctttacttgttacagatattggatttattggaaagtaacagatttaaactttcccaaagaaaacaagagcatatatctcaattttacctagagtaatcaa

SEQ ID NO: 8393 - DNA, 1741 bp, Arabidopsis thaliana landsberg
tggtgaatctaagattagtcactctgcatacaaaactgatcttatgcattgtagtctctctctttcaaaacctggttagcctttgtgattcattcacctatcaaacaagaaagaaccaagaataaggtttgtgacaatgaaacttgtccaaaacataaaatttacaatcttcaaagtcaaatttataatgaattcgttctaattcctagaatcaataaaccaatactagttccttagtctcacaatagatactcaaaattactttaaaaacagagtattttaatacctcagatccgacttagcgaaatcgtcaagctttagaacgaattcatttcaagacaataagtccttctcttaaccaacatcttagcagctaccccataaggctcatcaaacgcagaagaaacccaagacacatcacacacctccttcttcgactcactcggcctaatcgccacaagcgtagctcccttcaacacagtcccatcaggcaattccaaagaaggagcataccaaagtctcatattcaaagcaggtacaagagtcctcttagaagctgaagaagctgacaatggtttcactctcaattcctctaactgatctcgattcatacacaaaactccttgaccatcaacatcagtaagcactaaactatcaagcgtcttatgctctgctataatcggttgcaacaagtaatgtctagcggaagcagcaatcaaagagcttatagtccatacaacacgtagcttaagccctccgtttgtataaaacgattccggtatacttccattatcttccaccgccgcgacgggagccgaactcgcttccgtcttatccgaattcgtcggcggaatcacagaggaagcaccgaggatcacacaattctcgagagtagaaccaaattcagctctccatttcaataaaacaccatcatcaatccctaattcaccactaggaagctcgattttaagaaacttaatctcatcggagtttttcaaaacctgagtcggtgaatgatgcgttacacctccttgttcaatctctccatcatcaccaccactaatcaacaacgaagaaggagatgatcctgaaggaagagaagaagaacctgagcgtttaaggaactgtcccaaagcttgtaacggcttgaagacgagacggaaaatggcggagaaaggagaagcggcggagacggatcgaggtttatcggagaggagagaggaagaatcgtcgtcggagataacgcaatcgacacgaacgaagacattttcgacttgagggattaaggaatggaatcttttggagacgacggagcaacgacctaaggctttgacgtcgccgatgttgttgaagatgaggaggaggattgagtctgggaggttatcgaagtggtcgatttcttgtggttccggatggattcgtgagaggagtggatctgatgaacggagaattatcgccattggtgagacttgagagaatcagatctttgagaagagaagaagatagaaaggaatctaaagaaggagagatgatttaaaataaatggaaggaggaagaagataaatagatcctcttacttttttttttttcttcctaattttaaaattatgtaattatttagtctttggactcataatatattatacacataattgtagagtgtattattattttatacaaagatgattttattattcattcgcatgagatatatagagttgtattattatagtggattcaa

SEQ ID NO: 8394 - DNA, 1020 bp, Arabidopsis thaliana landsberg
tcaaatgcaaagcattaagggatagtgttacttataagatattcataagacagttctaactgctgatgataaactataagctttacctatgcaaagggattaaatcttaatggtttcaggtcaagcaaaatcggtgcttgggcaaatgatattctaaactcacttcataaacacatgatggagaacatgagcactatcttacctcagattccgactgaaaccattcaagctagaacgagttcatttcaagacagtaagtccttcttttaaccagcatcttagcagccgtctcataaggctcctcaaaagccgaagacacccaagagatatcagacacttcctttttcgattcactcggtcttatcgcaaccaaagtcgcaccttttaacacagttccatcaggcaattccaaggttggagcataccatagtctcatattcagagcaggcacaagtgtcctcttcgaagccgatgaagctgctaatggtttcaccctaagctcttctagctgatctctgttcatacagagcacaccttgcccatctgaatcagtgagcactaaactatcaagcgtcttatgctccgcgattatcggttgtaacaagtaatgtcgtgctgatgcagcaatcaaagagctaatcgtccatacaacacgcaatttcaaacctccgtttgtgtaaaacgattccggtatactcccattatcatcggagccagaaccgggagcttcaacgactgtagtagtatcacaagcttgagaaactctcattggatttggtggaatcactgaagaagcaccgagaatcacacaattatcaagagtagaaccaaattcagctctccatttcaacaaaactccatcatcaatccctaattcaccactaggaagctcaattcttaagtaacgaatctcattcgagtttttcaaaacctgagtaggtgaatgatgcgtaacaccgccttgttcgatctctccaccatcatcattttcactaatagacaacgaagaagaagaagatc

SEQ ID NO: 8395 - DNA, 1590 bp, Arabidopsis thaliana landsberg
  unsure (1)..(1590): unsure at all n locations
ttttattaacaaaacaattctggttatacttggaaaattgttacaaaattgtgtaagtaagttataagaaacaacatataaaagttttagaaaggtaaaagtatttgaaaatttgttaaaatttatgaggatttataatagtttcccaaatttatatattcatataaagtttctaaagacaaatttatgttttgcgtcattacgaattcctgatgaacaaacctctctaccgacagaaacttatgaacttatgtacagtataattatgtcagctcatgcatatttcttctaaaagtaataaaattggtagttgttaaattgattatcaacaaaatgttacctacgaaaatcattttcttaaaatgatgtcaacatgcgataacaggaatgctcatatattatttggcggtgggtactaattaaatcaacgtcaaaagagcacaaatacattttaaacacaccactgtcctccttaattaaagagataatgaccctttaaccaatctatttaaagtccatggtcttaggattattctcaaaagaacttgactactggttcgtgtcatgaaacatttatccatatctatcagactatcaccttatatatatcattatttcatctcttattcaattttaattttatcgaaaaccaaagatgaaatagaaaagaccttttttaccttaatgagaacaagtgataaaaaatcatttcattggcctgaccctgacgtaatagtctatttatgcgaggtcaaaatctcgtgacaagtgaacaaaatttagaattcataaaatttggaaaacgtgggactttttttctttatcagcaatgcaataaagtatatagcacattttcacttttcccattatttatttttattccacacgattgattcgccacgcagatgttgcaataagcggtcgcgtttgccatccaagcaacaaacaaccttcattctcttccacattatacccatcagccccggcataaagtgccaacaacatgcttgcttgcttatacgcgttcgaaccgatactaaccggtttaaatcctcctaaaccgaaccggtttctccactgatttaaagtctcatgcctctctacccggtcttctccttcgcatgccacaaggtttagtatctgccgtcctaggaataactccgacatcactcggtcttggcttggcgggccctcgagcgagtcgaataagctcgaatagtaatgtagcgattccgtgaaccggtcgagaaaaacggtaccgttatggtttgcttcttgctcgaccacagtcattatatccggtcggattgatttgattgtcgataaaaacttatcgatggaaccgggatgagctaagaggcgatgaagctcgaagaccgagttaaccgccactgattctaaaccgggtctaatgtctagcatttccggtttaagatcagacaaattgtttaaagcaatgctcttgaattcgaaattgacaccaatagtactcgcaagctgaccaagtttccaaccaacttcttgaatatcggttaacgaataaccgatcccggttaaccgaacaatccgtggaccattangacgtaaagc

SEQ ID NO: 8396 - DNA, 1447 bp, Arabidopsis thaliana landsberg
gccaaaagaaacttagagctctctgaaaatatcagagcataagattaatttttaaaaagaagaaaaagataccttggcccattcaactgataacttgcgtcgctcatatccaaaagtggtattgtcagtcctacggattgcatcttcagcatcgcgctcatcctcaaaatacacaaaagcataacctgcaagaaaacaaaaactcaagataagaagagcgagcatatacattgacaaactgtttcagcccacagaaattgcaatgcaggagttagtcgattagaagacaccttttcacctagagaaagacaaaaactaaataaatatacaacacctgcatcaatgtgaaggctggtgtacataagaagtagaggcgttcgatgtagagtagtaaataaagatgtagatgtgcagttgtagaatgtagcctatgaaaaggtaataaaatccaaatttctgttcaattctgaatggttgctaagccttgcttcaccattctgacatgaaaggcgtgaagaaacaaggcaatagattgtaggctcagcgaagattgtgggcacaacatcataacggtaggcatgagaaaatgtaggaatctatttgcaggaagaaattggcaatcccatgaaaagaggaaacacagtcatgctcctttagagaaagctcctgcgaccaaacaaacacttacatacgagaatccctctcttaaacacaaccccagtcatggttccttttgaattctctccacactcttaacactaattcatgcttcagtagaaaaagtatcaatcaataatgcctgagaagctctcaaattccagaatcaaacagagactacaacacagcagattgatcgccataaggagtacaagtgcaagaaaacgttttaccagacttcatatcaactcgcttcactctcccgaacttgctgaacaatctttcaagatccgaatggcgagtatcatagtcgaaattcccaacgtacacatgtctcattcttgcaaaagcaatcgaattcctaacaccaattgtgatcaacataaacaaagacaacaaagatcagaacatttatactcgaagagctcgcaaagtatctttgatgattcgataaatcttcatcttctgagggagatattcaatttaccttgaagaatctgaagagacgacgacgagaaagataaaccctagaagacgacgacgacgcctcggcgaagaagacggagcttcgtattaatgacacaaaatcttataatgatgaaccgaaaagcgtgttattgacgctgttaccatgaggggcatatttgtcattccgttaaaattattaatccgcttaacgctatgggcttttgttttacaaccggcccaaaatgttcaattacaaagtgctcaaaactcagaatctcatactttggggactcaaaagcaaaatcttaataacttctgtaca

SEQ ID NO: 8397 - DNA, 366 bp, Arabidopsis thaliana landsberg
tgacaggaaatgtcaaaatgattgttttgcggtttaatcttattcttgatcatatagagaaaaacaaacaaacaacaaccttaggcctttgtagctccggatttcacaaggttttcaagggcctttagaatctgtggctctgtcagaccatccaagtttacacacctctccacacccatatctgcacaagccaatcacgaattaacgcaatacaaaaacagaaacacttataaatactagttccgaagtagaatcgaggatgacaattgtaacgcatatgactgttgcgtaaaacaagtttatcaccaaaaagaaaaagaatcatcttgttctctcatatttacagtattatactttactacatta

SEQ ID NO: 8398 - DNA, 616 bp, Arabidopsis thaliana landsberg
  unsure (1)..(616): unsure at all n locations
gaatacaaagtagcgtctttacaatcaaggaacatgcttactgtccagtttgtttttgctgcgatcttatctcttactgttgagaaactgatttgatctctagaagtgaatcggtcaacttcgttgaaccaaagacaagtgaagaggttgcttatgggaacatgctctcttaaaatgacacaaccctcgggtacgtctgcatagcccaaccatatagttgtctatattattagtgtttgatcccgaaaaggggattttagacagaataagctaaagagacataccgcttgtgattgggagctttgcgacagaataaggggttaacccttcgttcttgtaaaaatccacttgaaagtcgatagaagcattatcatatttaccagcagctttatttgcttcggcttccactaagacatcaaatcgtttgtaatgtctagaaatagcaaaagtagcatttttcctccacaagaatctgatgagaagagatgtcagttaaattgctgcagtccagaaacataaccaccaagcttaaggccttctaaactcanaccgttaacttatcttgaaacaactgatatnnttaacgtacttgaatgttaagtacgtatagctagct

SEQ ID NO: 8399 - DNA, 2543 bp, Arabidopsis thaliana landsberg
ggcaaggcgggtttgggatggtgttaaagggaaatggcagggtagagacatagctgtgaaacgagtttccgagaaatcgcatcaagggaagcaagagtttatagccgagatcacaactattggtaatctgaatcataggaacctggtgaagttattgggatggtgctacgagaggaaggagtatcttctggtttatgagtatatgcctaacggaagcttggacaaatatcttttcttggaagacaagtcaagatcaaacctaacatgggagacaaggaagaacattataacagggctatctcaagctttggagtatcttcacaatggatgtgagaagaggatacttcacagagacataaaagcaagcaacgtaatgctggactccgacttcaacgcaaagctcggcgacttcgggcttgcgaggatgattcagcaaagcgaaatgacacatcattcgaccaaggagatcgctggaacaccgggatacatggctcctgagacttttctcaacgggagagccacagttgaaacagatgtgtatgcgttcggagttctaatgcttgaagtagtctcggggaagaaaccaagctatgtcttggtcaaagacaaccagaacaattacaacaatagcattgtgaattggctatgggagctatacagaaatggaaccatcacggatgctgccgatccgggaatgggaaatttgttcgataaagaagaaatgaaaagcgttttgctcttaggactagcttgctgccacccgaatccgaaccaaagaccatccatgaaaacagtgttgaaggtcttgacgggtgagactagcccaccggatgttcctacagagagaccagctttcgtgtggccagcgatgcctccatctttcagtgacattgactactctcttacagggagtcagatcaattcacttacggagcttactggcagatgacattaatctttatttgtgtgttcttcaaaaagtatttgagaattgagtttgtttcgttatatactacttataactatctttctgttttttgtatcttcctctgttcctaatgaaatccagagataggtaagattctgcttttggatttttggatgtctgttaatgtagaatgcaaaggaaaacattaggatacattttgattattggaattacaaatgagcagttcaaggattattaacctacaattttgtatctaaactcaaacgtgttggtacaaaatcgatccgtgttcatttttatcatatttgtgaagactgtgatagtaaagtaaagaaatgtaacaaaaatgtctaagagaggaagatactgaacttggaaggtccaacggtatgagaaaaacctttaatggacaattcaggaacagtagctttctccaccataagaagctcattgtctatgaatatcacaaccactgttatatcatcatgaaagaatctcctcactcctctctccactttcttcaaatcatcgtaattcatctctctctttttcgcagctatggttatcgctcttctcaccagccttctcgctattccctgtgtttgtttcatacatatatacaacatcagtgaaagcagacaaaacctgagaattaacttttagcaatcttaggtggtggcacgtacaggacgagggtgtttattcactatctctacagcttgctggttggtcatttgttcccagagtccatctgatgcgaatatcacaaacttgtcacttgtttgtaagactcttgtgtagacacaaggctctgctgataaaacaggtctttgtagttcttcagcgagatggaaccgcggaaatgaagggtcaagtgagaactctgggcgctttaagtatgcatcccctattgatctagatacctgcacaaatgaaacacaatattgacttatagtttgataagccaagatgacacatagggtctgtctacttgtgcaaagagccaatcattaatcaagtctctcttgtttagtgaattggaaccataataatagcagtttcatagctttgttcttatcatagtgtcacaggcatttaaatatgtgattagagagctttgcaaacctgaatgatgcctttgatgcgccacacaccatgtttaaggacaacgatatgtgaatcatcaggatgcaacgacctaagctcttgtctaacttcttccaaagcagcattgtgatcactagtcagttgctcagctacaatcttgtttgacctattattattactacccatggaaccaagcacagcacgagaatcaccaacattagcgataagcaaagtccctttccaaataactccaaccaaacaacaagatccaacagctgcaatcaacggtttcaacccgcaagtccttcgcacaagcgtgagaaacccttcctcagtagcagaaaatgcagctcttaaagcctcctctgaaatacaactcctttctctcgaaactcctaaaagatcaaaactttaatcaataagcagctaatgaaaaccattgtaatccacaaaaggaacaagacaaagctacaaaaatcagaaacga

SEQ ID NO: 8400 - DNA, 2051 bp, Arabidopsis thaliana landsberg
catcccttgtttaacaagttgacacaaatcttctattgctgtccatggtttcccccttgctatacagttgtttgcatttaagaccatccatgcgctgcttacataccttcataatggtgaccagcagtacaccttcctagatcaaaccattcatagtctccctaagtgcaagacataccacaattcaaacatcttggctcttgaacataaagatgctgtctgtttcccctacttcattatctcttacatgtgtttcattcatctgtctccaccaactgatattctttatatcttccagatacaacttttgcttccacaaccacggtagactgcacttggggtatccgcatcgtgcgacccaaaggttaagcatttggagagtcttattgggtcatctttccgattcacaaaatctttttggcctgtaggtgatgcttctctaccgtctctcaactcttctcggaagcgtaaatctcgatctactaactcctcaacttccatttctggtcctcaacacatggtgcaaactaataaccgaccttctcacgttttttcagtcaacactccttctaatgttgacaccaatattgataagacgacaaaaaagtttcaaggcatcaatatttgacgaggttcggcaactccttcagcagaataataagaatacagttggtgtccacgcatttgtgaatacccttcttgtagtttctcctccaagttcagttattctttgtcgggtgacacgttctgcaggtgctagactgtctacggagtcatactctgcgcgttcagcaaacaacaagagatgctcagcctttaatggtaaacaatcagctgtctctgatcctgcgctagattccctgcacactgtcaactcccttgttaaaggaaaacactgcactgtgtctcctctgaagtgtacattctcaggtactaagctttttgacactgatgttacgcctcctcaggtaaagccagattttgcctgcaaattgtttgcctttttccctctgccatcgttttattatcttcacttttgtaggcatcctctccttcagtaactggtagccatgctcctcctctttttcctttcccgtcaatcagtccggttccactgactcaggtttgattttagtatcagttaatacttgtgttgtgcacattctacacttgtactctttcgttccccataacgtttgtaaatgtacagcagaaaaaaacttgttgttcctctttgctggttgaggctgacaaatacagaagccagacttctgcttcacagtcttagttgcctacccatgtgcctccttttagtttggagcccttacttgttactcaacctacaactgttgatactcccgttgttgttcccccgcctgccatcacttcatcgtctatgcctaaacgccatccatcaaattgcaagttaattcctgtgacttcagttaaaacacgccggtctacgcgccgtcatccgtctcctccacaacaatcagagtttgttggccccgcaaataatctgcgcaacacaaaaccttgtctcaaaccagaatcctcaagcaatgcgaacaatattctcattacatttgctacccctaacaatgatgtggttgacatgtttagggataaactctctaaacatcagaacaagtttgatgtgccaatgcaactttctttgggttttctatttttaactgcttaacattactttttcttactattgcaattccatatgtagggaattcactatcaatggccagccatacccttcttctttctttgctgacttgtgtaagccgcaatattctttctttttcttaccaattacattttaatttcttaacaaacaacaactccatttaaactaagtgctcagtcacataatttcagcacatggcttgcatcgttgactttgtttggaaaaacatggggctttccttgcaccgtcgtgtactgtcttgctcattgtcacctcaatatgacgaaagttatgagtttactacatagtgatgttacgtacaatggccccatactggtgcaagtcgtgtgtg

SEQ ID NO: 8401 - DNA, 1072 bp, Arabidopsis thaliana landsberg
tgaattgtagaacagaccctttagttgaacctcttctctaaataaagattcatttgtttcttgaatgtaatctttcaaattcaatgaagtatttgttacaactgttcattgaaaaaataacttcaatctaagcaagtagctacacaaagaagaacagaatcactattagcatcacaaagagaagatgacacttctacactctttgagtttcttttttacaagtgatcaaaaaggataaatagagaaaaacaaaaacaaaacaaaaaatccaaacatgaatcattcatcatattcagacaaacatgtgcaagatcaaagagaatcaagactctcagttctgcttctcacaatccgatggaaaacttctcttactttcctctcaaacggatccaaaccatttctcaaagcttcacgaacttgaacaagctcatcaactctctgtttcacctcaacttccttgtcatcattcaacgggaaatgaatcgaatcgatcaattcattcatcaacctcgaactcttctcaatcctatcaatctccttaagcaaaccacaacaattcttcctatctcttctcttagattcctcaacaatcttatcgtgcaacgacataaccggagctgcccattggaaatgcctaggcacaaagaagttaacttgcaatccacggtcttgacaaggaatcgcagctaccaaaacccacatcacaaaaagcaaaaccgaagtcattgtgtaaaccggtacagctaaaccattgctagcaacgacatcgtttggtcgaggcgttgccaagttactcgctaaagcttgtaactgcttagaagctgaccatgatcttgaaacactccaagaaagagatctgaaatgaccaatcgaacggtggtgactgtctttgactcttccgaatgaacggttacgatgagctagattggttccagaaggatgatctttctcgtcaagcattccgattgctaaatcaatcagagctttcttagctcgccggagctgaccttctccgatcggacggtgactatctaaagcagagatcacaatatcggcaagtttctcccattga

SEQ ID NO: 8402 - DNA, 1085 bp, Arabidopsis thaliana landsberg
  unsure (1)..(1085): unsure at all n locations
ttgcttgactatatatgaaggcctcgtaatcatgatcttgtatcacatttggactttcgttctcaattctttttttttcaggagggcgtgtccacagaaggtttacaagctctcaagattgctcctagattttgtgacaattgtaacttcataatatagcgttcataaacatgtaactaattgtatatcttttttaattcatgatgccttttctattctaattgtgtttcttcttcaagaatcgtcgactataatcaaaaacatacaatttatctaatcgaactggaagaaatatatttaaattgtaatgcaagttccgatccgtataaaatggaaccatattcataattaataatctttgatgagaaaattatacataaacaacaaaggttggaaaaatggaggttttgtttctccttgcttttatattaacaacctttaaccaaaatgttctttcgttctctagcaatttgttctctatgatcttcacattcaccagacaaacaaacccacaatttgataaacatacttcaattctccacaatttgttctcgttgaattttcactaaacatcattcagaaccatgatgctttccaacagtatcaagaccctctgttctgcttcttacaatccgatgaaacacttccctcactttcctctcaaacggatccaaaccattcttcaaagcctcttgaagcttccccaattcctcaactctctctctcacttccatctctttctcttcagacaaaggaaactgaacagaatcaaccaactcattcatcaatcttgaactcttctcaaactgatgaatctctttcaacaacccacatgtattcttcctctctctcttcttcgattcctcaatgatcctatcgtgcaacgacatcaacgaacctccccattggtaattcctaggaacattgaaatgcacttgcaaacctctgtcttgacaaggaatcgctgccacaagtgcccacatcacanacaacaatatcgaagtcattgtataaaccggaacaataagaccattaattgcagtaatgtcactagctcgaggagtagctaaattgttcccaatagc

SEQ ID NO: 8403 - DNA, 757 bp, Arabidopsis thaliana landsberg
gttgccaaaattgattctcacaatcctgacattctcttggtggagaaatctgtctcgcggtttgcgcaggaatatcttctcgcgaaggacatatctctcgtgttaaatattaaaaggtcccttctagagcgcatatcccgctgtactggtgcgcagattgtcccttcgatcgaccagctcacatcaccaaagctaggttattgtgacctgttccatgtggaaaagtttgtggagacacatgttagtccttgtcaagttgcgaagaaaatggccaagactttaatgttttttgatggctgcccgaaacctttgggttgtacagtaagttccacaacattttaaggtgttttaacacattagatccttgacctgttattatgtctatgcatactgtatgtctgatcaggaaataatcttaagtatggtgcttgatctgtctttctcagatattgctcaagggggcacatgaagatgagctaaacaaggtgaaacatgtgattcagaatggagtttttgcagcatatcacttggctcttgagacatccttcctagcagatgaaggtgcttccattagcgaacttcctttgcagaccccaattactgtggcgttacatgataaaccatcaatggttaacagatcaatatccacaatacctggttttactgtgtcaagtgctgaaaagtctccaacaactgagttaaggggtgagccacataaagccaatggcgaccttactggtaattacacttctagtaa

SEQ ID NO: 8404 - DNA, 1983 bp, Arabidopsis thaliana landsberg
ccacccaccgagtctttacccaccacccaaaaaagctggtgaaaagatcgcacttccttacaaccacatctacggcctctccttaaccggactccggttctttacggttaacggtccatggggaaaaccaaacatggctaacttcttcttcactaaagacatcctccacggtaaatcaatcgacatttacagaactcaggacaatcaagaagtggcgcgtgacttcacctacatcgatgacatcgttaaaggttgtgtcggtgcgttagacacggctgagaaaagcaccggaagcggcggaaagaagagaggacaagctcagctacgtgtttacaatctaggaaacacgtctcctgttccggttgggagattggtttcgatcttggaaggattgttagggacaaaagctaagaagcatcttatcaaaatgccaagaaacggtgacgtgccttacacgcatgctaatgtgagtttagcgtataaagatttcgggtacaaaccgacgacggatctcgcggcggggctgaggaagttcgtcaagtggtacgttggttattatgggattcagccgagggtaaaaaaggaaacttctcacgccgaagattccgcttaataattttctctctaccaccatctctctcatcatcacatgcttgtttatttttcttacaaaaaaaaaaaaaaatcatttacagggacagatttctgtatttttctttatttaaaaattgctccccaaaaaaaaaaaatcataaatgtttttgtggtggtcctttttttagggggatcaaagtgtgggaattaaattgttacagctgtatgttataatagaaagatatatagaaatgaggagaggaaaaaaaagaagaaaggggtagaagaattgaaaatatatgtgggattgttatgtaataaatgaaataggttatgatcttgctggaaagtgtttagagcagatcttagccgttggatttttataatcaaggaatgaaacctgtgatccattattataccaactgtaacataaattttattctctctttatatcttatctttttctctcttctttttactttttaatgttttgtttctctttgctatttcatgccaagaccgaactgaagtaaatggaaagtaatgttttaactggattttgttttgatgaaatgactcagaaaatgtactaatccgaatcgcaataaaccataaagagaaagaaagtggaccattggcattggaccctttgttgtttgtcatcctatctttattctctttcttttgtgtgttttttggtctaccagttttagctttttattctaggtatgaaaatttgataatataagcttggggagttgttgttttagatattctcttccgaagatgcgtgcgaagatgatgaaatggtaaactacagtagtctaatggtttgtgttaatacccgttaccaagtcaatatctaaatttaaactcatataatacacgttgaaaagaaaaagaagaacaaagggtttgatgtcatggcaattagcaatagcattaagtcgtcgaatgagttttctatcggcacatcattttctcattttagttcatttgtgcaattgatttcttcttcaataaagcgctaaaattgttagatatcgctactcacaagtaatggaaatgttcttccacaagaccacaacgatagaaaacctctaaaaaaattcaaactatctcataccgaatcatgtaatactcaagaatttggtgaattttgggccatgttggcccacgaagaaacttaaccataatgtagatatcatattttcatgggattctaaagcctgtcacacgaagctcaaacactatccgacaaacggtttgccatcaacggtcatatcaaaaaaagccatagggttaaccatttacagagatgcatattagggtttgtacacggagggggattcatatagagaggatgaggatttcaagatgaatttttat

SEQ ID NO: 8405 - DNA, 792 bp, Arabidopsis thaliana landsberg
acaagctcggttttggagagcgtcaagaaacagatatcgaatcttaaggaagcaattcaggcagatgaaatctcccagcctctgatttgggcagtagtatccattgcaatggtccctcttctctcaggatcagtcttctgttaccaaactcaagttctgaatcttgatccttcggttattggaatgtcgaaagtgattggacagttgatgcttctttgtctaaccgtggtctatgatcgatacttgaagacacttcccatgagaccactgatccatatcatccaactcttgtacggtttatcgattctcctcgattacatcttggtgaagcaaataaatctcggatttggaatctccaacgaggtttatgtgctgtgtttttccagcctagcagaaatcctagcacagtttaagatccttccatttgcagtcagattagcaagtatgtgtccacaggggtgtgaaggatcagtcacatcttttcttgcttcaactctgtgtctatcacaaatagttagtgcattcttaggcgtcggattggctaatctgatcggtataacatcaagtaactattcaaacttgtcttcagggattctcatacagtctctagcagctctggcacctttgtgcttcatgcaccttgtgccaatgtcagaacctgtgattgagaaagaaggcaagagaggtattagtaagagaagcaggagaaacagacgagtccgcagagtagtcgataaagaaagtgttacaaaaaaacgggaaagagagtcagaagaagcacaaaggtagtgt

SEQ ID NO: 8406 - DNA, 1953 bp, Arabidopsis thaliana landsberg
caaaagtgttaatcggaaagaatgaactttgtgacgatgatttttttttttcatgatatagaaacatgatggatggtcaaaaattttgaaaaggggaagagaaagactcgaaagaaggaggagaaaaacttgttatggtaggtgatcggaggtggaagagccaaggaggaacataggatttcgagtaatgaagctatagagaagtcagagttgctcttaaatagagaaatcaactatgcaaaaccattaatccctaaagtgacacctcctaatttactaggttcctaaaatcacaaccacaagatcatcggaatctttaatctcagccactgaatattccaatttgctaataaatctattcaaacaatctttctgaaaaccgtagatctcttacaaaataacataccaatatcattactattcaaaatggtctaatcaaaactttaattcacatcctaaattttctttcattacatagcaatttcattactattcaaaaaatggtctaaccaaaactttaatttcatttctagggcattgttatcctagtacaagatattacactgtgcgttggcttgtcttggaagaaatgacatctcatgtctccaaaccaagaacgatgaatgaaacagtggggagattcttggagttgctgcagcaagattggtgtgaactgagatataacattgctttgattggatttatgagattcttgtcaatcttgggacttttatgtttaccaacatcagtatccatccttacttacatgggcacaaaatcttctcctcccaagaaacaatgttatttcagctgaagaactagctctaactataactcagactgattcttgtttatgtttctctttcccgccggtaagcaaaactttcctgacctatgactctccctacacgtctattccttctgcttttcttactcatagctctcttcccttctctctcaaaaccaggctctaacattggaacataatgaataaaccacaaaggcaccaaagctgccaaagactgtatcagaattcctgcaggcaggtttgagtaattcttcgatgttatcccgatcatattagccattccaactccagtgaatccgcttacaactgatgacaaacacagagtagaagcaaggaaagaagtgattgatccttcacagcctccagggcacatatttgctagcaaaacagagaaaggaagaatcttgaactgtgcaagaatttccgctacactagagaaacagagcacaaaagccgtgtttgagatcccgaacgcgagatttatttgcttcaccaagatataatcaaacagtatatgaaaacccgtagaggagttgcacgatatggatcaacgccctcatgggaagtttcttccagtaacgatcataaacaacagttaaacagagaagcatcaactgtccaataacctttgacataccaataactgaaggatcaaggtttagaacttgagtttggtagcagaagactgatcctgagagaagagggaccaatgcaatggaagatactatccaaatcaaaggctgggagatttcatctacctgaacaattcccttaagatccaaaaactgtttctttacgatccccaaaacagagcttatctctggagttacttctccgatccgtggcaagttaacagattcttctttagaggataaagaaacaatgagctgaagagataacaaagctgtaaaagcaagaaacaagattctaggaggtgtcttgagtaagcaatatccaccgagtaagttcccaaggattcctccaactgctgaagccataagtgcataagactggagaccatttatctgatatcttaaaccgtattccgcaacagagcgtcttgagaaacttcagtaatggatgtccaaggttactaagcagaataaatgccatagtgaaggaagaacttctctagcacagggaat

SEQ ID NO: 8407 - DNA, 1032 bp, Arabidopsis thaliana landsberg
tttcgggtattttaatgatgtttctcaataatgtagggcttgccaaatggagtgtttcatgattataagaaaggaaataaacgtgcattgccagaggagaggtattgttctagaccccattaagtgatcatattcttagtgaaattcttgtggtcatgaatatatgatgaatatgatacaaaaagttaaattctttccatttaactttctcttcagtttctttacttggtttactgatgctcaacataaggaagatgctggggatgagattcatgatgaggtacatactcatctactttctgacttgttatacgttatagaccgtttttattatctgcccaatttgaactccgaaatcttctctcggagcaggttgctgatattatcaaggaagatctctggtccaaccctctcacctacttcaacaatgtaaactatttatcatttcactttcaatcttgaatcctctttctgtagaggtaataagttgcttaaagattttgttgatgtatgtaggatgctgatgaagaggattttgatggagatgatgatggtgacgaagaggtaaaacaattgtctcattgctcctcaaaatacattgattaattgagtatcagtctggacattgttattatgagtcacatgttttgttactgtgcaccatctcttaaccttgaaaatctttgaaaccataatctcttcagggagaagaagacgatgacgatgaagaggaggaagatggtgaggaatgatgggagcccaaagataacacattgctggcttgcttctataacagatgtgtaaagtttgtgttatgaggttctcaattttagcaatgatgagactaagctttctcttttggaatatttagtttatttactatcaatagctacattctgtttgtacgaaccatgtcatcatccatgtcctaaatcttgccataactacatctgcttttcgcaattgagaatctctctttatcttatgttgattaatataatgtatctcagttaaaagttaaaggtataactc

SEQ ID NO: 8408 - DNA, 2239 bp, Arabidopsis thaliana landsberg
atctagtgcttgtgttagtgtcgtgtgtaatatccaagttcaagcatgtatcatatgttgtacaaaatagtttcagcctaaaatgatatttgtggacctgtgttgtctaccgacacatttgtttggacagtggaaacaacaattctatatatattaaagcataattaagaagaataaaataaaaattggttgagatgtcgcaaggagaatgacttttagatttgttttatattgattcacttaaaacaaaatacaacataaaattcaaattttacacatattaacataaattaagttgtatgttgtgcaaagattacttagtgatattttaaagcccatgcaaaaataacttatcttctaaagaaacggcctttttcttattttttgtaaactttgacaagcttagatcatatgattgaattgcattaatggacgttattttaattatcttgaaagatctaacgtcattttcatgttaactaaatacaaaacatcttagcattcatagctgaataagaggcatagttactattcaacacttttagctttaactacaaccttcaaacacacacattttgtcgttttgttttatttaggcttcgtaatcttgtaaacagaattcacctacttcagtatttcttcttttacactacgatttcatgattccacaaagtaaaacatcaacatcattcttgatttggaagtaaaattgtgaatcgtgtatctaatgggcctggtcaaataggcccaaacatggatccgcaaataaggaatttttctccttacaaaagacactctttctgagtaagaaggtttcgtggggcctgtcgtgacctctgaaagttccctccatcaccaatcattcggcacaaaactaatatttatattttgtttcctttatttattttatttaataaaatatttatcgatcccaattttctaaatcttgcttcttctctcgttcctatatccgttttccgatttagggcaccaaattgaatcaaaatctccgcttcttcccaatttacgaaacttcacgaaaaaacttcttcggattctttttaaccctttctctcaattcttcttccagggttttctaattgggcactgtttctcttcgtcttcttcttcctccgtacgcatccttctcctttttactgttgagtgtgaacagatttaaacaacgtcatttctagggttttcggagttcaattttgttatcctactattgaatttgcatcgcgatagctgaatttaggatcctgtgttgttgctcagtcgtattagaacaactgttgaattacgcttgcgttgattgttctttttttattggatcctcgtgagttgttttttttcttgttctgaatcgtttcctggacttctgatttcctgctagaagtttatttcatggttgctgattcattatcttcttgtttctagatgaaagtttactgtgtataaaccttcaaaggatgagaatttcaatcttactttgaacaatatgtagtttatacagtagcttcgtctgttgttgcaccatggttgataagatttatgtctcctttgtttggtttattgaattcttccttttttccaggctattcatttatgagtaatcgtttattccatctcagattgtaggcggtttcgcgtcttgtcaccgaatgatacattgtctcacgtgagattgtcagtcagttcgtgcaatgtcaaaccttcatgtaccttcctattcaccttgagaatatttttagtgtgcttaggataacgtttgcttaattatgcgtaccatttctcatccatcaactcttgtgctctttcctttgtagtcatctctcaatggttcagcttcgaatttaccagatggttcgggcagatcgtttactgcttcttattctggacaatctggtgcaccgtctccctcttttcatcatactggtgggtgttattcttatcttgaccttcttctatattttgcgtcgttctgaacttatataacttctacatattcttcatgcaggaaatcttcagggacttcataatattcatgggaactataatgtcgggaacatgcaaggtacacttacatcaagaaactcaagtatgaatagtataccatctgccggagttcaacaacctaatgggagtttttccagtggaagatttgcttcaaataatctacctgttaatctctctcaggtgcatgttgtttaaaattttgtaaaagagacgtctcttg

SEQ ID NO: 8409 - DNA, 1553 bp, Arabidopsis thaliana landsberg
tgaaatggaaacatgaatagaacaaagaagctaaagtgttattgaatgtgttacctgttttaatgcttttcatgcaacatcttgatctattgaggctaggatagtactagaaacacaagaagcaaatatcacaaagttagatcttacatgacaagaatgtagtagttacagagactgagagaaattcacaaaccagaaaacaaattggacattcttcaagatcatgacagctttcatcgtctccaggatagcaaggagcaagcttagactccacaatcagttttctgagctttttaacgtcgacatctttattcacatacaaaccttgaggctttgtatacctttcttccaccacttgcctcttccttcccaacttattacccatcacaaagttttcttctactaaaccctattctcctattaccttgttaaaagcagagattctgtttcctaatctgacattaacacctaaaattcaatttgtttctacaatgaaacccactggagaaacaaataagcctaatttctaacctaaaggtacatactttaaattggaaacaacctccaccacataacctgcgcaaatggtaaattcaatataagaacacaattggggcaaaaccctaatttgagagagaaaaaccctaactttggaactaattcaattcggggctggttacataaaacaatatcaaaccctaattacgtaatttacgtatcgaagttgcaaaatattccacgaattgaaacagaagaaaccctacaagttctgataaaaaagtacggaaaaagaaggataaatcggagaagaaagaaacctgaaaacttcgagggcagaagaaaacaagagacgagagatcaaacaagggtttttgggtaaacgataagagacacgatcagaactttactctgtagagatagaaagagagagaagagagaagcaaagataatacagtgttgtgtgtctctttcgtattatataaaattcatagggaaaaaaaacagagagagagattagaacaagttctgtatctgcaaatttctttttaatatttcgacggaaaaatctcagaagagagagagagagagagagagagatggtgatgatgtggagaagctaaaagggaacaggaaacgatggagtaagagacgagccaaagaatccaactctttgcttctttcttcctctccacgcgcttctttcttcgcgtgtgtttttcattttcgtgtaaaacgacgtcgttacgtttatttatgtttttttttgtttgttgaccaaaaaaggattagaatatacgaaatcttgtgaaggcggttttgtcttaagcaccgagttggatcagaataatgtctttttttaacattttattctttaattgtatctttgtttgtcgcatttgcataattgtatagtccaatattcgtaatttaccatcaaatttattaatggaaaaaaataaagaagttagtatctttggtgtgttacgaggactcattatgtgttcaaagttttggtgatatttcataaactagattagtcggcgttaatgtta

SEQ ID NO: 8410 - DNA, 1519 bp, Arabidopsis thaliana landsberg
ttgcagaatgggcggccagtgttgttagttagaggttcagtacctcataggagataatgattttgtagatggcgacgaagacaattgagaggttcccccaccacctacagttcctctgacaatgccattagtcatgattccctcagaatggtggtcttcagaacgattactcacagtagcttcctctccatttggatgcacatgctggtgaacaaccagcatacctgacggatgagcagctgaagcattgattttgcctttcctccgatcaactagactaataccagcggccgactggtgtaacggggaagacccaccggttgtagtattagagtggtttcctagatcagatgtctggggcaaggattctcctgatttctaaggaaggtagagaggaaaaaacactaccatgaaaacaacatatataccacaaatttggtcagagagaccctaaagtcatgcaatggaaatgtcaacagagctctagggaaaatcctagagaatcattaggggcgaaaagagatatatatttctgttctttgaccaggaaaatgaaaaataaaacgacttacatatttggcaagctccagatatcttctctgaagttcagcctttaagaggttattctcttccacctggtcagagataaaaaaaataaaaattgtcacttgtcagagaaaatctatctgctggacgcaaatcacactctatgtccaaatcatccgcccaatttgcagtagaaaatgaaacgagacaaagaaattcataaacggatcctacaaccccaaatatactccttaactcatttccattccctggcattagttagaggatttcaacctgcaatttctacagctactttgatatgccctaaagagaaccttagaagataacttcaagtgatgaaatgaagtgattgagcaaggtacctctaaagctaaatgttttcagagatacagaaagtgagagaagctaagtatgatgaacacaaacctgctgcttgattgtggcttctgctgcttcaacagctttgataacttgaaacaagctatcgtttttaacgtcgttttcatgggaaccagatgattctccgagtcccactcccgaaaacctctcggcaagtctttcctcatggccgttgtccatattctccagtccccaaaagctcacgaatccgaaatcgaaccctcgagaaactgaaccaaaaacacggctccaatttcggcctactctcaaaatctcatctgggctttcgagtaaccaatcaacatttaggtattacccgaagagaagcttcgagatttcaacgaaataaaaatcgaataagaaatagaatacgagcttggagattaagaaagaatggtatgattgagaaagaatgatgaagataagtttggaatcatacaagaaaataaaaatggattttaaaaagcttttgcttcttcttcttcttcgagcaaactctttcagtttttcttctggagttgtgacctcagattggggttctcatttttctttt

SEQ ID NO: 8411 - DNA, 887 bp, Arabidopsis thaliana landsberg
tagctaccagcatgaaggaaagcaacacacctgcatacgctttaatactacatgtaattgcttccttgttagggagaaactaacaaatgctcaaatccaataatcaagttgactttgaaaagattgaaaagtttacctgtgaagcttccatatgcaatcaatctaggttgatgtgacaactcgatataccattcatcatcgatggatactccctaaggcagtgagacaaacattcattcagctaagagtcataataataataacagtaacaatattgttagtgtttcgtattacgagtacatacctgacccagtgctggtgaagttacgacagcataattttcaacagggtacctttcattcattttgaatgagcactcgccattgctgaaggaacaattgtaggatgattgtttagtatcatacaagacagccttcacatcaatatccagttccacctgaacaaacattatgtcaagtaaaacagtgtactgtggactgtgcagaaacacaacagaaaccaaaacttaatccaaagtcataacttgattataattacctctacgtccttcctcttcaagttagccacagtaagataataacctttagacttacttatatccaattgaatcataccactccctgtaaagaacttttattaactcatgataagcaatgtaatcaatgcatcttaagcaggaacttccatttgactaaccctgaattagattccatgaccaagcggtgtcacgaaatgcaatatccttcagcgacgaccgatagaagaatggcattcctataacttgagagccttaacatagtcagtttatatccctaaaaggcaacactttcaaacaaaaaaaactcactaacattaacacttctact

SEQ ID NO: 8412 - DNA, 558 bp, Arabidopsis thaliana landsberg
  unsure (1)..(558): unsure at all n locations
cattgggttgcaatgattaccatgagtaaataaaagtctttactgggagcggcatgattcaattggagagaagaaagtcttcattttattatcttgccgcacctaacctgaagagcaaggacgtagaggtaaccactactgatcaagtatttgggatcaagttttgccttttccactcttcattgtgttacttgacatgatgtttgttcaggtggaactgaatattgatgtgaaggctgtcttgtatgatactaaacaatcattctacaactgtaacttcagcaatggcgagtgcacattcaatgcaatgtcccttgatggaaattctgttgccgtaacttcaccagcagccaatcaagtatgtattcgtaaaacgaaacaccaacagcgttattattatgactcttatctgaatgaatgtttgtctcactgcctcggngcttagggagtatccattgaagatgaatggtatatcacgctcttaatataacctagagaaattgcatatgttatcggcacaagtatatattttcaatcttttcaaagtcacattcataa

SEQ ID NO: 8413 - DNA, 2499 bp, Arabidopsis thaliana landsberg
attctctttctcaaactcggggtgttgggtttcacctgtctttgatggggaagcaaagaagctatcaggcagagtattctccagacttgtctcttgccttgagcaataataaaagaagcacagataagagtggatgtgtaaccatataaaaaatacttaaagccctgaaaatgatcagaaactaattcttatcatattagccataccctttgttaatatggctattgtaaccacgttcttggctgatgttatgaccagtatcactcagaaaagctcgggttgcttcagactgatgtcctgaatcaccattacctgctaagaggtaacacggaagagggcaaaagtaaataaaagctatataaagtcaaagttcgatgtaggcaagatagacttgatcaccattaccttcgaagacttcatcactggtgttttctgatcgaaagagcatgctttgattgacacgaggggaaaaatggacgggggatccaatggaaagactacgctggtgatggagaaacgattcactgtccatgtcgggcaactgcagactcagaaatcttctcctttggaattctattgcttgttgcaggtcagcttgctcagcttttctcctcatcatctcctgtgtgttagaaaacatccttggtgctggtagcaaacaaaacaagactggtctcagaacccataacaaaaaaatcgaaagaagaggttgagctctgatgaaaccatatccacaaggggaatcaagcataggaaataaattcaactaaccgagatgagaatcaaagagatccctggaatccattccagatggacttgaaccaggagaaaagtttcctctctccatctgctgcagcagttgttgctgctgcctcctgctatggttcaataaggattattataagaaaaagggaacacaaaaagagaagaagaatatgggaaggagagacaaggcatgagcagtggtttcaacatacttttcaaggattcttcccttctccttgtacggtttaacaagcacacgtgagtcacagatgaaatgaggatttcctctggccaatatgattctcacagtttcagagtggagaaaagtgacaaacccaaacatccgtttctgctggtatggaatcctaacatcttgcactggtccaaaattgctacaagaaaacaacaaacataattagtctacaataacagagccaggcaaacattagtagacatccaccaaacttttaatgatgcaaacaaacacataacagctttgatacaattgtaaaagattacccaaaataattggagacatcttcatctgtgaaggagctgtcagctggaaatgtcaagtaaatctgtttagatgcagagttagatttatctcccatccccataaactcatccctttcatgccggcctggactaccaaaccagtaaccctcttccccaaattgtcctgctcctgatctgcaaaaacaaaacaccaccggaaacagaaaactatgaattcacatatcatagacacgaagatatcttcaatcatacttcaaacataagattgactaaagagccgtaagcaataaaaaaaaaaaaaaaaacaatcattggtatgtaaatgaataccaaaagtagtaaaaccatacgaaaacgacttcgagaagcaataattgacatctcagaccaaaacaaatctcaaagatacaaacttttccatgattcactgcaaccaacacatttcttttgtaaaatctgaaaactttaccaaccaaaaacacattctaaggcaaaaaaaaggagcttcatttcataattacctatgcgcattacgctgatgcaagagaaaattgaggcctttctcatacgacattggagaaccagtagccgccaagtactgagcagcagccattcgctgtctctgagccatcttcatcctcacaatctcctcttgctgtctagaaacataatccggcgagccaaaaccaccaggagaatcaaaatcatcacctaaaccaccgtgaaggaacctgttgtaacccccgccaccaaatccgggctcctctgacccaaaacaagcatcactggctgagaaactcctcttatgcaaatgggcatcgccgttatcagccgagaacccaaacggatccagagattcgtcgttattcttcgaagaagattcgttaagaaacgacaagtagttccctagttgctgctcatcgaggaaatcgccgtttccagtggaatcaccagcagcagcaccgtcagaagcaaaaagagacgaacttgcttgaaacggactcgaaatcatgttagggttacttccgagtgaaccaggagtagcaaaagaaggagacaaagggttcctcgaaaacccatttcccggtgaagagtgagagagagaatgacggtggatgttaatgggtctggagatagggttcaatggcgaagaagcagaagaagatccattagaagatagacctaaagcagatttagctttgagacaaacggact

SEQ ID NO: 8414 - DNA, 1871 bp, Arabidopsis thaliana landsberg
gtataagagcttactaacaacgtaacaatatacattcacattatctaaccaaactgaatatagtgtggatcaaaaggtcagaaatttatgtttaaggaaattgatgagatacgaaggttagaagtctgaaaatttgcatgcaccttgtaaaagtgatcgtacgtacgtttaatatagcctctatattataaacacattaatacttaaagggcgtacgttgtatatatagatcatagatgcatgtagtaggagttttgaatactacattattgaagtagtaaaatcaacattggttttggtgtttatatgtagatcgtcataaaacaagttgtttacaaatcattacgattccaacttattttctttcatactgtactatgtgcaacgaattaaagagatctgtagtgatgaaggggggaaaaaataaggctccaatcaagttggtttttgatttcaatcaatgtagaaataatttgtttttcttttttgtcatcattaaaatatttatatttttaggtaaattatgttttcatagtcaagtaactagtttgtgttatttccattcgatttattgtgataagtcgcactagaaatcaagaatgaatggaccgatacggatacggatacggtccatgaatatgaattatcaaagcaacgtttcaaagaggaataaatgaaacgagacaagtatcggtggggtatgtacacatatatatataaaccctaatcaccatgctctccttttgctcgataattatttcaaacatattcttattctaaggtaaaatcatgccaactcgataaaatatttcttcatattgattaactttatatcggagaatatatatatatatatattttttaagtatagaaaatagaaatatgacgtgctaaattgagctatggacaaaatcatatatgagaaaatgaatgtagatggatagagtcgtcccacacttaaggttggtccacaatgaataccgttggaggcttcgcaggcttttgttctgtccttgtctctctctcccctaaaaaaaatttgttacgaaaaattcatttgaattaattttggtcggtatgtgtataatattatacaattataatatatttctaggtttagacatttttttattttatttttcatgaagtaaagaacacaaacaaaaacccataaaataatgtaagatagataaaacaagaggatgtcgtcataaataaattggaatttggcatttaatgaaaaagggtgaaaggtgcttgacatacacgcgccgtagtttcttacccggaaagggattggtattgatgttaactagaccgggcccggtttaggctggggcggcggcgaaccgaccacctggctactattcttgtttgtattcgctgattctgcaaatctaaactcggatcttttatggacttggattttcgggtgggtggggttctgctaaagagacggcgctcttgtcattttaagtcggtcactgcaaaacgtgaaccctgtgactgtatttagagtctcgttacgttggatctctctccatgaaccgtccaaagtaggtcaatttttgtgggttcactcacgtatacaacgaagtacggcgctatttaattttccgaaaattttgaaagagacttttataccagaaaagtttgtaatccaaatttttaatatattgcagatttggttcgttttgggcttaaagagcttttattggtgtggtggctcaaatcgtttttgtaggcgtcaggtcaggcccattttcaatgtcgcttgctcatttgatacgctaatatagggctttgcttaagatttgaatgggccgtacccccatctttgcttcatgagaatgggatggtaataaagaaaa

SEQ ID NO: 8415 - DNA, 1867 bp, Arabidopsis thaliana landsberg
ttaaaagctagaagatatagatttgaagaaatagccaaaagaaaaatctctctctattgataggaagaagaaaaacagggtgtctctctttctcaacatagattggatcaccagttttttttttctctctttagatttcatttctttttttttttccagtaatcaaattaaactttgcctcttcagcccaaaaaccctgagatttttgggagaatctgtgtgacactcatttcttctttctaggtaaattcccaattactttttcggttaaagcttaaaaagtcgattttttcttgaaagtcttaaaatcttgttcctgcaaaaaatctctagctgaaaaatattatcattggctttgatttaaaagacatatctttgttgttgattgcgttacacatcttttttttcccctaaattctcgaatgttctaaaatcttctttatttaaatttgtagtttttgtaagacaaatctttttgtgggacatctctttttaagtctctgtcttgatctcagtttcatttcgacaatgtcacagttcttacagtgagttttttcttgttcttattttaaaggaaagaatcaaaaatgggtgcgcaaattatactctctgaaggcttcgaggtggttcctccgccggagatgaacgatttggtactcttcggaagcaaccaatctgtatcaagttgcgatgtatcaacggtcaccaccgaagatggcactgttttttccggtgatagttcaccgggaggtgcaactgaagaggatttccctgaagagaaacctttctctttctactttgttaagcaaccagcttacgatgatcccgagatcaaagctaagatcgatgaagctggtcatgagattaatcgatataataaagaccgaattgttgtctccaatgctcaggaatccgaaaaggtgagtctgttttttctttaagcccacttttgtttttttgtgatgattaatatgttttttttttcttgtaggctgagattttgtctctgtttggtcaaatgaagagtttggtttctaaatcggaaggatatagagtggttattgaagagaagaagatggaatttgatgctctacatgaatctctacggaatctccggtgctctactagtgatcaactttgtttttcgaaggaggagctcgatcatcttgtaatgacaaccattagatcattttgttatatagcaaattttttatttatttttgtttctgattgtagaagtgttttggtgtggtggatgcagatttatatagctcattatcagattgaacatggtagcattggttttgaggaagaagattgggtgcttaaggagactgagaaggctgatgggatagttctaagtgaggattctcttgcggagaaagaagcctccataaaccgtgtcaaggtaaactctaatcaaagtttttaactcgttggaggatttgctaaaaacattgttgaatctaatgttgtgagtttttttttgcttcatcattagtctatggctgtggaattgaatgaagtaaagaaggagcttgatgcgattacatggaagataaaccatttgagtgacaaagtggggaagagtcagaacaacctcagggttttggatgtaaaaaaggcacacatacttgaggaaagggacacatcctatgaaaggattaagatgttgagaatacaacgagacaaaggggtacgatatttgtctttctgttacttttgcttgtggatgatctcaaatatctaataacatttggtaatgcttctctttttttgcgtgtagaaagctgccttttaccagagccttcctgttatgaggaaagctagagcattggctgcttctggaatgttagagatcttgagt

SEQ ID NO: 8416 - DNA, 1634 bp, Arabidopsis thaliana landsberg
atattcattttttctaggagcacatagtcctgaccataaagtcaaatttggtgcatacagaaacccatcattctttctctttcgaacccaacttctcagtcagaatgtacggcagaagaggcctatacgtggagtcaggtaaacgagttaagattgtgatttctcatgatcagagagaagtggagtattgtcgttgacttacaaagtcaaactatttttacagggacgggcgatctttgcaagtggaagcccttttgcgccagtagagtatgagggaaagacgtttgtgcctggacaggttgtgaccacagctgtagaataggatttgacaagtaatttaagagagttgattctgacgtttatgtggacaggcaaacaacgcatacatcttccctgggtttggactcgggctaataatgtcagggacgatccgtgtccatgatgacatgcttctggcagcatcagaagctttggctgaggaactgatggaggaacactatgagaaggggatgatataccctcccttcaggaatatcagaaaaatctcagctcgtattgcagctaaggtggctgccaaggcctacgaactgggtaagtagttgtgttgcctgatgtaatgtgtttcaagtgtgaatcgcactagtaatgtaatgtgtgtgtgtggtgtttcttttttaaagtgtgaatgacaacattacacttccttatatatataggactggccacgaggttgcctcagcccaaggagctggagcagtgtgctgagagcagcatgtacagcccttcgtatcgaagctaccgctgaggataagcttaatctaatttgttatgtctcatacgactcttatggccatttctctcctctcctattcgttcaccttccacttcccgtgagatttttgtttgtttgtttgtcagcatctttaaaatcttgtgttgtaatcactgtttcccttgttgtttctttttaagtccgtaataatcctcctatggaaattgtttctctgggccatatactcgtgtatgctagtagtctcttggtagcaacatgtgattgcatatggtgtgctttccttttaggaaatattcaggatcatcaattttattgtgactgctagctagctttgttgtttttttcttcttcttacttaaatacttcaagtatggtcatcgtatacttcaaatcatcgatagctaaaacattctagtgcgtggtaatgatgagccaatatcttgattgttgagtgtaatcgtttagtgcagtgaaccaaattaaggatgatagtgaattgaaagtggtggaaactagtatcgatttcattgaaaatgtaactaagagtgaaatgacgacgacaattagaggaaggaagggaaagtaaaactaggacgacgacataagaaagaaggagagcaaaatatcgcgaaaaattaacttctcagaagtgttggttccggcgagaagaagtgaatctctttctctctcggtaaagcagcttatcccaattactcttctttatcccaaattctctttgatttcttgctacttggtcttctccgattagatcttcgaatctgtttctctcctctccgggaacccggtggctacgtcatgtgtctttctcagattcccttta

SEQ ID NO: 8417 - DNA, 1614 bp, Arabidopsis thaliana landsberg
tgggcgatgcgcatccttcctgatggttcaaaaccatcgtagcagataggagcaggcttcttggctagaagattcttcagctcatggcggttgtatgcattcctcaccaatactcctcacaatcttgtatttcatctcggcctcctcgctcatcctgaagtaataacgtcctaatcagctaaaccacaagtgcataacacgataggaaaacgcacaaacatattgataaaacatagtagaacttgaactagagtctgtgccttgttttcctgattaatctatctaaaatcacaggaggacactattaagcaactaaagcaagaaaatctatctccaagtttcagatacgagtcacaaagaaaccaaattaaatgagaaaacaaacattgaatactcctaagtcatttatcttctcggacactaagcaacggaacatgaaagaaattgaataggagatacagaagaaagtcaagaaaccactagaagattacttactgtaatccggcagccgaagaagatgctgatgtgttgatggaaagatcctcctcctttgtagatgaagctgttggcatgactctgacagaccaataagtacatgaatacattaggttttggttataaaaagtttcattaatgagagaagttgctaaaatattgccatctgagtatgcttcttgctccgtaatttatttacctggtgactttgtaaccctacaataacacatgataaaccaaaaaggagagaaaaattagaggttgcgtatgaatgtccaagcagtagatctataagtaactgatggtacctgaaacatgagtggaaagagatttttattaccttgacctgtttgagcagattcttggcgcggctgttggttttgaaatgatcacgaacaggctgcaatatgggtaaaaacagattaaaactatccaaaacctaaaattaatgacctaatctcctctaggaggtaatattataactgtattgttgcaacagaaggaaatacttacttgcagtatcttattcaacgcttttgacagagcgtccttcaaatcctttgggtgcaactggccgctttcatagtcagtggtgatgtcttcaaagcttttgaaggtcctgaaaaatgccattccaaaagttagtacttcgcattgctagataaaccgacaaagagacatgtatactgagaaaatctgaccaaagaaatatttcatggcagccattagttagagattaaacccaggaacagaacgaaaacacagaaggtccataaaaactagaaaaactcacctgttaccaccgtacttttcatctcgctcaactgtgaattcactgaaccagggtaaaattatgtgcttgacgtattcaaggcatgggttaccttccactatatccggagggcaataagctttcttaatcttcacattaacttcagcctggaagtcaaaataacacgattaaataactatcaaaccctctctgtttttaagcttagagccgaacaagctactttacctcttcatcttccatgaagatggctgatgaaggatcactcttagacatctttttctgtccttggtgaagaccgggagcatatctgcaatccgtagaactag

SEQ ID NO: 8418 - DNA, 1380 bp, Arabidopsis thaliana landsberg
ttggggaatcgtggtgaatctgaatataaggttaggtatttttctctaaccttgcagagtttgtaaaagaaagtatgccggagatcaggatcatctgtgagtgtaagctgatggataacttgtgtactctttaacttcttcagtagccaaagcccggaattaaacaaggagtttgtactgtacagataccccaagtgcggacccgaaagcgatagatatgtgtgtagatacttcctgtatggttccattaaactatctgaaagaacaaaagagatgtcaaaaacactgaaacatacctaagagtcattcaatatttaccagagttcaaagaatattaccggcattgctgttctgatgatgacattgccaatagaatgaccaacaaaactcaatttgatgcttttcaaatgcccttgtcttgcatatctatcctttttcctcttaaggaaagaaacaacttcttgagcgagcctttgtcccatttccctgaaatcaccatgtgttttctcctcatttgcctcagacatgagaaactctatctttggatctatcagaagccactgattccggacaagccttaagtccaagtgatgcccctatggtaaccaatatgagcaaatttcgatcaagcaagcgaaaaacagatcaaaaggaaagcaagttaagaaaattgctattatagttcagtgatacttgcctgaaaaccatgaacaaatacgacgatttttagttcacgggcactttgctgggagttagtgacttttgttttttctgcttcatccttgtgcccattaagcaagctagaatcaagcagatccatatgtctcaaatacgaattatcacttaaagtgcgtcttggtgcattcaagacacgttcaatgataacaataggaacccgcataggatctccaagtatatgcatgtcttgtattgaacggttgttaatctgcaccaacaaatgtattgaccaaataaactaagagttgataaaaccaagaaagggaactaaatcaaaaagagaagaacaaacccgcatctgtgcaatactccgacggtgaagttcagcacgtgtagctgcaatttgggccggctacatcaaagcaaaaattggatgagtcaggcttgtgttttcacaaaatttgataaatagagagagaacgctaaactcacttcattcaacacgcctgaggcccttttgtgcgcgctctggtttaagatatctgtcattccactatttataaaatgatggggcatttcaaccttagagtacaccatccatattgaccattcagctctccgatctttagtccagatatcacgaagatattcaagtatttttgtgtgattatccctaaaaaggacatatgcgataaatgccta

SEQ ID NO: 8419 - DNA, 995 bp, Arabidopsis thaliana landsberg
gcctggaataccatgaacaaaaacaacaatcttcagctcacgcccagtatgctgtgggttattatgttttttcgtcccactctcatcatcatgcccattaagtaagctagaatcgattctatcaacatgtctcatgtacgaattatcactgaacgtacgccttggtgcattccaaacacgttcaattataactataggaacccgcataggatcaccaaatatatgcatgtcttgtattgcccggttgtttatctgcacattagttataatcaatcaaattgtacaacttacgaaacgaacaggtaattgaatcacgaaactaaaataacaaacccgcatttgtgcaatacttcgacggtgaagttcagcgcgggtggatgcaacttgtgcaggctgcataagagaaaaaatttgaatgagtagagccatgctggcactctgataaaatttgaaaaataatcactaactagataactcacatcattcagcttcaacccagtcgagactcttttgtgtgaactatggtttgaaatgtcctccattccacttataaaatgatgtggcatttcaaccttggagtacaccatccatattgaccattccgctcttcgatctttagtccagatatcgcgaagatattccaagatttttgtgtaattatccctgaaaaggggaaaaataaagtcaatgatcagaagataacttcgcaaacattataaacctgtaggcttatttgactatggatgtccaaaggaaacttaccggtgcaatgtcagaaaggtattccatagataatggagctgggtgcccagtaagtggaatgtgcgagatagatgctccttgagaagttgtgaagccagtcatcacttgctaaatcaaatgggccattcaacttctgtgtcaaaaatgaggagaagagcttatattccaggaagattagcaaacacagtattatatatagaatactctgcagtataataaagaaaggaccctca

SEQ ID NO: 8420 - DNA, 580 bp, Arabidopsis thaliana landsberg
  unsure (1)..(580): unsure at all n locations
ggagaatataccttttttccttaagtcnnnnnnnnnnnnnnnnnnnnnnnnnnnntccatatgttatagttgcttttttttttttcgtttctgttttacttttgcagttacagtttgcttttgtatctttgcaattttttgttcgttacatgatagatttctgttaactgctataggggcatcacttagacctaaggcttatccggaatcagtggctcctaattgatccaaagatagagtttctcatgtctgaggcaaatgaggagagaacacatggcgattttagggaaatgggtcagaggcttgcgcaggaagttgtttcttttttcaagaggaaaaaggataaacatgcgagatacgggcgcttgaaaaacatcaagctgagttttgttggacattcaattggtaacgtcatcatcagagctgcaatagctggtatgttcttagaatctctcaaacaatgtttaaaacggttcgtgaatccggtttggtgttaatcattatttcccgcttatgtatttgttgcgatagtttgatggatccatacaggaagtattttcatacatatatattgcttttc

SEQ ID NO: 8421 - DNA, 1694 bp, Arabidopsis thaliana landsberg
  unsure (1)..(1694): unsure at all n locations
ctcagattcttaagaacgctgagtttggggattctatgttgccttaagctccggcactgaagacattttctccggcgaagttaatggcagcttcgaatgaagttggtgatggagaaaacagattttctgaagagagattctgacccataaatattactccctcctccgtatcatccttatcgataaaccctaaatcagggagaatatctctatgatcggaaaaggaacggttgagattggcattgagaagattgccggttgtgatgtcatggatacttggcctgcgtttgtccttggctccggagagctgtctctggtaatacttttgggcgtggctcccacttnnnnnnnnnnnnnnnnnnnnnnnnngtttctcgatatgtttctccaatctcctttaccgtacttgagtaggcctaacaagaatctcctgcaaggaacaagaaacagagcattgaaaaccctaagaaaaaggggatgacttgcgttgcaaggaacctaggaagagtgacttatatggaaagaattctgtagagatgaaagagtgtcttaacctgtgttcttcctctgtccaagggactcctttctttcgatcttgatcagatcctctagctccactaggccgtttacgacacatgtccgtgtcaaaccccaagggagaagaagctgcaggataaccaggaatgggaacacgtcctgcttcaatatcgaaaacgtcttcttcaagcttactatattgcttcataacatcaaaaacagtctttccagggatcatggaagcaactttaaaccagcgatcaggcgagtcttcagcgtatatcgcaagagctcgttcgaacatcttgttctcttctttagtccagctaccgctactcgagctgtgtaagctcaccatctcttgaacaacgaaccggtggtcagagataggtaggtgagagaatggatgcagagtctccatacctaaaaacaaaaaaagggaagaataagtttcaactacaaacacagctcaaaaaagtccattttcttgctctatgtgtggaggaagcttaaaagatagatttgtgatataaggaaataatggaagcttttatatataaggtttaatgataatatagtaggaatcaaagaagaagaaaaacaaaagggaaggaaaaatgaagaatcgtatactgagggaatcaagaacctgatttgggtaagagatttgaagcatatataaaaccgaccttcgaatctgaaaaaagactcaaagctttgaagaatttatgagaatctgcaaaagtgagtcgtcgaaggaagacaaaaacagcaaagcaaagcccacttgagagatagagagagaggagaagactcagaagctgaagaagacccagtaaagagagagagatagtgaaggaagagtaatatacagagagagaagagtcactgtagatatgggaacagagtgaagagaaaaaaaaggaaaggtttctttatttttgggaagatttggcgtatttggattggagaacagcgaatggcaccactccactcggattcttgcggttcatttttctcagaaagaaaaaaaaagttgattgatctatttgattctattatttaattctttggaatacgacaaatttgttctatcgccttttttctggtcccacggagacatactgtatggttctggttataatataaactttgat

SEQ ID NO: 8422 - DNA, 150 bp, Arabidopsis thaliana landsberg
aagagattctgacccataaatattactccctcctccgcttcatccttatcgataaaccctacatcagggagaatatctctatgatcggaaacggaacggtcgagattggcattgagaagattgccggacgcgatgacatggatactcggc

SEQ ID NO: 8423 - DNA, 1231 bp, Arabidopsis thaliana landsberg
  unsure (1)..(1231): unsure at all n locations
aaaccgattacttacaatcatcatgatagtaatgtgatcaatgatcaatctaagaagaatgttcttcatctatagggaaagtagagaaagtaaatacctggcctttcttcttcttgacttcgacactaacaagtccctttcgctcagaaccttgaaccgggaataggaggaagcaacgcttgttcctaattgttggcttgaattttttgaatgttattccaccacctgacatcacataagcacgcaaatctgatcctgctagaggagcacccataacttcaagaacatcagccgctgtattgagcttcctcatagtgatcctgtaaactttatcgggattgatcgtgaaccttgcgcgaaggtataaaccctattaatggaaaattcacagaatattgctgtgagcagtgataactctataacataagagaatgggaatgttatgacaacaaaccaaagttaacaacagtatttgcaatttttgatgaaaagttgaagactataaagattaacaaaacaatacagttttccacggaaaagatccacacagaaactatgtcatagctctgagttcagagacccactactgaatcaatcctaagttgtatctcaaagttatcagaaataagtatagagagaagctaaaacttacagcaaatnnnnnnnnnnnnnnnnnnnnnnnnnnnnnnnnnnnnnnggccattccctcagagagaccaacgaatgtgctagcgattccaaacatgaccctccacaagaaaatacaaacaaaaacagctcctgctccaaacaccaaaaggttattcttcttccaaaatgcatcaacgtgcaaccctaaagccattcggtatctagcaaaagtcgaactaacagctttgattggcttgtcaacaacctttctagcgaaattcccatcaacttttcgaaatccagagctcgaaaacaatctaaacgccgatacaaagttcatattaacacggggcttaaccaaggctacaccacaattctgcaaaccaggtacgagcttaggactgggtaaaatctgggataatcccacatttttcgaagtgggtctcgacaaaaagctgtggaaactggtcttaggttgaagctgagaaaccccattagagggaagaatctgggataagccaaagtttttcgaagtgggtctcgacgagaaggtgtggaaaccagacttaggctgaagctgagaaaccccttttgaggaaga

SEQ ID NO: 8424 - DNA, 1421 bp, Arabidopsis thaliana landsberg
cttgtgccacctaaaacggcgtctgaagatgtcaggatgcgttatcagtcaataggtttcacatcagctggtctcaacagaataacgaatggttttccaccttcagcaatggttaggttccctatagcgtgtacctcatctgtcacagctcaaaagcttgtagttatagcgttttggtagtatcatatcacacacgttttgcaataaaagatgtcattgttcatatccacttggtcctttctagaaatgatttttttttttatactccaaacaaaaagcttatagccgtctataattaaaaaaaacgacccacctggtctgaaaattcaatttttgtagacaaacaaattgattttaatttaattaactttatattttaagcagcaatttttgtctttttcttagtggaattcgaatatcgtttttatagtatatattttttttctgttttcagaaataaggtcagtggttatttttggtggtagttgttcatttagttttataaaggctattttcgttcatatatacatgcaatgatcatatataaaccaacaaccacatggcatttttaagcacgtcttcaaaaaaatcgcagtcacatatcaattatatgaacttgtacgtcattagatttttttcacatctaaaatatgaaaatcaacgtcccaattgtttatttattttccagctactatactgtaccacgacttggtatggtaggtccatatcttagataaagacatatatacgtaacatttcattttcaatcattcgcaacaaaataaatagaatacgttttgagtttatcacaatatctgttataatatatagactgatcatagtgtctaatttcttaatacaatatgcagaaaacagtagtgacaacaaagagcgtgaaatacatgccgttttggttgtcgtttttcctcttcttaaacggcgcgatttgggctgtctatgctttactccaacacgacgttttcttactcgtaagtatagtttcactgttttattcacttcttaatttatgattacacccttatactcatgccgtctctgtgtcccgttagtgttttggctttagacacattcaaaagacaaaaaggaaaacttaacaaagctatttcatcgaccccatatctttttcgatattccagcaatacccccaaaatatttttgttgttttctttacatccccaattagaccccattagtgtcaggtcatgtcacagtttataaaaaatcttctggaaacgaaaacatcgatttaatgctcaatgatttttaaaaaattgcggactccaagtctccaacattaaccaaaattttttttttttggccatttttttcaaacaattaattttttaaagaacgtgtctggttcaaaaatgcaacaactactatttttgtggggacatttt

SEQ ID NO: 8425 - DNA, 1381 bp, Arabidopsis thaliana landsberg
ttgttatgttttatttcactgataaatattttacatgaaaacaatgttttaaacatcgtattttaatcagaattctcttgttttacatttttattcataaaagatgttagtatttcaaatttgaatttattattagaatttgttagaatttatgtaatatgtcaaatatttgaattcattatcataataacttaatatttcttttttgtcggccatttttcattataaagcccaaagacaattacagaaggattagtttagtagatacaagcaagtaaaacggcccatttaatcataattgaacacgtaaatgttaggcccaactataattaacttagaaacaacaagtgtacaagacgtgtctacgcttgactttgtgtcgtgaatgtgagcaccgccgtcaatgagtcgccaaacatcaccgagagtacgatcagccgctgccaaccatccatagagcgatgtgtatccgctttccttctaccgatctctaaccggattgagaagtagcacagcttcaaaagtttttctaaaatcgccaattctgaggaggctccaccaccgactacatccaccttgatgtaaatctaaatccaattacgttcttatcttgagcaattggaggtgatgaagatgttaattcctcaagcaattggagagacagagaagctttgaagagaatcagtgaaaacaatgaagcgccaaggaattgagatcgaaacctcgctaaagcgagttagatccggatattatcggtaacaaaagtctaatgatatacgtcagaataataacttaatatataaacacaatcaaatgtacttttgcaatacaaattttttgttgaaaaagttccccggcaacatcatgggggcttataacctagtgttaaaatgagagaaacacaattatcctactctttttgttttcagttaagtgtcattttagaatctaaattttgtttaaaataattctcgatttacattttgaatatcattttatgataaaatatacatttttattcctagtgatttaacgtattgaccaataaattttgctgtcaagtatatatatatttctgtcaagcatattattaaaaaggtagaattgataaaataatttttttaatatgtgtgtcaaaaccttaatttgaaaacagatggagttatataatacgtcggtaattgctacaagagcttgaagttagcgtaacgatcagatagggttttttaatacatttgaggaaacaaatttttttatttttttttacgacacattttatcacctgagcataggtaaaagtcagagtaatggtatctccaactagactagacgcaacaaaaaaagattgctagttagggaacagaaaagggaagatggctag

SEQ ID NO: 8426 - DNA, 1645 bp, Arabidopsis thaliana landsberg
tcgatgttgtatgtattacaagtttggaaatttaaccagaaaatgatggtgttttgtaacaatgaaattctacataacttaaaaccattgaataaacctcactaaaaataagcaaagaaaaaccctatcatggtttcgtaaacgcatcatgcgagaacttcattaccgcttgaaccacaaaacagaggaagacagtgaagaacaaaaaccattaattcgttgcatctcttcgatagtcgattcttttctcttgtaaaatctaactaaaggttagatttgtgaattgttaaatctaagtgtctgctcagcataatcgtaatccttataccccataaccatgaaactaaatcagcaaaataagttaacgaaagagaaagtcactgacatacaagtttcgttatagcaagttattctttaattgtctatcacgcgatcatggcttgtaggtatcaactttctgtaattttccattaacttttacatatttctttgaaaaaagtaaaaaggacaagaaaagcacgaggaaaacgatgattgtgggtgtgtggtctttaagggacaaccaaactcgagtgttgacgaatctaagccccatcttccgcaaacttagaccccgtactagatatttagataattattagttctaataaacaacctaatactctacatttatccatttcattctcctagtttctttattcactctatctacagtgtacatttacataaacccagtgtatagtcagaactcaaaacccacatcactttccattcatagtccaataaatatctctacttttgtcaaatgtccattaaatatcttctcgtatccaatgtaaggtttcaatgtggctatttggtaatgaattggttccatttgctaatatgaagattatgatgagattcgagtaggacgagtttacttttttactcacgataatggtatactcgggtttttgtttttcccagctacccatttaaattacaattattatttccccacaaaaaaaaaaaaaaaaaaaaactaaaactaaaactgaatttacaacaataccattagagaaaccattcacacaccaccggctgagtcattgaacaagacggttcgagccatacccagcaacggctcaagagcctgcggtgaaaacttcctagcaaacagaaacggatccatccgctcaaccttagaccactccgaaccgttgattccatcctcaccatatcttggtctagtctttctaagccgcaagaccagctcaggcacgacttcctccggctcgtacatcctcgggtgaccaccgtcgttaacagtccagtccacgtgagtaagcgtggcggggacacatccacgtggatcccgcatattaagaagggtaggaaagtaactttcttcaggataacacgagtcttcccgcacgcacgtctggttaaacttcacccatatacgccgatcacgcgccaccacacgcgcgtgtctccgtttcaaaacccaaaactgagacccgatccgaaactcctcgagcttcacctccggaagcatcgcgtgtctcccaatcgccgtccacctatcgaactgccacggctcgtctctaagtatctcgatgaagctcttgcgcgacgagactaatgtcttgtaagtgaagtc

SEQ ID NO: 8427 - DNA, 1935 bp, Arabidopsis thaliana landsberg
atcaaaagtgatattagtcagatacaaggctccataaaggaaactatcgaaacacaaagattagactttaccacaggtggggttgaaatatacttcactagcttcttcacgttagatgggtatctcaaatcaaagccaagatcccttaatcagcctaaaatgtccctaatttcttttccaaatcaccacattaaaatcacaattagaacctcaaattcctcaaccttttgcaaattctagttcaatagctacgagaatcaaagagcaatcgagaataaaagtccaaaacccagacaggcaaaataaaagaaaaacaataggacaatgaaaaccgagagacaatcgaatttaagaacaaacaaaaacagttctatgaatcaagacgaacgataagattagaagaacaaaccttgcaaagtatggaatccatgaatctcagagccgataagcctaccgaaatcaacgtcggccatctcgtttcaggtaagtccaatgatcctcaaagtcccagtgaaaagatgatagtagagaaaaaaacggaaaaaaaaaagaaatactgaaaaacaacgacacgtatgcgtctctcttcagctccaaaatctctcttaagagaaacgattctctcagtattaaacctttatgatttatttttttccacaataatttagagagactgtcatgagagctccatttttctcccgttggagatgctctaagatacttaataggaaccatatggggctaactaattcaaggcccaaaataaaaataaaaaaacaactataaatgccctcttcagacctaaattaaatctgttaaaagggttatcgagtctcgctcttgtcgaacaaattttagccatgttctcatccaccatggtactctactcttatggcttttctgattcactctggtttcttatctttgtttctcaattgatggtttcttcacaagtttgtaagaaaagtacttgcaagttagttagcagtgcaagtgtttctgatttgatctcctgtactttttagggagcgaaacggaataacattccaaaactgaggtaaattgagaatttggtatgtgtaagatgatgcatgttttcagatgtcacgttgatagtattattattattgcagtgacgttgggaggattaaggttacgggatatgacactggtcttccgcttgatgatctctacacggcgttggcagaacatttctcttcatgtggagagatctgggagatttatattcccttaaaatttgatgagactaatacgattctcaacaggttttggtggcttcttcctcctccatttctttccaactcatcagctcaagttaacgtgggaggatggaatgtctctgttgaggcttatccgtatccggcaaacgcaaacgagtaaacactgatttcttaaaaaaataagatttgttgataataataatgtttatcatctccggcaatatcctattactgcagtaaggttattgtatagagttgaaggatatgatacttcgcttaggaagagtcaaatctcgagggctttggttaaacttttctctccatatggaaatatcatacgcctccattttgtcaaagagaggtttgtgcgcttctttcttccatgttacccaactttcaatttatttaaaattattactctttaacgactagagacttgtgtattttgttgatcatttttcagctcagttagagctgttgttcacggaaaagacgtagctgataccgtgactcaacttaatgggagctacatgcgaggacgcaaattaactcgttgggtgactgccaaaccggatttacctatacgcctcattcgccgccgcgtcaatttcagtaaacctattcctactctccaagaacgagacgtcatgtgtgcaaacattccaaataggaagtaaattaacttttctatcct

SEQ ID NO: 8428 - DNA, 1917 bp, Arabidopsis thaliana landsberg
agaaattatggtaaaatcactggcgatgtcgatgccggtgtatgcaatgtcttgcttcaaattaccattgaatatcgtttcggagattgaagctctcttaatgaatttctggtgggaaaagaatgcaaagaaaaagggaataccatggatagcttggaagagattacaatactcgaaaaaggaaggtggtttagggtttagagatttggctaaattcaatgatgctttacttgcaaaacaagtatggcggatcattaacaacccaaattctttatttgcccgaataataaaagcaagatactatagagaagactctattcttgacgctaaaaggcagagatatcaatcttacagatggacttctatgcttgcgggtttggatgtaattaaaaaaggaagcagattcattgtcggagatggcaaaaccattcgaatcagtcaagataattttgttgcgtcgcccctccatgacctctcaacgtcgtcactcctacgttggataccacggtggatacgttaatctcaactcatggttcgcataggtattggaacgtacatctcatttctcagcttgttagtcccgacgaccaccgttttgttatgaaccatcatctttccaggacagtgcatcaagataagatagtttggaattactctccttctggggattatacagttaagtccgggtattggtttctctttaatgacccaacgaatactcaagttagaccagcggtgccttatggttcagtgaaaattaagaacaagctctggaaactccactattattccaaaaatcaagtacatgctttggcgtacaatttcaaaagcattaccaacacgctcgcgacttctcactcgaggaatggacatcgatccacactgccccagatgcccaactgaagaagagacgataaaccatgtattatttacgtgtccttatgctgcgtcgatttggagtctatcaaacttcccttggttaccgggtcatactttctctcaagacacagaggagaatatttctttccttatcaactcgttttcaagcaatactcttaatacagagcaaaggttagccccattttggctcatatggaggttatggaaagcacgcaataatcttgtgtttaataagttcaatgaaagttgctcaagggttgtgacacaaactgaagcagaagtcaatgaatggttacaagatgtgaaccgaagagaggaagcttccgatttaacacgatcatcacagagggcaaacgtgcggtggaagaaaccggtgtttcctttagtaaagtgcaatttcgatgcgggtttcatgggtaataatactcatagtacaggagggtggatcatacgtgatcatgcgggattagcgaaggcttggggatcatcaatagtccaaaacgttaccactgctttggaagcggagacaaaagcgttattaatcgcaatgcaacaagcatgggtacgagggtataagtgtgttaagttcgtaggtgattgtgagatccttatcaaggcaatcaatggtgcaaattctagatgtgaaataaccagtcttctccaagatgtggatttttgggcatcaagattttctaatgtggttttcacattcaccaatagactttgtaataatactgctcacctcttagcttctccactttattcgtgttacaggtttcaatcgaattctggttatcagccactttggctcaagaactcttttcgtaaagatttactcatataaatcaattctgtttgttggaaaaaaaaaatatataaaatctaatttaccacaaaaacgaaattatgtattcggtttgggcttatttgaaaaggtcagagtttagattttatgattaaacgaggttaaatattgttggggtttacaaagtacatgagagtttaagatttatgatt

SEQ ID NO: 8429 - DNA, 1296 bp, Arabidopsis thaliana landsberg
aggcttgacgttgatggtgaagaatttatggttacagagaagagcatggatctcattaggacggagccacctactgtatgcttcatctaacattgtttgtatatctagatctgcaccaaacaatcaacaatgtcactaatcaacaacaaaaaaaaactccaggaaacatttaattacaagttcctgtatctatggattcatctaatatcttttcaatatcatatgaattaagaatgaactctgagtatactgagacatgctcttcaacgattctttacaaaaaaaacgaatttagcagattcaacatcaaagtattttctatattcgattggccaacctaaatgtccctggattcttattccaaatcaccacattaaaatcacaaagactctccaattccataactatctacaaattctagttcaacggctacgagaatcaaagagcaatcgagaaaaggaagtaaaaaaactaaaacccagagacaatcgaatttatgaatcaagacgaacgatcagcttagaagaacgacaaaccttgtaaagtatggaatccatgaatctcagagccgataagcttgccggaatcaacgccggccatctccggtttcagatacggccgatgatccgatgaagaagaaccctaagaaagtgaaattacaagtcgatggagtagtgtaaacacagaaattgagaaatcagcaaaatgatgagagagacgaaaaaaaaatccgatttcgagctcagagtttttattaaataattttttaagagagaaatttgttaaaagataaatttgtttgtgactcttgtgttgacgattcaacggaactggtacattatgcgttaactcgcataaaaacaaaatattctttttttaccataacatttatttttattcacagtttacaccctgaccccctaaaacatttgatatatgttttcacaaaactaatttttatacgtattttataacctttataagatttttggtttaaaattaatggatttattttggaattcgattaaaacttctctttataattatttgtatttttcaaatatagttttgtaaaattacatcggttgacctaattatacttcagtactgaatttatgctttaatattatttcaatgaaaataggtacgatcattgaaaaaatgattcattaagtaccaaattgatagttcgagaactctgtagggtaaatgttacaacaaaataaagaagcgggccaaagtgaatgaagcaatttcacttatagtaaaaaatagcatcctgcaaatgtgcacagt

SEQ ID NO: 8430 - DNA, 1720 bp, Arabidopsis thaliana landsberg
ttcatcttttgacatcttctttttaggcaatgaatcagcagaaagagatgtacttttagaagttatggtctccttttttcgacccattttctcaacgcttgtatcttctttctcatggtcagaatctacctgatttttgcaagtaatcaaaataagaaaagacgtaagcaatattttctacagattgtaccaaataaaagagagaagtaaccagcaatgcccaaaataaacaaacaactctaaaagaaagcattaggaagcacaaaaatagccaacaattccttaatcatgtaaacacacgaagaatatggtatgaatgcagataaaagtacctcaatagcatctttagacagcgaagattgaaaactagctctccgcatccaactaggatcatcatctgaaagaaaacaaccacaagcaatttataagtggagaagaaactaccctttggaatcgaatatcatcatgacgcatatattttaataggtcatagttagcctcaccagaattagcatcactggatccaaattccaatctacaaggttgcttcgaagaatcagcatgtacaggttcatacttctttgaagttccaggtccaggactgtcttcagaatccgattcaagagatataactcgtttacctaatcagattccaataaaacaaaaaaaaaactcagcgaaacagtaaaaccctaaaaaggaaactgaaagactcatcatgaatcacaaaattgacaagtagaacagtctcccccaagtataaattcctctacaaaagaaactatttcagcataatcgtcggcgaactgaaattaacaaagacggattgagagatttctcgattgaggacatcaacttaccggaaaacttgttttcgcggcgagaagaaactccgattccagaaccaaaggaagacttgaggacagtgacatcgtcagagagaggtgtctcgtcgatgaacaacggagtagaagcagatcccggcggttgcttctgcagtgatggttcggtatccaagttcaaatccgtgggtataggattctttcgagccctcttcgacggtggtggagtagcctcatcctcgccgtcagagatcaaaatgaaatcgctcattgagtgagtgagagagagatttccagtttgaatttggcaatgaaggcgggacgggactaccgataaagaaatcagtgagaaacgcgattcgtcagagtttcagagcaacatttttactaacacacgattaacggctgagatttgtttccttttcttgcttatgtaacatttttctatatgggcttttctcattctcagtgagatatcttgataggttacttagctcagcccatttttaaggcctacctacagaagactgtatgtgaagctcgaggcaaattctcaatatgcaagtacatatttattgggcctaaaaggagagtgacgttgactattacacttacaatttcattatgtaatgaatacttggtgattcgatattgttcactattgatcacaacttcacaagcatgaaagcatggttggctgaatttgataggaaaaaaaatccagtattcataacttctaggataaacaagtgaaacatgtagtaaaacattactaatctacaatatcagaatatattcttacagattacttaaatataaataagctatttaagagatatcttaagatattagaattaatccttacaacctttggtagt

SEQ ID NO: 8431 - DNA, 805 bp, Arabidopsis thaliana landsberg
ctcttctgattaagaaagatcaatggaaaccaatcttcgagacgaagtttggacagatctcaaccgttcaaatcggcaatggatgcggtggaatgggaccttacaagatacattccataacgttggagccaaacacaattttgctccctcttcttcttcattccgacatggtcttcttcgttgactctggtacataataaactgtttaaatttcttcggtttggtttacagatcagtttcggtttaggtcaaaattggattgtgatttgtataggaagtgggattctgaattgggttgacgaggaagcgaagagtaccgagatcagactaggagacgtttacaggctacgtcccggttcggttttctacttacagagcaaaccggtggatatcttccttggaaccaaacttaagctttacgcaatcttctccaacaacgatgagtgtttacatgtataagtttgatatgattctttcttttttcactttcttgacatctttttcttcttcttattgtatctgtattccatggatgcaggatccttgctttggtgcctattcgagtatcacagatctaatgtttggttttgatgagacaattctccagtcagcttttggggtatgtcttaatctgccgatgaataagttacgaattgtctatatcttacttgggaagcaagataggaattgtgtatatcttacttcccaacttactctagtagaggatattttgggttgattaagtgatatattaaattcaatggttttaattaggttcctgagggggatatagagctgatgagga

SEQ ID NO: 8432 - DNA, 1315 bp, Arabidopsis thaliana landsberg
ggtcaactctagaggatcccctagcgactttagctacgtcaatttttcaatgcaagtattcttggtcttacattttcgggggcattccaaatttttcatttagtaaatgtatctggcttataatcgcgaccaatcttgacgcctaaaaacaaggcggaccaatcttgacgacccctaagaaactgacggtaaaatgttattgctttgtgtactgtcaaatttatttttaaaaaattgcgagtttggaattctaattcaaggtataaagtttatttgataatttatacgtcaagtttaacaacaacaaaaaaaaagattatttatacgtcaacattatgataacatataagataacaaattattcgtttgtaaacagttgaatgataaataaatggtatacaacaaaatttcctaattagaagtcccaattaccttttacttcatttttctccatttttgacgagtttcaagaatattatttatttttaactagctaatctcaaactttgcaggtaatatagtgaatgaaaattatagatccactgatggctagtaaaacaaaataatttgattatttaaaataagaacacaacatttgatttcgtcataaaaactaagttgaaagctcaagtcaagctccaaatttttcttgttcctaatttttgtgccgtagtgaataaatccacgaagctcacatctctttgccaccctctcgtgacaatactaaacatttcaaatcattcaatctaaaaaaacaaagaaaaaaaaaacagttgagccgttgcgtccaatatcccttttagaatggcctagtgtggcggcctctagctcgtccgcacataagagcgttctttggtggtggatattcatctcggtacgaagtagaggaagtgtaaactcgaagatagaattgttgccccaaatactgtcttgcccaattctccgaccttatgttccacatcccaacattatccaacgctatgtagatcgctgtccatgccctcggatatacttgaacggtggaccgtgaaaccgcgtcccgcaggttgtactttgctcggcttccgggagtccattgtcctccatccatactgttatccaagaaaatatgaaatacatcaaacataattctaatatcaaagttcattaatggatctaaactttataaattaaaatcatataagtaacatcattagtattagttgaaatgatttgtttatagagaattgtcttcttacccgacgacgaagaaagagtaaccggagacgtgccaagactggactgaatttcccagttttggaaaacaactcgatga

SEQ ID NO: 8433 - DNA, 719 bp, Arabidopsis thaliana landsberg
ctcgatttcacgagaaagaaatgaaatattttttactcaatacttttagtggaagcagcttcagaactatggaataaattaagtttatactatatatgtacaaatatgcaacattttgttttactgcgttttggatcgtccagcgactttaggggcgtcaaattttcaatgcaagtattcttggtcttacattttggggtcattccaaaatttcatttagtaaatatatctggcctataatcgcgaccaatcttgacccctaaaaaccaaggcggaccaatcttgacgacccctaagaaacggacggtaacatgttatatattgctctaatttattaaacttagggagtagaattttggtttaaggtataaagtttattagataatttatacatcaacttcaacaacagcaacaaaaagaagaagaaaaatataatttacacgtcaacattatgataacatatcacataacaaattattcatctgtaaacagttgaatgaaaacaaattgtatacttcatccaaaaaaaaattgtatacaacaaaatttcctaattaaagtccatcaatttacatttaacataatttctcttccattttcaaagtgttatttatttttagttagctaatctcaaatttgcaggttatactgaaaattatagatccagaaaaactctacactgatggcttgtaaaacaaaatatttttttactttaaata

SEQ ID NO: 8434 - DNA, 1955 bp, Arabidopsis thaliana landsberg
agatctcatagagaacataaaagataaatatccgaaccgaatgcaacacgaaaagccgtacacccacccctaattttgggtgtcatcttttgctttcttctatggaaatgggtggcacaaacaatcaaaagaaaaaaaaacccatacaatttagtcattatatataagaaaaatcaatgcatttagttacacaattcctaaataacattgcataaactttatatacataaatcttattgagacactcaaacactcacaaacaaatccacaaatactaataagtttctgcaagagcccttacaacacatacgtccagcttcgtagagcaacaatgcaatccaaaactacatccatatatagataaagaagacggtaattacgaaattgttatacttacatgaccgatcttgggtctcaattgttgaagaaaagtcgtcaaattaggaatgggaaagtttctgaacgcatccttagaaagttcatgtgacaatctctcgaacaagccagtcgagacaaggataagcgaagtagaggatgagaaacgaccgtagagccaacaagaaagtgactagaatgtacatcgccaatatggctgcactggtcggtattgcatagagtattatcagcagaaatatgacaactaatgggaactttgctgtcaactggacaaagaaaaccagagacttcctcagtgaagtttgtatgttgtcccttggaatgcgatgatcattaacagaacgtgatggttcaggttgactgcgatgatggcgattgtggagacatggagatggagtttcccttgtatgatcattgtttccatctgtttgagctccaccaggtgagttacgtctctctccattcatcctctcgaccatccaaagcacaaagtagttcttgtgagggaatctgagtgttcctctgaagaccagacggaaagacaaaaggttgcaccaggggcatgaaatgaagagaggaagctgaaccgggtgagtaggcaatttcacaatagcccattgaagtcccaaaatgcagtttttacacatcgtatgtccacaccataacacatacggaacgttttcaactatattaaatgattcccagcatataggacactcgagaccttcgtctttactacctacagaagatacatcgtcatctgaacactccgcatgagcatggaccggtcttctgatatcgtttttcggtccaatgtttcccgtaagataactcgatgctagattccacattctagtatcagggatggataacatgaataccttgtttgtcactaagacctaaccagttctgctaatacttaactctctgaccttcatgaacaccgaactcgatgcttcatcgcttcataagcaaagagaaaacacatattaatccttcaaagacaatcccaacgacacaccgatgcaattccaactaagaatcaactaataagattaagtgctacattgagcaaccatggtaacacaaatcattaagaacctactatacagcaagattcaatttttatgatcagaatcgatattcgaacgctttaacttgtattagagctcaaagctcgacaatttcatcgataaaggggactcttttatctttgagccaagtttactcaccgatgcaattctaactaagaatcaactaagattaagtgctacattgagcaaccatggcaacacaaatgattaagcaactactatatagcaagattcaatttttatgatcagaatcgattattcgaacgctttaacttgtattagagctcaaagctcgatcatttcagcgataaaggggactcttttatctttgagctaaatttactcacagatgcaattctatatcagtagcaaccaactaataagaccaagatttagtgatacattaagcaaccatagcaacacaaatgaataaagaaaacctaaattgaaagtttcaatttttat

SEQ ID NO: 8435 - DNA, 1871 bp, Arabidopsis thaliana landsberg
cgaacgagtttccatgtttatctttaacttttctttctggaccattgggtttaaaatgtatcattttggggattcttgtttgccttggatatggggtgtaacctgcttttgtttctcactagtccatacttgtatatatcataaaagtaaatgtgtctctctctttgagaacagttgaagatgcaattgtcaaaatgtttggtgattttggacaacaaagaatgatttgttatgttctatctaaagttctgtttgactaaactatgtttggttaatttcaggtccacaagggccacaactgcagaaggtactggaaagacttactgggcaacacactgttcctaatgttttcgtatgtaagtagtttaatccgtttacatcgatcatatcttcattgaaactctgttttccttatatatcctacctgcttcaaaagatgaaacctttagatgtcccaaagaagtgaacaacatagtttcagttaatagctagtcataacagtgtctaatctttgtcctaatgagcaggtggcaagcacattggtggctgcacaggtactttcctccttctcttctcacctctttggtttcttctacttctcaaatgtgagatgcctcagttttggatattgtttcactcaactattggcattatcttcttgttcttgtgctacagatacagtgaagcttaacaggaaaggagatctggaactgatgttagctgaagccaacggtaaaaacggtcagagttgaggagatgttgaaactggttcggagatttttgcatacggagcttggaaagttttctcatttttgttattatcattgtacctcatttgaatacaataattatagttaataaataacatatacatatcatgtaattgttgatctctctttgtttttcaccacttgaattcacagttttcaagccttcagagtaatccaaatattaccaatcccaggctgataaataaagaaggaaaaaagtggcctaatatatattctagaaaatccaaaatcagagagaagcgtggcaagtttaggatcacaggtcaatagagtgaaaaatgatcccaaactgaaaagagatgtcatcttctgaaacaggggaagttgcagagaatctagcgagaccaatggctactctggtctcgtctccaacttacatctaccattgtcatattagtaaacaagctctttatcaggcaaaagaatcatactctcatcgtagaatttcccgtcataatcacagagaaagactcgatttttctcatagaaaccatagattgacaataactagaaagcagcaacctttgtctttcaacaccgtgtgttttgccgcagacgagccctccgaaatcaggtaaacttcgacttcttctaaccttattaaattgggtttcgtctttagatttgaatgaattatggtttaggttctatctgtgtcgttgttgaatcaattttagtacttggtaggtttatgctcattgacatgatgaaaggttaaaactttgaatgcaagaatgttatctcacaccttgtgtaatgtcacagctaagttatctctgtttatggtttcagtgctgatgctagaatccgtagtgaggttctgtctccgttcagatcagtccgtatgttcttctacctcgcctttatagcaagcggttcattaagaggactaatagccacttctaggctcataggtgccctggcgaatccggctagatcaggtgaagttcttgagatcgttaagggtttgggagttgacattggtgctgcttctctctttgcgttcctatacttcaacgaaaacaagaccaagaacgcgcaaatggctaggctctcgagggaagagaatcttgcaaactc

SEQ ID NO: 8436 - DNA, 1723 bp, Arabidopsis thaliana landsberg
aggttcctttgtttgcttgcatctccatcttgactttaaatctgtttcattcagaaacgtttgtattagattcttgttctgatataaaagtctcaaccttttgcttcatgtagccacttgaagataatgtgaaagaaaaactagctcagttttgccatgtcccggtaagattctgccttttgtctcatgttgttatgttctttacttgaaatctctttaattaccagcttacggttcttgtttcagcttgagtatatcttcactctctatgatgttcccaacatttggcgtattcctttgttgctaaaggtatcttttctcaactaaaactatttgtagttattacattggtttttataaatcattaagacaacatatttacttgtacaggatcagaaagctcatctggcaatctcaaaagtgctcaatcttgctaggtatgtattgtgtcttgttttgtcttttgttttcttgcttgatttgcgactgaaatggattggaactgatcttgaattgtttatgaaacagtattcttaatgagccttctctaggggaatggacttccagagctgaattatgtgacaatttacatgtgccggtgggtctcagctctcagttactctttagaaaccgtaacctgtacatatatttcttaacgcatcaaattattttacaggtgagaatcgctgttgtggggaaatatacaggcctctctgatgcttatctctctgtcttaaaggtagatattactcattacctctcagtggatagtgtctggataacaaaatgatttccttgcctcggttctcacatttggataacttgtttaggctctcttacatgcttctgtggcttgtcgcataaagctcgtagttgattgggttccagcttgtgatctcgaaaaagaaactgagaaagaggtactgtgactgtcttttgattacacaactatgtttttacttattcacagatcttaatgcagagtcattttttgttttgtttcgtataagcagaatccagatgcgtataaagctgcttggaagttgctaaaggtttgaaacgtttgccattttacaactttaatcatgagaagccttgtgttttagctcatctctattggtatcttcttcagggtgtagatggaattcttgtacctggaggttttggtgatagaggagtggaagggaagattcttgctgcaaagtatgcacgtgaaaacaaaatcccgttcctcggtatttgtcttggaatgcagattgctgtcatcgagtttgcacgatcagttctaagcttgcaagacgcaaacagcacagaatttaaccctgaaaccaaacatccttgcatcattttcatgcccgaggttcttagattctctgtttctatacttaaaatgtactttcgttactgtctttcttgattttaatatattttcatgcttggtgggtttagggttctaaaactcatatgggaggcactatgcgcttaggatcaagaaaatccatcttcaatgtcaaagacagcaaatctgcaaaactgtaagaaccattcatcttatatttaacttcgttggtcctacagatgaatgctatagattacttagcatgattctgtctacctggttcttatagatacgagaacaaaagctttgtagatgagaggcatcgtaacagatacgaggtatggatttgtatacacattcatactaaccagtgaatatacaaaa

SEQ ID NO: 8437 - DNA, 395 bp, Arabidopsis thaliana landsberg
ccaatcatagaagcagatgaaatcattcgaacacattgctaacaaggttcctccaaaaatcttctcagctgagaaagtaggccggatactcttcctttcctgaaaacaccaccttttattaatataataagccagtaatagctgtctctattgcaagcatctgcaatttcttcaaccctagaatcatactccaacaaaatagtatgagtaaggccataatgagaatagcaaacctggaaatttttactgaatatctttatctttgatgagctttctctaaccgcacattccccctcagatgaccaaacaaattccaggccagacccaaaagatctatttctccacgccaaagcagtgtagattatgtactctccatcaccgcagactacgacaaa

SEQ ID NO: 8438 - DNA, 2055 bp, Arabidopsis thaliana landsberg
gttgctaatatctaaaggtcaccgacaaggcatgtcccagaaatgtgtcgtatcccttgattcgattgagggaatgaaactccaacaattaggaattaaactatgaataagagatcatcaaaaacaagcgatacaaattactttagaagcagcttaactttcacattcagagttcagccaaaaacaatcgttgaagagtgtaagaatctcgtctaaacaaaatgcaagatagggagagagagagggcacagctagatctcagctttaatatccacgccttggaggacgctcttccgctacattcactctgattgctctaccctccaagttctgtaaatcaagagacaatgaaaggtcgattaagagatacatcacaaaatcatgttgactgcattagcataaccatatatgaggaagagtagggtacctgtccatcgagggcagagatggcttcgttgagttcatccacgtcagacattgtgacaaacccgaatccacgtgaacgacctgtctcacggtcgtaaaccaccctagcttccacaactttaccatgctcactgaaaagctgttctagacggccattgtccacatcccatggtagattccctacatatactctgaatgcaggttcatatacccgaggcgcacgttctggacgtgatcctcttggagctgccttgtttacagttagtagacgtccgttaagatcctgaaacacaatgaaaataccaacacagatattcagcaatgttctcacagacagaatcaaatgttagagaatccccaactcaactcatttcccaaaaacaattccacacataaaatgccaaagcttccatattcgattgactaatagaaacagagaaagtgtgacaaatagtaacatagaaagttttggataacagcattccatagacaatagaaaactgttttcttagagcagaaaggacgaaatcaaaggagcaatatcccatcacaatacatgctaataactcagaaacagaaatgattgaaagtttgaaccatataaacttacataacggttgaacttctccacagctgtctcagcttcgtccacagaactcattgtcacaaatccaaacccacgactctggtcagtttccctattgtatataaccttacaaccacaagaattcaaagaacaagtcaggactaacaacattatctcttgaactaaataaaaaagagagaaccaaaagtataatgtcaacagatatgaattcaatccacggaattctaactctcaaagcagagatgctccaaacacagtcatcaggccaaagaattctacttttctcatccattagactcatagttgatgcaaattgcaatgcacaaaacacacataaataaccttaagcaatgcataatgaacaacatataaacgcatcaagacgaccatatgagcacaagaagaaagcagctaaattcacctcggcgatttcaacagtaccggcttgctcaaagagcatagccaaagcttggctattaacatcataagccaaatttccgacgaaaagcttggcttcttccgatggctccgggaactcagctctttcgctcacagctccttcgctcacatctccttcgctctcatctccttcgctcacatctccttcgctcgcatctccttcgctctcatctccttcgctcacatcttgtgactctaaactgttctcggtctcctcaacagcgacgcttccttctccaccttcttcagcccaatccgaagtctgggcaacgaaggagacaaagggggcattttttaaggtcggctgtggttctgatagacagagagacgcgcgagaaagataggggcaggttgacgcgtccggtaaggagggaaacactggagctgaggattctgtagtaagagatggtacaggagatggaaggatgggagagaatggtagaacagtaataatcggccatggttaaaggcttccagctataggtaactataaaagaaaccatcgatcaatggttagagcatacgaacaacgtgcaactggaaggagaaaatagaagcacacc

SEQ ID NO: 8439 - DNA, 973 bp, Arabidopsis thaliana landsberg
cctaacccttttcttcatcgccactcaatctttctctctgcaacatcctctcttgtaacgtgtaacttgccaaccttttcttttttattaacccaagttcgttgccggccattaccaattcctttatcccatgatctcttctctgcttccttcttccatcacattccccaaaaagtctcaacacagagcgagaagaagactcaggttttgcgagaggagagatagagagacttagaaagctcggtaagtccgaactttggtggttcggcggctctacgtcgtctgtaggtcgagtcgtcctggagctcgcccgttgtttctcgacggcggaggtggaagacaacgaccgaccagccatggacattggcggtccaaccaatatccgccacgtggctcacgttaccttcgatcgcttcgatggcttcctcggccttccctctgagttcgagcctgatgtccccagaaaagctcccagtgcaaggtttatatatactttcttcttcttcttctttaaactcattgagaattggttttgagagatttagatttcatatcatcatcttgtttgtgtttggcagtgcaacggtgtttggggtatcgacagagtcaatgcagttatcatacgactcgagagggaactgtgttcctgtgatactgttgctattgcagagccggctttatgatcaaggaggcttgcaggcagaaggagtattcagaatcactggagagaacagcgaggaagagtttgttagggagcagcttaataaagggatcatacctgatgggattgatgtccattgtttagccggtcttattaaggttcttgttgtgattgtgaatcaccttacctttgtttttgaaaatggtaggcctgagtttgattatgtatgtgtgaagcgggttcaggctttgggtcagagagctcgccgagaggggtacttgtttcctttgccatcctcagcaagatgatgca

SEQ ID NO: 8440 - DNA, 1486 bp, Arabidopsis thaliana landsberg
aatatggttgtccatatagacctgaagcctgagaatttactattggattcgaggtgtaatattaagattgcagactttgggttgagtaatgttatgcgggatggtcattttctaaagacgagttgtggaagccccaactacgctgctcccgaggtatatagtttagtaaagttactgaattgtttttcacctatgtgactatgtctcgtttctcttatgagtgtcttatctcttacttcttgttgtaggttatatcaggtaaattatatgctggacctgaagtagatgtatggagttgcggagttatattgtacgctctattatgcggtactcttccttttgatgatgaaaacattcccaaccttttcaagaaaattaaggtactgtacgttatactttgattcagctaaaagactcttcttaaatggattcatatgtatgtgaagtaacttatcaaggtgttttttttctctttagggtgggatttacactcttccaagtcatttatcatctgaggctagagacctgatcccaaggatgcttatagttgacccggtgaaacgaatcaccattcctgagatccgtcaacaccgttggttccagactcatctccctcgttatcttgctgtctctccaccggatacagtagagcaggctaaaaaggttggtttcagtgccatttggagattaatagagttcacttgctgtgatagtaacaatatctcttatgttttgcagatcaatgaggagatagttcaagaagtggttaacatgggatttgatagaaaccaggttttggaatctctacgcaacagaacacaaaacgatgtatgtagtttcctgtctctaatgcttttaatccccgaaactagtttccaatagtcactgaaatgccatttgctccttgtaccaggctactgttacatactacctgttattggataaccggttccgtgttccaagtggctatctagaatccgagtttcaggagacaacagtatgtgtttttctttcctctcagtagatagctttccaacatttttgactaacatgttcaccttttcaacgttactcatctaggacagtggttccaatcctatgcgcacacctgaagcgggcgcttcacctgtaggccactggattcctgcacatgtggatcactacgggttgggagcaagatcacaagtccctgttgatcgaaaatgggctcttggacttcaggtttgttcctgattactgattctttttgttcctcaccataaagtcttctgaatgcaacacacaatcagatatctgtactctttgcctctacatagccaaatcgataatcattctgttaccttgttgttttgaacagtctcatgcgcatcctcgtgaaatcatgaatgaagttttgaaagctcttcaagaactcaatgtgtgttggaagaagattggtcactacaacatgaaatgtcgatgggttcctggtttagctgatggtcag

SEQ ID NO: 8441 - DNA, 692 bp, Arabidopsis thaliana landsberg
caaacacaaagcaaaacacataacacaatgggggcaccaatggcctctttccttgtcttagcattctcccttgcttttgtctctcaaaccaccgcaaattacttctactcttcccctccaccaccggttaagcattactctcctcctcctgtttacaagtccccaccaccaccggttaagcactactcgcctcctcccgtttacaagtccccaccaccaccggttaagcactactcgcctcctccggtttacaagtctcccccaccaccggttcactactctcctcctcccgtagtatatcactccccaccaccaccggttcactactctcctcctccagtcgtataccactctccaccaccaccggttcactactcacctcctccagtcgtataccactctccaccaccaccggttcactactcaccttctccagttgtataccactccccaccaccacccaagaagcactacgaatacaaatctcctcctcctccggtccattactctccccctacggtataccattctcctcctcctacagtacaccactactcacctacacaccaaccctacctttacaaatcaccacctcctcctcactactagaatacttaatcggctctaatgggaattattatttctcatactttacaatgctacacttcaatcaaatctagtaaacctattat

SEQ ID NO: 8442 - DNA, 844 bp, Arabidopsis thaliana landsberg
aaagagaacgccatgaaacaattcacaagaatatggcttctaaaacaaccttcaccgcaaattctatcagctaatatattatctttttccttttctcattgatcttcctctgctttgtgtcgttgacaatggcttaaataatagtaaaaacaaaaaaacgatctcattttacatgagtctcagttcgtactcaccagccatggttatatatctcacccatggatgtgcctggtacccactcttctcaatgatcttcaggtatcgaacctgcaatacccataattaacacacatcaggttttgtttgccttcagatttcaatgcagtaatataaaaagaatgtgatctatatgataataatgtatcattgtgagtaataccaacctgtattcctgaaactatgaattttgggatctcgaatttgacacggattggagcttttcgctcaggcgttgcttcctctgcggctatacttggaagatggaaatctgctttcaatgtatgctcctacattgtttcaaaacttaatgtaagcattcgactttacatggtcaagtgttacattaaactataagaacttaccttgttcccatagaaatattgtatcttccagaccagtgcatctttctcaggagcatatgcggccgacccgagagatgttcttacatcggggttatacgcatcagttggtacaggtaactcaatctcaacacttgttgcatagctgcagaaaaaaggaactcttatcaaaacgcgttaaaggattccagtatttcagtatttcaggtaatggttaaacgtgttaaagtacattttgtacttaccttctgtccttgattggcttc

SEQ ID NO: 8443 - DNA, 625 bp, Arabidopsis thaliana landsberg
caggtaagcttgtgcttaataataaatggttactgtctcttccacaatttcatatatttaatatatatgttctttggtgtgtaggttcggtacctaaagattattgagaagagtgggtaccaagcacttccatgggtgagatacataaccatggctggtgagtacgaactaagactcgtgtaaggcacatttagtttcatcgtctatgtcaattgtgattcccacatccctcaaggaattgcctgaatcaaagaagcaaaacgaaacaggacaaaagtagagggaaaagaaaacgttttgaaacattttagctgatcaaattttcctttaatttgttttagaagccatattcttgtgaatttgtctttatggtgattctattttattttacatgaggctctctgtaacctttcacgacatggttcattattttcctttagactgctacatttctgtctatgtgttcgttctgcgatcaaaattgttaaacgttgaggttttggttttggtttttggggcattcgtctatgtttacataggtttctctcgagttatgatcaaaatgaaactacataaacaaattatgctttcatagagtgaggtgagagagccttacaatagagag

SEQ ID NO: 8444 - DNA, 1432 bp, Arabidopsis thaliana landsberg
cacacatgcatgctatgatttatcatgtgtagtaatatagtatgagaggccaatcacataaactcttaaatacaatgatattggacatgttatgttttgcatttcaaacaaaacaaagaaagaagaaatgtcgttttttgtttgtataaatccaggaataatggttttggtttttagacgcaatagagacagtatcaccattttcgttctgcacaaacaaataaaattaaaattttgatacattaaaatatggttagaacttagaaaacaaatttatttaggttcataggccagtgagtctctctctctctatctctaaaagaaagagaagcaaaaaagtaaggaatgtttcctcgcaatcatcatcatcatcaccatcttcgtcttcttctttgaaacctccagcgacttcctcgtagttctctcacttatacacttactaatacagagtaacagagagagacagagtggactcttcttagagtaagatgggaggtgtgacttcttcaatggcggcgaagttggcgttttttcctccgaatccgccgtcgtacaagctggtcagagatgaaacaacggagctttttctaatgagcccttttccccatcgagaaaatgtcgacattttgcggctgcccacgcgccgaggcaccgaaatcgtggccatgtacatcagatacccaatggccgtcaccacccttctctactctcatggaaatgctgccgacatcggtcagatgtatgagctcttcatcgagctcagtattcacctccgcgtcaatttgatggggttagtaaatctcccagatcagatttttctttctatatttagctcaggatcttgctcagaaagtcctcgccttttttggttttgctctgttttctggatttgtgcaagtagatttgaagcttctagatgcagaattttggtcttagtgttagagagaagtggactttattaagctgtggatttgtgattcacaaagcttttgaaagtttaagttgcagactcataaaatcttggatttttgctggaagagtttgtctttagggtttgtctgaatcaggatctctactgatcctttatcaaagagacaaaaagtagttttgaggttgagatgtttgagtttgattgttgacacttgacaacaagtggtcttgggcaaacattaccatttctagaaattcaagatctgttattgtttctgtttctaaaggcaagtactgaatacccaaaatgtagttctttgatgtaacaactttttggctcattcaggtataacttgggattctgggatagattggtttctcaaattagtacgctatttttttctgtcgtatcttcaagtgaacctgaaattagtagaatttacttctgtaaggttatgatttccatcttatgacattggaaaatcctctaaatatgttgtga

SEQ ID NO: 8445 - DNA, 1368 bp, Arabidopsis thaliana landsberg
tcattaatgtatgaaatcattatgcaatgagtacagtaaacatcaaaaccatttgattttttaattgtccagacgtttaacttcagtgaagaatcctcataccaacttaaattgctcaccaatcgagatcaacgccttaatcagtgttgaactatttcgattatttaatttcatcccctattcatgcaggtttacaatctcaacaataatcgtacaaattccctcaaaatttgcggcaaggaagaattaggagtcggtaatctaaaagcatgtctacgattcaccggactaaacaaccaaatacattcgaaattccattcaatagaacgcagaaaacgaaaacccaaacgatcaaaaattcgcgagtaagagaattcggtgagagagagatgaccttagacaactcgtgaagtgcattttctctgagttcgggattgctgagatcgagaattaactgctccgccgatgatagcttccgatcgttgttggaggaagaagaaggagaagaagctcctgagagggcgacagatttcatggagagcggaggaggaagattagccattagagccccgtcaccgtttacacgcgccgcagagagaatcgctacttgtgacagtgaaaggagaagatgtatttataggacctaaggggggcgtgtatgtcacgtgcctcgcttgctccgttacgggatttgttcaaatctaaatctcacgtgacttgtgaaaaaaaaaaaaaactctcacgtgactctcccgtgcctcacacaacttaagattctgaaagatagattataagatttacatgattcacattatgacttagctaatgtagaagacaataaaaaaacataggtattttgatatcaacaagccaaaaaaacacacactatatctactttgtttgtggcgccaaaataaactgatttaatatctttatttattgcggtacaataaatagtttaaccgtatatccttttatttttgtttaacatgaatttgtcgtgtcactcggtgtaacatgcaaggggaatatgtggctccaaaactcaacaagtagtggtcgattggctaccgaaactaattaaggtcaatgcaataattttattgacaaacaatctagcatcaacaaatctatatacagtcacaaaattagaactagatacaccatattgtccttataaagaaaatatatcttaccgttttaaaactaaaatcagacaaaattctagtacaaaaccttagacaaccaatctaccacttcacatccaaaagatcggttttcccaagtttcttctagaaacaaatgtcacagaataattaattgtgatttgataccaacttaaaacactctaaacccaaaatttatata

SEQ ID NO: 8446 - DNA, 1415 bp, Arabidopsis thaliana landsberg
aggtgtgtttctttttgggcttgttgatatcaaaaaacctatgttttttttattgtcttccacattagctaagtcataatgtgaatcatgtaaactccatatatagttgattatactatctatctttgagaatcttaagttgtgtgaggcacgggagagtcacgggagagtcacgtaagattttatttttttttcacaagtcacgtgagatttagatttgaacaaatcccgtaacggagcaagcgaggcacgttacatacacgccccccttaggtcctataaatacatctcctcctttcactgtcacaagtagcgattctctctgcggcgcgtgtaaacggtgacggggctctaatggctaatcttcctcctccgctctccatgaaatctgtcgccctctcaggagcttcttctccttcttcttcctccaacaacgatcggaagctatcatcggcggagcagttaattctcgatctcagcaatcccgaactcagagaaaatgcacttcacgagttgtccaaggtcatctctctctctctctcaccgaattctcttactcgcgaatttttgatcgtttgggttttcgttttctgcgttctattgaatggaatttcgaatgtatttggttgtttagtccggtgaatcgtatacatgcttttagattagcgattcttaattattccttgccgcaaattttgagggaatttgtaagattactgttgagattgtaaaccttgcatgaacaggggatgaaattatataatcgaaatagttcaacactgattaaggcgttgatcacgattggtgagcaatttaagttggtatgaggattcttcactgaagttaaacgtctggacaattaaaaaatcaaatggttttgatgtttactgtactcattgcttttgatttcattcattaagcagttcttctcactgaaattcatgtctaatcccgtgtttcattatttcagaagagagagatctttcaagatttggctccgcttttatggcattctgttggtaccattcctgctcttctacaggtactctctcctctatgttattatatggcacttgtcctttattcttcaggggaaatgatttattgatttatggcttctctatatactgctatagttttagcattttaacttttgagatttgatgtacattgtattgggtaagatctagtcattttctttctttcctcttttcaggagattatcgcagtttaccctgccctatctcctccaaccatgactcctgctcaatctaacagggtgtgcaatgcacttgctcttcttcaggtgcataaaatattgtcaatttcctctttcttttttggggagacttacaaacgtttatatatgtatgttcaatttggaagactctaatttttattgattcgactctttt

SEQ ID NO: 8447 - DNA, 1525 bp, Arabidopsis thaliana landsberg
aaaaactcctaagatctcaaaatatcctctctttttttattaatacttgagaatcataaacctagaattggagccaaagacaaaaccacatcaagtagacacagacctcccagagtctttgtacatcataatttacatcaataaaaacagctgcagctattgactctacaatgtcagcaagaatctttggggcttcactaatccaccatacagaactggatcatcttctttcctcaccgcctctgcgaactctttaacctaatattaaatcactcaaatcattcattgactcaagacagtgacactctgtttctaatgattcaagaaaataaagaaacatacctttttaaatagagaaggattctggagtaaaaggaagtggtggagattgagattgacggcgacacgagcgaacttctcgttactaacatttgcagttcgcaagtcacgcaactccttgactttgaggttagggtaagtgtggcggatgtaattagtgaaggcgacctcaagaatagagtcgccgaagaactcaagccggtcgagtaaaggagatttttgtgttatagcttccttgagaagagtcttgttcacgaaactgtagttcaagatcttctctactgcttctactgaattcatctccgacgaaaagctgagttagtacgtcatacaagctggacctgtcctaaatatacggtgaactattttttaatgttttaaacccctgacctttattaacaacatgaatttaaacccttaactttatttttgaaaaattaaacccttaactttatttttgaaaaagtaaactcctaccagtaccacaaacccaataacaacaataagaaattaaggactaaagtagcaaaaaaaccaaagacatttgcctgaaactagaccgagcctcttcttaaattctaatttgaatacactctccttagaagccaattgtggttattggcaaatattaatcaactttgaagtttgggtaacaattcaaaacgtaaaaagaaaagaaggactactaaagtgaactaaataccaataagtaataaacgcaaaggatgacaaaaaaaaaagtaataaacgcaaagatactgtttaaaaccctttcgccgtctcttaaacctcttcccttaaccgacttcgactgtgtaaaatcttcagccagcgaagcgactgtatcaagcccagcttcaatctccttcgaatctcaggttctcttcttcgattttcatcttcaatctccttttgaaatcacacgaaaatcccctcacaatctcttccacaaatttccggtactcgtagagtcgttaggtttacttctcttactgtttcttctctgtaaatcacaatgcttcgtcttcaatcctcaaaacgactggtttctgggaaattctgggttttatttgaattttgatgaaattgtggaaaactaggattcagtatttgggtttttgtggtttaattgtcttgtgattatgatgtgttgatgttccttctatttcaccatagttagcttgaa

SEQ ID NO: 8448 - DNA, 1657 bp, Arabidopsis thaliana landsberg
  unsure (1)..(1657): unsure at all n locations
aaagctttattaacagattcttttaaaaacagagactgagagattgggagaggcagattacattaactctctttctctctctcactttctcatcttgttcccaaggttaaaaaacaattcgaggacatgtctttcctattttcagaggagagagccatcagcaccgaatgttgtcttttcactctcatcaaacttctccttccctatcttcatttcctcttctttccagagccgatggtaaggagctcgaagtttctaatggcatcctcatgcccaggccttgctgcagctgcagattcatagctctgtnnnnnnnnnnnnnnnnnnnnnnnnnnnnnnccacttgaaaatagtcggcttgagtggttctcgcttggttcagctgatgagccaggtctggtgcttgatatcacacctctctttgaggtacttccatttcgagactcgtgctgcaaatgaagccagcaaatcaaaacacacaaactttctcatgttctgattccctacttattctgagaattactttggatcattacaacaagagaaataacaacacaaactaaccacttccttggcagaagagggtatatcatcagaagatctgtgtctagagcgatcaccaagagcgccttggcttgaaacatttcgtctggtgaatgcctcaattgcacctgtaaatcttcctcgcaggtcctgtccgactaaacagaatagggaaagaagttctcagtttgagatcttccactattcaacaatttaattaaatctctggacacaaattcaaaatcttctaagggaaacaacatatgaatgttaatatctgaagggtcaagtgagatagtgcacgtttttcagcacccaaaattgtcaacactgtctcataaatttacaacttaaaataaactttttgatatatctctttgtattcgtccctccaatataagagacagagaacatcaatgtacctgtaggcttttcagctctttctgcaggtggtcctggagggtccaacgctggtcttggagttggctgttgtaaatgatagacacatagataacaatagcaggataagattttggattattcaattgttctgagacttggttctccacacgttaaatcaataatagaactaacccttggtctcgaactagagccaatctgaggatacttcgagattgtccaatcaaacacataatcaagctgataacctgcatagtccattccattaaatgcgtataagaaagctagagatgattcttttaatcccactagactgcatagaccataaacaatctaataatagagagtgaatagagaacaaacaaagcaagaagtttcaaccttcacgaatgaaaagatccctaaaaagtcttctcagatatgaataatccggtttgtcctcaaatctcaatgaacgacagtaatggaagtacgatgtgaactctgatggatacgacttgcaaagagtctgcaaaaacgtaaaatcatgctatgtcagaactactggacatctgaaaacatcatctgcatacataaccttaacaatgatgtacctctacagaagtaagcatcatctttacactaatcttgtcatatttctgcttcttcgtaccagcttttaaaccttgccacggaagactgatacaagacaaaa

SEQ ID NO: 8449 - DNA, 545 bp, Arabidopsis thaliana landsberg
ttcctcggtgttgagaaaaaaaacgctatgtacgaccactttcagctttcaaagtgagtgactagagccatcagcatggggtgtttttcaagttgtacaacaagatttgtcaacaaagtctaaaactttcttttattcgaccataatatgactgactaggcacgttggttttcgatatacagcttaaaaggttggagaagatgactagatgagataggttttcatattttacttccacatcgaagttttagagaacagaaagaggagaaaattgaagtacacatgagacaagttacactttaaagctttattaacagattcttttaaaaacagagactgagagattgggagaggcagattacattaactctctttctctctctcactttctcatcttgttcccaaggttaaaaaacaattcgaggacatgtctttcctatcttcagaggagagagccatcagcaccgaatgttgtcttttcactctcatcaaacttctccttccctatcttcatttcctcttctttccagagccgatggtaagga

SEQ ID NO: 8450 - DNA, 1383 bp, Arabidopsis thaliana landsberg
taccaaaaatcctactgattcctatgctaggtgaaatttgctttttattgcagttattgtgtgtgtttctgggattcatatgtgctccatacttataactttaattaatgtggaacagattcatgactgcactctacaacttacttgatggtacatctgataatgccaagtttgaagatgactgccgagcgataatcgggactcagtcttatattctcttcacattggacaaactgatccataaattcatcaagcatgtgagtatttttgctctttgatgttttctctatgtattcacctctctatctttacttgctttttactaacatacgtgtggtcattcttcagctacaagtagtagtagctgatgagatggacaacaagcttcttcagctttatttttatgagaaatccagaaggcctgaaacgatttttgatgctgtgtattacgataatacccgtgtcctcctccctgatgagaatatttaccgtattgaatgtgtaagtttttgctgcatcttacattagctacttatattctgtcgatgcactgctgatcatgcttttggactccaaaacctcatgtgtatgcagagattatcaaccccagcgaaactctctattcagcttatgtgcaacggtcttgataagcccgatgtgacatctgtatccattgacccgacctttgcagcttatctccacaatgacttcctctccatacaaccaaatgcaagggaggatcgcagaatctatttaaataggtaaatgtaaaacatgaacaaatgactgtcccttgatctctgaaacctagtgggtcactcatcaaagccaatgccatttttcgttttctccaggaacaagcgcaaagtttgtcgtgaagatgaacagttatacagcacagatgaagttaagatcaaaaatggtttggagtgtaagatagcttgcggttcttcaaaggtaacacttttatcttcttccctatatcacgcttaccgcttatgagtatatccatgagagaccagcacttgaaagcacgttcttgaaaatctcttgcaggtctcctatgtactagaaacagaagatttgttggtgcgagttaaaaagagaagaaaaactttgtgccacaatcaggagtcttgggtaaggcaaatgaggttacaatattacaaaaagttcttgtgaccagcctgtaacaatctggaagaaggataccaaatcaactcaacttgttcattcactctccaacttaacagagacaaaacaaaaacaaaagtggcaattctccattgttgacttcaccggatagagaaaaactgcattctctatcttcataagaagaagaagcaacaaaggatttggctttttgttgtctgagactgaaaa

SEQ ID NO: 8451 - DNA, 607 bp, Arabidopsis thaliana landsberg
tggttccaaatctgacagtgaccaacaatgcgttttactgcatatgagcctgaaatgcatattatttgcattttatactaatttaaataaataaaagataccaatgtttagtgtttctcattttgatcgaaatggatactcaagtcatatgcagcattttacagaaaaagagaagcaaaaatatcatgtctatatataaaacaaaaccttgaaaccaaatatattcaaccaaatcttaaaacaattaacaaaacatgtatgtaaccaaaactttgattattcaaaatactttaccaaatccatcgtgaagttcaacattctcaaacaaacaaacaatccacagattaaatatcatatatgcccttctcttgaaatatcaaggcactcattccgtgagagtagtggaagacaatgccatatattccacatccctgagcgactcaacgtctctgccttggaggcttttacattggaaatatgcaacggtgtaagtcacaagctgaaatatccgcaccgcaaagaccaaacacacaaggacaaaacctgtggttaaggtaaccgctaacgatcttcccatacgcaacgccccagatttgagctaacccgg

SEQ ID NO: 8452 - DNA, 1837 bp, Arabidopsis thaliana landsberg
ttccagagaatcgaaagaggccactttttatatgtgcatttatcatcatgattttgttaaaaagtaaaaaagaacattacaaattattgttatagtcacatgaaatgcaataaaacccctatttaaaaaaaaaatataacgacaattgtaacaaaaaattctattatagagagttttatttgcttcagtttatatcacgtgtctctgccattcacaattttcttacgaaacgtattaaataatttatatattttgtgaattaatacaaattttatttaaaagacttacgaaacagccaaaaataaaatatataaaattaatcatttcaatttctaataaaaatatcgaaatgtcgcagattttattttcttacataatgctttttattcgcaatattttttcttaagcatttagtagaagaaaattcgttaaaaagagagataaataaataaaaataatataatcgtccttttgccataagcgttgctctcaaaaatataaagcaaactcagatctcacgattttcttcttcctctcacattaacacacatcatcatgagattaccaacgacgctgctcctctttatcggagctctcatcttctccggcgccggaaatgtcagatccgatgcctccgaccaccgttacaaggatggcgactccgttcctctctacgccaacaaggtcggcccctttcacaatcccaggtaaatccaattctctaatctcagttcctttgtcggtagcttagatctgtgattctctttgatgagtgataaattgatcgttgcaaatttctgtagaagcttgcgttggtattgaatttttgtatctgaccttgaaaaaattcgattcgtgttcttaaaatgtgatagatcttcgattgcattgttatatgactgatttttacttgtgtttgatgattgttgcagtgagacgtatcgctatttcgatctccccttttgtattccaggtacgagcacgctcaatgttgtctctgttatgtgtggtttttcacttttttcggatttgtgtattttggtgtcaatatgcatttgttttggtttgtgtagagggtgtgaaagataagaaggaagctcttggtgaggttttgaatggggataggcttgttagtgctccatacaagcttaactttagagatgagaaagactcagaggtgtactgtaaaaagaagcttagtagagaagaagttgaacactttcgaagagctgttgaaaaagattattactttcagatgtattatgatgatttgcctatttggggattcattgggaaggtggacaaagagagcaaatctgatcctagcgagtttaaatattttctctacaaacacatccagtttgagattttgtacaataaggatcgggtgattgaaatcaatgctagaatggatcctcattcgcttgtggatcttactgaggataaggaagtcgatgctgagtttatgtacactgtgaagtggaaggaaactgagacttcttttgagaaaagaatggataagtatgctatgtcttcttctcttccacatcacttggaaatccactggttctccattattaactcctgcgtcactgtccttcttttgactggtttccttgcaaccatcctgatgcgggtcctcaagaatgatttcatgaagtaagttttgaatgctaactctttgtgcttgactcaccgatgcacacttttgtttccaaacattaacttttcccccaactttcaaaggtatgctcaagatgaggaagctgctgatgatcaagaggaaaccggatggaaatacattcatggagatgtcttccggttcccaaagaacaaa

SEQ ID NO: 8453 - DNA, 2432 bp, Arabidopsis thaliana landsberg
attcaacattctaacatgccgctgcgatgaatgatgatttagggaggagacagaatcaggggattcagggttcgagttttgtagcgaggagtggagatgggaaggatgttcttcgtctgaagaagggtttgatcatcaagaacctctcgatcgcctcggttactcttacttgcagtatttcgagagatgtacaccttactctagagtccctctcatggataaggtttgttccccattcttggagtttgattccagaagcactttctttcattgttttatgattccataagtctctgtctactttcagatcaaagagttgggagaaagatacgtagggttgaggtcattgaggagtgttgatctgtctcctgcgagttggatggctgttgcttggtctgccttttcttctttttcttgtttcagaaaacaaagttaaggttaatgtagtaaaatggtgacgatgtttgattgtatgtgtaggtatccaatctatcacattcccatgaatagaagcataaaagacttgtctacttgcttcctcacttaccacacgctttcttcatctttccaaggtgcattttcactttcctcttggaagtgtgtattaatgtattagtacattcattccccatttctaaagtcccttggcattggaacagatgtaaaaagggaagaggagaaggagaggataagtgtgagtgcatttgggatggccacttacaagatgcaagggaggctatgggataatgatagattgctatgctatttgagcgcagcagattcttggctaaagcagctaagggtccaccaccatgacttcacctacttcaccactactcctcattatctttgatatatgtagtgttttagatcattacttggttaacagtctatttagctttgttgtttaagagtagcacatatcaataatgttggattgttgttacttgggactctttgggaaggataggtactgactttttcttcacaagacttttatatcataaatttagtttggggtcagattgatgatgatgggctcaatacatttattcttttctaatgttttgtggctttctgtttgtacaaacgcacgttctcttgattttggtatccttctctttttaacaattttctaaatttcataacaaaaaagaagaagatatatacagagatatatattgatttacataaaagattattacaaaaatctctagaactttcgacatgatatttagatatatttatgttacaattatctcaaatttagtttcttagcctctagaataatattctgatattatgtacttactaggaattatttatggtgttttagattgtttctgaagatacctcttaaaattggatcatgttttaggcttctttcgacttttgtccaaatttaataaattggatcattggcccaaaataaagttggttcgtcttttttatgctcacccctaactaaaattacaccaaaaaaactatactgtttctaaacattatcacattatagtattatacacaacaatattaactcataaaataaaaagaataaatgtgtgccttaatattcacgaattttcttaagaataatactcttatagagattttagtagattttcttctgcacccatcttcttttttgccactagaaaaagttacataaaaactgtaagttgataaataaataaaactgtaaattccaacaattagtttggattttccacctgaaatctttatagactatgtttattcctcacaataaatagaagatatgaagaataacatcacgcatagtcgatatgcacgtgagataatatgttgagatttagttaccaaaaaagaatgattttgtctgagaaatgaaattcctctagttgtgaatttttcaaacttggtcggtcttgtgagttgagtatctttttgaggggaggtgggaataataataagcaaaaatatcttaaaaaaaagcgaaagctgagtttgaccaatcaccgacccggaagattgaaactataattagtactacgtttggttgtcatcaaaatggtcattcttatggttatgggatattatcctttgccgcggctagccgaccattacaccaacatcatttttttttgtctccattcaatttgcataaacctcttaaattatagatgttttttacagtctaatcttatcttttaactttgtaagtggtgtcgccttacgaaaattaaagcttggaaaataactaaataaagttgaaggatatgaactaatgaatgccttcaccgtccaaaaaaacagagaatgccacgtattcgtacggacgttaatgttttcatctctgcgcgttgtgtttttatgtgaaaatatctctctatttttcatatgctcattttcttaactttcttattggccaatgaattggagtaaaagcaaag

SEQ ID NO: 8454 - DNA, 1671 bp, Arabidopsis thaliana landsberg
gggaaaagtctctgcatgataaaaaaactacattgtctttttttctaattatgaaacgatgcataaaaatagtttgtctgcacgatggtttactagatggccaaataaaagtgtgtttcgcatcattgatttaactagtaaaaagatccttacactgtaattatcttagcttaaataattgaattttgctataattaacttcaaatcaaacgtagatagaaattaatactgaagtcatacagaacccaactccatatcaactaggtacgagtgagtgaaaatggatgaggccagtaaggaaatgcagtggatcttaatggaccttcctctgtgtagaagagagagattgtctgcatggtgatatcgtaaacaccaaagttatgtcccgcgaaatagatgcaatttggcttaagacctggagacgagcttgctgggacacacataggttcaccatgtccaagaaaaatacaaagatctccaatattttcagtgtaatacatatctttgtgtcttttagcattttcttgctctttaaacaccaagaaccgctttgttttgtgcacgactgtgtcggactcaaaggcgtccccgtagtacctttaaacacatgagagagccattaaggaatcagctaataggtgtctacttataaaagaaattaaagaacaagaaagtatatatgtagtgtaccatgagatgaggaattgttccccggaaggtgactccactagatgatctgtcctggtaaacgaattcatctcctccaactcatacaacatataatgaggaagatcttttttgtcaattatatgatacgtgggctcgtctttctctttgaagttgagaccaaatgagcacatccaatcgcttccaggagttgaagtgtaaaatctttgctctttcttagagtacgtgagacttgagtatgggcatatacactcatgcccatgcgtggtttcgatattgatccaccttaagtctttatgcctatagagcataagctgagataccgaaaacttgatagcaacgacccaatcatcattttttaggtcaggaagagaggtcatggcaatgttttggatttgagagccttttggaagaggaggtagatgaacagaaacagattttgatttagggtcagagggcttgtaatagatgtttagacgaacgttgtccatatcacggagggatgtgttttccttcatgtgaatattcactccactttgattcaatcccatactcattgcctcgcagacttccccagccaaaaacttgctcttaattatgatttcgttttcaccctctgatccggaccttctagatatcgagctgctaccatttgaagaacctccgatcttaaggaggtggtcaattaacaaaaaagggtagattggcgtagacgaacaccatctaaccaagttgttttttctctgtcaaaatgtaagtacgttgaactaatcatacaaaaagaaattaactagtaaaaccctaaaataaatccccaattatagtagaatataagaattagaaagaaaaaacttacaaggacatttgtgtagacaaggggcttcaagattcgtatgagagattgagacattctttacaatctttaaaactatgttgaggtgaattaaagtatgggtcttctctagtctctatagagacttatgc

SEQ ID NO: 8455 - DNA, 853 bp, Arabidopsis thaliana landsberg
tcttctctgatttagaacgaacaaaatgtttttgaaatttcttaagtgttgcttgacgtattttgattaattttttctatatatgatattatttttgctaaaactgtaaatatcaaatattttatctaatggacacactagtttttacataatctcatgtatatttttcaatatagtttttttttagccaattaattatcacccttactccatatagtcgtctactaaaatacacctatattatatattgtcctaggctcctagcaacataaatttccaccattgagcagtttcatgcatatcaaaatatggatcaaatcatcaaataaatgcaaccaacctgattttttcatcttttatttctgtagacaaccttgttaacgtaattcgttcataataacttcaaatactaataatttcatcgtagaaagtgttctttcaaataaagcatataaaaaatacaacatgacatcatattaattaggagtgagcgaaagtggatgaggccacgaaggaaattgagtggagcttagcagaccttcatcggtggagaagagatagcaagtttgggtggtgatatcgaaaacaccatagttatgtcccgcgaaatagatgcaattaggctttagaccaggaatggtgctcgctgggatacacaaagcttcaccatgtccaagaaaaatacaaagatctccaatgttttcggtgtaagacatgaattgtgtttttctatcggctaactcttctttctctctaaacaccttgaattgttttgtgttgtgaatgactgttaactctttgtaattaaagttacactcgtccccatagtacccttaaaaacacatgagagagc

SEQ ID NO: 8456 - DNA, 1327 bp, Arabidopsis thaliana landsberg
accagtcctgtgtctgagtcttcacaagttcatggctttgatagagatattgcctgattacgcacgtgtcatggatgatgggctatacagagccattgatatgtttctaaaggtaaagttgttcttttatcccttaatatggaggctgtgtctctgtttttgcaacattttgtattgatagagtgtcaatgttctttgtgtctctggttaggggcatccgtcgctgaacgaacaagaatgtaagagtctctgcaaattcatagacactcagaaactttcacaagaagcatgcaaccatgtggctcagaacgatcggctgccgatgcagatggtggtccgagtcctctactcagaacagctgcgtatgaagaatgtaatgtccggagagtcaggggaagggctattgctgtcttctcagaaacatagtagcgagaacccgagccgagctgtgtctccgagagacacttatgcctcactgaggagggagaatagagagctgaagctggagatttcaagggtgagagtgaggctgactgagttggagaaggagcagattttgatgaaacaggggatgatggagaagtcaggtcatggtggaacattgctgacctcactttccaaagggattgggaggatttcgatatttggtggaggacctacagaagggaagctgcggaatgctaaccgcaaatccaagtcaaggttggagagaaaaaccgttaggagccgaccagagtctatgttttaggtagcttagaacatgtaaatatcatatgcattctcaacaaaatggggtggttcttgagtattctatatcttatgaaaaatcttgcaagtattgcattgcgattactcaaaaatattttagaggaaattgagttaaaaagggcataactcaatagcttctctgcagtttttatgtatcatttttttcagcaattattctctcttgacaatattgtaaatttgaaaaggatgcgacaaacaaaaaacagttgatctctactaaaaaagtaacaatccttgagagtgtgacaaggccaaaatgtgtcacttattgagcccttggcaaaatattttaaacttggggtgctgggatcatgctctggaggtttcaggagctccaacgaggcgcgtccggatctgcagagatgagaagaagagttaatgggagagattgggaatgaagagaaaagaaaaacattcctaatcgaaaagaccgaacctggggaagcttctgtctgaaggcgacgtcaaggcgtgcgtctaaagtgttctcgcagacaatcttgccgtcttgagaggccagcaccaccccacccgagct

SEQ ID NO: 8457 - DNA, 2233 bp, Arabidopsis thaliana landsberg
aaagtatgaatcttcattctcattcactaaaactgataagctctccagtgtttttaatcttatgatctttaatggtctaggttatcaagtccggagatcattttgttctgaaggaggatcctagcattcgtctgattccacgcgtttataaaatgagcaaaagtagaggaaatgtcgtaaatcctgatgatgttgtattagagtatggtgcagattctctacgtttgtatgagatgttcatgggaccatttaggtatatctcaatcccaaatttgttttttcgggttttctcgctttctcaatgtttatatctgccttcatttccttctactagggactcaaaaacttggaacacgagtgggattgaaggtgtgcatcgtttcttggcaagaacttggagactagtcattggtttgtctcagtctgatggttctttcaaagatggaaccttagtaactgatgacgaaccaacccttgaacaactccgaactcttcataaatgcattgcaaaggtcatctcatccccttatgatctctttgcggtttgtttacatcttacttaaaataggtatgtaaaatctgcaggtgacagaggaaatcgagagtacacgattcaacacgggaatttcagggatgatggagtttgttaatgcggcatataaggttagtcttagactcttatatcggtcagctttgtgttttcactttacaagtactgatcttttctccggtttcttcttttactttgacagtggaataatcaacctagaggaatcattgagccttttgttcttttgctctcaccttacgcgcctcacatggctgaagagctttggtcgcggttaggccatccaaattctctggcctatgaaagcttccctaaggtagagatagtgaactgaacatataaacacaacacaggaaggtgttttgcggtactgattgttgtggtatttgtgcaggcaaacccggattacttaaagaacacaactattgttcttccagttcagataaacggcaagacaagaggcaccatagaggttgaagaaggatgctctgaagatgatgcttttgttctagcttcacaggacgacaaactcaggaaatatctagatggacaatcaatcaagaagcgaatctatgtgcctgggaagatcctcaacgttatcctagaccggactaatgtcaaggtcactacaaagtaggatttagaaagaagaaacaactacaaaacctgtcaaatgaacaaaattttatctctattgagagtttccattatatagaaaaagattcttttagaagcaaaagatctgttcttagataacatcagaagcaacagttccttctttccatcctccttgccgagctcgaagctcccacatgtaagaaagtcttctctgttcatctagagttgcttctgctttctctctagctagctcacatgtttccatccccatactgcatttatcagcctctttctgatactgagacgccgctttcttagcatctagcagcaacctatctgcacgccattcgtcttcttgagcttgtgcttctcttagcttcagctcttcagctaccatttcagtaaaactactctcgctctcttcactcccttcctcgtgcctcatgcaatcttggcaatgaaacaagatccaaccaaaatgcacgtgaaatctgcgacgttttagcattcttactaaatatataaaaagtttaccagaaaaatactcacctaagaaactgtgattgcttaatcctgcacaagaaacattgaatcaaacgtttcaaaagttgggttttgtgaccagggaaagaagaaaggaaagacaacgataatgatgatgattaccgtcgggaatggagaggagaggctgagaagaacaatcacatacacaaggaggacaagaggagtggagagaatctgcaatggtctcattgagatgccaatacagagacggtcctgcaatatatgcgacaatacacagtcccattaccactgttaccaccttcgccgtcttcttctgccttctggtcatctctctctatttctttctctctgcaaattaatggtgtcttctcttttgtttgaatcttagaagattctcagtaactgttctccttgaaatgtcccccaagtattggatcctttcaagacttcacgcatcattagatcctatttttagcagatgctttgcaattataaaatttatgtcataattctgtttgactc

SEQ ID NO: 8458 - DNA, 2176 bp, Arabidopsis thaliana landsberg
agttttattgtaccgttttttcgtacagctctttttttataatttttcactattacgaagaattttacaattgcaactagcaggtaaaaattttgtaaagttttgtgttactaatcggactctaaaaaagtaatttgttggtattttattgattgaagaatatgaaaaatatattttatacactattggaaacccaatttttttatttgctttttaagaactaaactcaatcaatatacatattaaaatacaaataaatacaggacacctttctaataatttgtttgatattatacagagtaacataataccaaacaagtaattagtttttttatattaaaaaatagtaattagtttgtttttatttaaggacctaaaaatcattctatttcaattagaaacacattatattccattaattatatagaaaataatataatgttgcggggacgtctatattaaaaatgatgtatacaaccgaaatacacatacaaaaggccaaagaggaaaacaaaaaacgcccaagagaaaaacaacactttggaatatgacaacaattattaacaagaatatatttctttcaattttaacttaagagggtaacgaaatcttcgagaatttatattgggctccacactattcagtgtgttcactatctctttcgacgttgggaaaagtggtcatcatcatcattatcctcatctttgctcatgcaccattaaccgtcccttctagattcttgatttattgttcgatggcccctctttgattttcattttgttaatgttatagattatataaaattgttttataaatttaaaacaccactaaagccgtaatttgttgcactatcaatgtgttatacgtacaccatttcctaccgtttaatttgttttgtttgtgtcgaataatatctgatctaaccgctaattccatgatccataatgaaagtacaatggtccatcattgttcgaggctgccaagatttgtttgtttatgtataaatatatttcccattcaattgctctgtatatatcctatacaataatacaatatatgtgtatatataagtttgatatatgctaaaattattcgtccatatttgtttaataatatattcaatttgctgtagtcattactcattttgttatagtatttgaactcttaaagtatttgaccactaaggaaaatttacttcccaatcaaccactaatatcataatcgtgtagattcagagattcacttgttaatatataattccaacaaataatttaagctacctacgaaagaacaagttccattctttttctttttttggttcacacaacaatacaataccagatattaatatatgtgatcacacaatattacaattataagaaagataccaaatggaaacattacaaagtattgaaaaacaaaaccttttctttttaatctcaaatcatagaggaccggacgctcaactgcttcaatttagtttccagtgtggacccgtcacaagacctcccattattcatgtatgtttgataatgcaaaataaaattattataacctttcttttgtttgtttgtttgttttaacattctggtgtttgggtatggtctcttttcgggtcatggcaatagttatagaccaagaagttcctctgtgcccatgtcaatgccgccatctgctgccggctcaacccacggttgcgcatgggtgcaggcgatggcggtctgcatgagctagagctatccgctgtgcatcccgctagcttaaagttcttgtacttagccacaaatggttggtatcggtagtcagctttgatccttccattttctgtggcccagtccgatgcatcccatatcgatccgtaaacccacatcggtcttgtggggaatatagcttcattctttctattatatgtacgtatcggtacatcgtctacaaagaatctttatacaataaaaaaatcgtccaagttagtatatcaaacaactaaaaaatgcgtatacttaacataagaaatcttgacttacacaatttggttagggttccacaaaattgcgtaatggtgaaaatcttgagtagggtcaaaccacaaggtaaatttcaaccctctcccaatgacatttcggtcgccacttaacatagagaatacatttgtttgaagggaataaggcttccctgg

SEQ ID NO: 8459 - DNA, 988 bp, Arabidopsis thaliana landsberg
acgttaactgccgacgttcgcgattacgacgccgtttcgaaagcgattgatgaatcttttaccgatcgatgtgttgattgttaatcaaggcgtgtttattgggaaagagcttgagaaacagagtcctgaggaggttaagtttatgattgatgtgaatctgactgggagcttcaatgtgattaaggcggctttacctgctatgaaagctagggaaggtcgtggtcctgcttccatttctcttgtgtcctctcaagctggtcaggttcgtatctctatcactcttaacgccgtatcatagattcatgactcgcagattagattaagaatttagagcagcttgcctacagtttggtaattgttgaaattgagtttgtaaaaatggaagcacttgtggaagtcgagagcactttgtgatgtatcgtgtgtttttacgttttcaggcaggtatatatggttacactgcatattcagcgagcaagtttgggcttcagggtttagcgcaagcattgcagcaagaagttatttctgatgacattcatgtgactctcttgtttcctcctgacactgatacacccgggtttgaacaaggtaaacaatgaatcttctacattttttttaagttaaattttatgacaaactataccacatgaaagctaggatcgtggattgacacttaggcgcctcattatactgagcggataacgcttattaacttccagaatagttgccagttctggttcagtaagagttgtagacagactatataaaggagtaaatggtcctgagttacaaaacacattactgtataattctactatgttactgaaagccagcaagagctatgttcctctagtaagagctagtgtctatgaggaactggcaaaatgttgcatcagttaccaccagttagtatgtgaaactaaaggagtatttaaaacaaaagtggatcatgttctgcttctgctaaaattttgatcttgtgaaacta

SEQ ID NO: 8460 - DNA, 1993 bp, Arabidopsis thaliana landsberg
tagtcataagtacttaggttggaatttcaaaatttagcataacactagagtcaggtttgtttggttgcctaagtccccatttgtcctagagatcttctccactaaacgaagatataatgatggcatgtcaaattaaatacgtgtctctctatatttggtcatttgatgtaacttgtgggtcaagctaacaccacgtagagttgtactatatctaaatttgtatatatgtaaattattatgatttcataaccataaaatggtcgtagacactaactagccagcgaccagatgcggctaagaattaaatttgtaagtaagagttagtcatttggaggtgcgtttggtaactgatgacagcaactaactagctacatcacccctcaattgtttcctattaatgaatatgattctaaacttagaaaaagttaaaaaagctcaagcagaaaaaatctaaaattagaccaaacctaacttttaaatcactaaaaattttaaacttctccaaaaaatgatacaaaaccaccaacattttgtcttttgcacgcgactgcgttttgtgtacttattattaagtatgagcatttgttttttgtttttttttttctaaagaattttaagttcaatatctttacggattttaagcaaatgagaatttccttcgccaaaagttagtatgattagaaatttgtgtaaacggatcaataaataaatgaaatttttaacaagttgataagaataaaaacctgttgtttcgggtcaagacaccggcgatgaattgccaaacacggtggtgtttgcatatgaggagacaaatggtacggctaatgtgttcgtaccaacaagccatcgacgctccgagagctattggtggccaaaccttcctcggcgccaccttcttcatcacgtactgcctcggctttttctctcccttcggtactggatagtacggctgcccacacgtacacatgcacacgtgttgtattagcgtacctctcatatatcttacttacacaatgtgttttgtcaagccaatacatttgaaattttccctagtttgttaaattatttcttactacattagagaaaaaacacacataaaaattcaattttattttcagaaattagaaaattgtaaaagaattggttaagaaacacagcatttttcttgaagcaatctaaacacaatcatgtcaaatattaatttagtcacatagttcaaacttctaagacttttctaaatggaagtaacttaaatgagtgaccatcatgatattcttaatgtaatgacgattaagagtatatgcagttattataaactttagcaatcatgtcttgcatgcatataaagtttataaaccaataaagacaggtccaaaatatgctaaaactactaattaactcaccggagcaaggagggtaagcgacttgattaagccgccatgtctagcggctaggctaagcgccaaaatgcatcccaaagagtgagccacgatgtggaaagacttcacattgtatttgtgtaagacagatttctcgatcatctctacgtgttctctcaacgtgtagagtgaatcagctggctttggactctttccgaatcctagaagatccacggcgaagagtctatgagtcgaggaggaggctgacaggcttggaaacaccgtctccgtccaaaacgctgatgaagatatgaaaccatgtatgaaaagaacatcctctttcgctgttacccctgttgtaatgaatccgattgttttaaaacgccaattaaaaagttgtgttagcgttatatactcaaacaaagatgtgaaattttaccatttgggatttgagttttgacaaagagggaatggtttttgtcagaagtagaggcccacgatgtacaaaaaccacaatcacaatccgaccatcgagagatatcggggttcaaattctgcgggctgatcttttcccgaagcatcttaaccacccgtgaagtttaaccgtcaagctt

SEQ ID NO: 8461 - DNA, 2000 bp, Arabidopsis thaliana landsberg
  unsure (1)..(2000): unsure at all n locations
atatgtagtttgaatatagtcactcccatagttttaaactagagtttagtttttagtattttaatcttgatataaacttatattttcataattattctttataatgtcacagcaatttatttgtaaaaataaaaaaatggtcctccgtaggtttaagcatggcgttgggtgagacacgtggtggaatcggaggaggagagtcgatgagtgatcttacggctgaacagttattcaagatcaacgagcttcatctaaaaacggtggaggcagagaacaagctgactaaggtatccgcgagcttacaagaagacacggcggatacgcctatcgccgttgcagcgttttacaaagaagtaatcggacaagctgacgtggtggtcgagcgtgcgcttgataagcatgaggaggacatgggtggtttattggttgaagcagataagctgaggatgaccacgttgaccaaaattgttgacattttatcggcggttcaagctgcggattttcttcttgccgggaaaaaacttcatttggcgatgcatgagtggggaaaatcaagagaacatcgacggcttgaagctagtggtggtgattccggtggaaatgttaccagagagtaattgctatcgatcggactttagaaacaatataaagaagtaatgtaacaatagccaagattttgacgactgatcttggcattatacatatagtgtgtgatattttataatctttttaagaaattctgttttgttgcgtagttactgaacagtattttatactggttttggaattttagttactgatagtgaaatttggattttatgggcttttaatgaataaattaatgtttttattagtagattttaggataattaatcactgttgtagtggttagaatgtcccacatctaaagtatttatgatatgatacctcaaattacatacttttttttggatagacagtatgcgttgctattatacatgcgtttgacgtttataaaaagaactatttgtatagcccactagtccatccagttctctagcaaaagccaagcacattcggaatcagatcaatgagtttgttataagaaaaaaaaaagtagactaaatttgtttggaaagagtcatctactgcaatcgaatgtgtaaagccactgggcttttattgcccatacaatacccaacaagatccatccttctcaggctaatttgatttttgtttggaaatggataatatacagcccaattttccgattaattaaagctttattttgcaattttttattttaattttttggttaaaactaaactaaccataaagttatgttttggaagtttagatatttcccttttggatttagataatcagtatcactctgagtcacatcatttactggacaactttaaacaagaaaaatagagtagcttatgatttcaacacgaatggtaaagtaaataaaaatgaaacatttcacgcataatgtttctctatcgtgactttgtcggcaggcaaggacagttctcacatcactaccaaaaaaaaaaggacagttctcagttctcacatccccaacacagtttaaaacccaaaattcaaaatttcacccatttttcctttcaaataccgattttatataagaatatttttgtataaacaatttcctaattatttacgaagtacaaatctaaagctaaattacaaacatatagtactacaataatataaaaattaaaataataaaaaatgaaagcggcaatcaaggatccgatggtgtaataaattccaacagcaaagtagtcagtcaggtggtgctgggcacatgtgacattggccctacttggctttgcttcatccaaaactatgcacttcatgctggaccggattcaattatgtttctttttcttactttataccgatttcacactcacagtctctcacacacaagtctcgtgcatgaacagaataattgagacaaanagataatatcatatagttatttggag

SEQ ID NO: 8462 - DNA, 1441 bp, Arabidopsis thaliana landsberg
tgaaacaaaacctatattattagaataatacggatttagaatgttcttttgttgcttgttttcaattcacttacaatccagggaaaatatggcaatgttacttacctgtctaagcatatagtcataacccacactagctgttacatctcttgaaaagtagttgtacatgaaatcagtggcaagtgacacctgtgtgtcatgattcatgaaaaagattgaatgtgtcatgatatatctctcaactctacaaggttttaagatgcaatcaaatgagaacggtacatcaccttatctgaaatcttctgaacatagttcataacaacagcacccgtgctagcaacttgaccagaagcaacctgttcatcaagaacagttcttaatatgatgggtatataaactcaaagtgttcaaaattctgatctactttcagctaactgagtttttgaaccttgcaatttgtataataaaccaactgagatgaagcactaccattttatctgtctcgtatctagcagcatagcctattcccgacttccgaggcacaccagcccagaaaatttcaccacccaaggataaatggtttgtaacactctgtacaaaaaaattatgataatttaatgaatagaaaaaaacagatacattccttacttaaaattttaactattactgatcaaaagaaagactgcccacagataaaagatatatatataactttgaccacagaaactaagcatgacataatcacaaagtctaatagaacgacgtaaggttcacctctcatctatgtcacagctagacgaatcaaggcaaacagtacacggttaaaacactcagagatggttagtaacctttccctggctatttgactacacagaaaaatctagaaagtttccactgtagcacgggacaagtcaaacttacctggatataagttgctccaattagggcactctgtccaagttgaagctgagctctgtagtctgatccctacataaatgtgagataaaaacagttaaaaaaactcaatgaaccaaatactgtataataaaaaggtacatcacaaggataggaaattattatatacagagaattttcataccatgtaatcaaagttgaacattgcttgtgacatatgttcctcatttgttatctggtaaagaaagtaaacaaagatgacaaacactatattacagagagaacgaacgtaatttccagctacacctagaaaaaacagattttctaaagttgtggtacttaccagagcattcgccttcacaactaacttatcagttaaatctgctttcagcctcgcatttagtctaccatcagtcattacccttccgatgagcagcaactgcatatttactttgacattttcacatatttttcatgacaataaaaatattaaaacagctgattaccaaaaacgttacctttgggt

SEQ ID NO: 8463 - DNA, 1409 bp, Arabidopsis thaliana landsberg
ggctttatacgtgccaaccattaccaactaccctttgttctgttggttctctttacaaccataatctttgaatctatatatataacattcttcaaactcgaacctgttgaccagaaatgggtttatttcttcttgcagctcaaaagataagttcaagaccaagttctgaactctctgaaggattttcagacaaagatcttgcgaaaacaacgggtcaagagaagagaaagatatcaggaagatctctatctcttccatcggtagaggtagtagaccagacaccaggttggccattactaagaacatccactttagctactccaatggttcaacatcagactaggaaaatatcagttgtcaattgggtcatgagcttgcctgaaagatttccacatcatccgaatcagacttgtcaacagagcttttgtgataaacaacttaaagacatactcaaggacataaacagatggtttagctatgatgttctcaagacagcaacatcagatttctctttaggtattaactaacgtaactactctgttttatcgtattcatagccactttatcggattctttttttttggtttacagagaatctgatcggaaaaggaggatgtaatgaagtttacaaagggtttcttgaagatggtaaaggcgtggcagtgaagatcttgaaaccatctgtaaaagaagcagtgaaggagtttgttcatgaagtgagcatagtctcttctttgagtcactcaaacatctctcctttgattggtgtatgcgttcattacaacgacctaatctctgtttacaatctctcttccaaagggagtttggaggagactcttcagggttaagaaaatactactttgttctcttaaacatgatcttgacacacaatttcataaagagttcattaatagttcagtttctgtaggtaagcatgtcttgagatgggaagagagactcaagatagcaatagggttaggggaagctcttgattatctacataaccaatgttctaatcctgtgatccacagagatgtcaaatcttccaatgttcttctctcagatgagttcgaacctcaggtattaaaaaactactgagaacttgtaaatatatgtaagaaatcataaagatgtgtggacctttaacggattttgttttgcgagaatagctttcggatttcggtctttcgatgtggggatcgaagtcttgtcgatacacgatacaaagagatgtggtgggtacatttggatatctagctcctgagtactttatgtatggaaaagttagcgataaagtcgatgtatatgcctttggagtagttttgcttgaactcatttcaggaagaacttctatttcatctgatagcccaagagggcaagagagtttggtcatgtgggtaagtgttggt

SEQ ID NO: 8464 - DNA, 678 bp, Arabidopsis thaliana landsberg
ccagaagtttttcaaaacccattaggcccacttgctctatcatgtcccagaaagtataaacgagtcaaatttgtattcggtattggacatgcctgtgacacaatcaataatagtcgtatctttgactgcaaaaaaaaaaaaagactagcgtgaggtcaaaagtcgccatttttctctcttctgtctctctcatattttgcttcatcttcattaataatggtgagaattagaaaacccatctcgtattctctcagatttctcaatgtttttgttgaattcttaattctactgcttcttcttctcaaagtttctacctttttagcattttaaaaatcatcttgtcttcctctgttcttgagaatgcgtgttcatcgtctgtgtgtgatcgtcatctccctcacacagctactatgcttcttctgttcctcggaatctcagaccacctccacgtgccatcaacatgacctcgaggccttacgtaacttcatagccaatctcgaacaaaaaccagatggttggatcaattcttcttcttctgtagattgctgcaattggactggaatcacctgcaattcaaacaacatcagaaggatcacgaaactggagctcgtgaacaaacagctgtcgggtaacttgtctgaatctcttgggaagctagatgagattaggattcttaac

SEQ ID NO: 8465 - DNA, 559 bp, Arabidopsis thaliana landsberg
ggtctgagattccgaggaatagaagaaacatagtaactctgtgaggaagatgacgatcacacagaaacgatgaacacgcatttcaagaacagaggaagaagaagaagaatataaaggaagaaactttgagaagaagaattaagattcaacaaaaacccttgagaaatctgagagtatacgaaatgggttttctgattattgccattttagatgatgatcaatgaagatgaagaagcaagagagagaaaaatggcgacttttgacttcaacacgcaacagcaagtagtgggtattgttttaatgcaagcaaaattctagagagagatagaaagtggaagagttgtgtttggtcttttttctgatacagagcaaacagtaaaaatctttaaataaagaagaagaagaaataagaagctttgaataaatattatttttccaaatattctgtgaattaatttgtgtttttggaaaatttgttatagacaaatcttttccgtgttttgtcaattataattgagtgtgtctagtcatatatgaagtcttaatcaataacattgac

SEQ ID NO: 8466 - DNA, 1435 bp, Arabidopsis thaliana landsberg
gttagttatcaaatttatatatgtccaaaaattaatttattattgtttggatactttacgcagacacaactggctctgtgaattaatttacttttcacgaaaacttcttattcagcttttatttttatacgactgtcaactttgaacgaaacctatacatgactatagtatcccaatcaagaaaccaaagaacacgtaaatgtactagtttcaaaatatagaattctaaacatgatggtggcctagtgttagtttaagagggttggttttttaatggattcaaagtccatctgatactatattttatttttttcatcagaatgttaatgcatttttgcagtgaccctttagaaaagaaggctcgtttctcttcatttgaaaattagtgcattgtaacagaatatttgacagctaatctcgcatggctaattaataaaaacactaagcccatttggctactatgctactaacagagaaattgaaaacaatctatccacgtgaagcattaaaagaataaacagaacacatgattaaaaatcattaaaacttagactagtttcatcgttaggaaaattagttgtcaaaacgtctaaatattaacaacctatctctaaagatcaaaatattctcccaaccaaaatcctaaataaaaatatacaaagcgtgatttaatataaagacaaactcttaatttattggtctcttcttatgatggcttgactggtacaattttcagattaactagttgaaatatgaggaaaacatatttagaaatgaaaattgaattcagaaggaaaatttatttcttgtgagtttttttagagggaacttttaatctctcttataaccattccctgtccggatataagcgagaaatcaattaagaattaaagacttttcttttgatgtttttttttatagactttgctattttgtcaaaaactttcaaaattgccattttttatacacaaaaacacaaatttacacatgatgtttgggtttattaggttccagttttttttcagggtgtagttttttttatgaagtatgtgttttatgattttttttttcaattgttaagttttttaaaatggcaaatttgaaagaatattgagaaaatggcaaatttgaaaaatgtatgaacaaaaatggctttttagacaataaactctaattcataaatgatattgttttgacgtaaaaaaaaaaaaagacaataaccacaactctttatgatatatgcaacaaaaaaaaacacaaatgggccacaaagaattgtttgaccaattctcatgagcgttagctacatttctttgtctgtggtcgaagttgagtataaaaatgggccaatagttgttctcttcctggactatatgggccaatttctttttattaacaatccataagctgtttaaaaaaacgcggagctttcaca

SEQ ID NO: 8467 - DNA, 522 bp, Arabidopsis thaliana landsberg
tccatggttgaaactgtggtaataggatgtgtgacaataaatgtacaaaaacacaattttaacttatgaagacaaaatgaatatcaaaggtttgtggaatcaattacgaagaaagaacttattttgatggtttatagactttgcccatttgtcaagaaaaaaaaatcaaaattgccatttgcttatatacaaaaacacaaatttacacatgatgcttggggttattaggttctagttttttttaggatatagtttttgttttatgaaaaaaatatttcccactggtatttattttcaaaactatttagtatttacaactacgtatataattaatctacatccataatttagcaatacatctgcaacagtacattcgtttaacttctcacgggtatcaacattgctcctttttttttttttttttttttttggggaaaaatcaacattgttcctctgtttcgaaacgtggtgaatgttttttttttcattgaaaattaaaacatcgaaacgcagcgtattatc

SEQ ID NO: 8468 - DNA, 726 bp, Arabidopsis thaliana landsberg
ggcaaaacggcatactttttctatatccaaaaccaatctatactatgccggtttaagtttggtaacaattttctcaaactgaatctgaaaatcaaataaccagaatccagattgacattcctatttacaatctcgtacatatggaaacgacagcttaaaacatggaatatatgaaactaagaaacttaccaatttcctctcttccatctctggttcagctgcccaggacaagaaggatacaacatctttacccatctgcatcatgttttttaaaaaaaaaaaatttagaattatataattgactcgaggaaaggtcaaatctgataaaactttatggtctgcagttactttcttaggcagaggaaaactaacctgtgcttctgttgcaggagttccatcttcatattccacagcttcatcgttgagcatttttggcatagcgattgctccaccagggaaataaggattgtagtgtaacccctctctgatctgtaccgttagtcacaggattatttctaacttccaacaatttgaagttgtaataacaagtctaaagcaaaaataggagagaaatttaccgaaattccagcagggaggatcacgataaccagttaacagagcaaagacataattttggccattgagacgtgcctggaagaaaatagccaaattgcttagaccatagtagatgaatttctaattgtatacaaattgagagaatgagca

SEQ ID NO: 8469 - DNA, 553 bp, Arabidopsis thaliana landsberg
tgagaaaggacagtaccataaggcataaagatttatgttcttatattttaagtggaggtaaaataacctgtgcctctgtggcggggacaccatcttcatactcaacagcttcatcattgagcattttcggcatagcaattgctcccccagggaaataaggattgtagtgtaacccctctctaatctgtacagttatcatcggatttttcataaccagcactttgaattcgaagaagttcaatgtggaaaatgagagaaacttaccgatatgccagcagggggatcacggtaaccagtcagaagcgcaaagacatagtttggaccattgtgacgtgcctggaaggcagaacattaaaactatttaaaacacaaaacacaagtttgctacagatgttcagttaaagtaaagtagcagcagcagaccttagttataagacttagatcaggaggatacgctccaccattagcaaaccttgcagctgattcatttgcatatggctgaggaaaccggtcactgagtttaccagggcgggtgaacatctgaccctcatca

SEQ ID NO: 8470 - DNA, 1334 bp, Arabidopsis thaliana landsberg
tacctttctagcgtcaagtgaagagagacgttaatctttcactcatcaggtgggaattcctcatcagaagcttcgttctctagaaaagagccgagagttttcctcagtatgctgaaagttttgtcaccctacacccagagaattcacagttcagtcatttaacaagatcaaagagagagtgatgtataacaagatcaaaaaggcttttatttacccgtttctttttcttcagcgactcttccaattgagcaagcttttcagtgcagaacttctcctgttccgttatcattgtcttctctttcttccctatatgttatttacaggtggaagtgagtaagtgttgccatcttctcataacagtggtgtcattataaggggttggtttgcttacttagctgctcatatcgcatgtagagcctctccttgtcctcctcaaactttgaaatagtgtctgtaagcagaaacatatgttcaatacttttggtaacatcccaattagctaatgaaagaaatctacacttttgacgcccaacagtaagagatgacaaaaccagaaaacagtagaaagaacaatacctttcaagccctgtagatgatcagctttgtctttcacgaatttcttatgaagctcctcaaacttggcagattcatccttcaagatattctcacactgcaagtatgcatcaggtcagacccttgtacatttctaaaggctaaattaagttaaacatcgtcttgagatgtttgttcagacctcctttgaactctttgaaagtgctttggcaaagttttgtctgcattttgtaagtcaaggacaaaattcatcagaaagttgcaaaccaacattcacaaagcatgtaattgaatatcagacatccatcctcaacaacatagtctacctttctttctcaagttttgacttcagctcgtcaatctttgacttcacctcagtggacacactgccagaaagatacacaaggattaaagcaagattcaaatatcaaacaaacgacacttcaaaagcaggatactcacaatcctcagatgattctatctttctggaacaataaatgacaaaaccatgctactagataccaagtagtgatacaaatcaaccgattgcttcagagttgagtatcaaaatcaaacatctaaacgttctgtatctaagaaatcaaacgagcttcatatctatcaatcaaccatttgctttctagtttaagggatacaaagagcaataccaaaaccagttgcacaatagatagctgagtgcttcagagctgatgaaagagagaatgatcatgtaaaagatcagtatgtatgacactcaaccc

SEQ ID NO: 8471 - DNA, 574 bp, Arabidopsis thaliana landsberg
ctctggttctaattccctttttctaagtgtttgatataggtgaatcttgctttaatccttgtgtatttttctggcagtgtgtccactgaggtgaagtcaaagctgacgagctcatgaagtcaaaacttcagaaagaatggtaggctaattaatactgaggatggatgtctgatattccattccatgctttgtatgttggtttgcaagattcggaattgattggtcctgttttaagaccaaaagcattgccatcttatagatatcaagcggctctaattttggatactttgaggttgattccagagtggagattgattattgaagatgcatcagcaaatagcagtcctttgtaaaggccttattcgttaaggtgtttagtataggtgaagagtagttatggtgcgtctgttttattgtttccaacctgatgtttgctgtggtctcatcctaatcaatatatattttcagatgacaaaaaaaaactcacaaactgcaagacaaaactttgctaaagcactttcaaagattagtctcatgaggctctataaaaatagtatagaaccaaagcaaaatc

SEQ ID NO: 8472 - DNA, 583 bp, Arabidopsis thaliana landsberg
gaagatatgtgccatcaaggaaaaacctagatgattagtccacaatttacaatgcctaatttatgtttttcgtttactcttcttctctttaaataaagtacactatgtcattaacttttaacttaacaaaagttaaaaatgtcgaaacatacaaatataagtgataactatcatcagactttacaataatgtcacatatccacggcatccacaggaagtgatatagccctgtaaagaagaggtaacgaaactgaagttcccggtgtaagagagatctccatcggtgtctcgcagatcgtttgacctctcattttcataagttgaatcttgtgccttgccttaagccatctcagttctcgtctcatctcattctccgaccaccgtccacttctaaccttccttgagctctgtttttctccatcatcagaatatgattctcgcaaaccccacatatccgcaaacctaccgtgaaccgaagaacagctcttgtcttcagaactatcgaactcatgatgattatgatgagatttttctcctgatgatacagtctcttgtatatacccgtttgaagcacactctccac

SEQ ID NO: 8473 - DNA, 1762 bp, Arabidopsis thaliana landsberg
tccaattattgttggtaaaaaataaaaactaaacgttaattaattcggaagtaattattaagatcaatcttacttcagaaaaatctttgataagaccattatataaacgagaagaagtctcgctataatcatatcatcaccttctccactaatactctatagtttgtttttgttcttcttataatctttatattttcagcaaacgaaagggaagtgtgtcagaaatctcagagggtgagaatcccaatgaggatcttacccgaacctcgaggttcggttccgtgccttctccttcttgtgtcggttctcttatcagcgactctctcactcgctcgtgtcgtcgaagttgtcggttacgccgagagcaagatcaaaaccccccatgcattttcaggtatctcataacttacattaatatcttatgtactatatagtttatttttttgtgaatatatatttgatcaatgtgtgatattatttgttataggacttcgagtgacgatcgactgtaaggtgaataaaggccattttgttacaaaaggttccggaaacattgacgacaaaggaaagtttggtcttaatattcctcatgacattgtctccgacaacggagcgttaaaggaggagtgttacgctcagcttcacagcgcggcgggaacaccttgtccggctcacgacggccttgagtccaccaagatcgtgtttttatccaaatccggggataaacacattttgggcctaaaacaaaatctgaaattttcaccggagatttgcgtttccaaattcttctggcctatgcctaagttgcctccttttaagggctttgatcatcctttccctttacctccacctttggaacttccaccgtttctcaagaagccatgtccacctaaatacagtcctcctgtggaggttccacccccggtaccagtttacgagccgccgccaaagaaagagattccccctccggttccggtttacgatccaccgcctaagaaagaggttccaccacctgtcccagtttacaagccaccaccaaaggttgagcttccaccgcctattcctaagaagccttgtccacctaaaccgccgaagatagagcacccacctccggttccggtttacaagcccccgccaaagatagagcacccacctccggttccggtttacaagcccccgccaaagatagagcacccacctcccgttccggtacacaagccaccgaagaagccatgtccgcctaagaaagttgatccaccgccggtgccagtccacaaaccaccaacgaagaagccttgtccgcctaagaaagttgatccaccgccggttccagtccacaagccgccgccaaagatagtcattccaccgccgaagatagagcacccacctccagtaccggtttacaagccgccgccgaagatagagcatccaccaatctacataccaccaattgtgaagaagccgtgtcctccgccggtaccaatatacaaaccaccggttgtgatccccaagaagccatgccctccgccggtaccagtatacaaaccaccggtagtggtgattccaaagaagccatgtccgccacttccacagctgtcaccacttccaaagtttccactcttcctcctaaatacattcacaccccaagtgcgggaaatggctccgttgcgtccaaccttgagaacattagatcgtatattatagatatcgtatatcatgtataataacgtgttccttttgtaaatattttactttgcatatg

SEQ ID NO: 8474 - DNA, 893 bp, Arabidopsis thaliana landsberg
  unsure (1)..(893): unsure at all n locations
ccgccaacaatttctccgatcatcaaactccggcaacctcaaactctatcttgcgcttctccggtaaagaaattgtaggggtgagggaaattctcaagcttgggtaactgacaaatactcgccggaatcttccccgacaacatattatgcgccacattaagctgctccaccgaaaccatctcaccaacactctccggtaacggcccaacaagttcattaaaactgacgtcaaacaccgtcacgttctttaaccgtccgatatcagacggtaaacaagaattaagaccattgttcatgaagatgatctcgttaagattcttcatctccaccaagctcgatggtacacaaccatggaaccggttattcgccaaaacaataaccgaaaccggcgaatcaccaaaattttccggtaattcaaaccggaaccggttatggtttatgaaaatcgcatctagatctttactaaaaagctctttcggtacggttccttcaaactcattaaaccggagatctaagaacttcaacgacggcaaatgaagaaccaccgtgggaaactttccggcgaaccgattgttactaagatcaagctcgaacaaaagcttaagctgcttgaacttatgaggaacagtaccacagaatcgattcgaattaacatgaaacaaagctagatctgttaacaaaccaagctcttcaggtaaatacnnnnnnnnnnnnnnnnnnnnnnnnncgattccggcgacggtacggatcttccggttatcaagagctttagaacagaaaactccggtgtagttacagacattggatccgatccaattaacagtgatattattaggatcagagagaatagcttgtttccaagcttgaagagctatgtaagcactacgaagccg

SEQ ID NO: 8475 - DNA, 721 bp, Arabidopsis thaliana landsberg
ggagaggagagtagactggtggtggaggaggcggaggtggaggtggtggaggagggggagagtatactggtgggggaggaggtggaggcggtggaggtggaggaggagagtagactggtggtggcggcggtggtggaggaggcggcggaggaggagagtagactggtggtggaggaggcggcggtggcggtggtgggggaggagagtagacagggggtggtgggggaggagagtagacagggggtggtgggggaggagagtatagagggggtgacggtggaggagagaagacaggaggtgacggcggaggagagtaaacaggtggaggtaacggaggcgatggcggaggaggcggcggtaatgctacaataggtggagacggtttaacaacagaacgaccacaaccaaaagatccacaatccaccgaaggccgtgacaagaaagctgaacattgccgtgaagatctctgagcaggtcttccgggcaaacaatttctccgatcatcaaactcagacaacctcaaacacacaggagcttcaccagtaaagaaattataactataagtgaaattctcaagcttaggaagctgacaaatactcgccggaatcttcccagataacaaattatgagcaacattcaactgctcaacctccaccataccaccaacactctccggcaacggaccaacaagctcattaaaactaacatcaaacaccgtcac

SEQ ID NO: 8476 - DNA, 1475 bp, Arabidopsis thaliana landsberg
gcccgtttgtaataataatattattgtcgtttgtaataatagtatatactccaatggacttaaaatctagcccaataaattagttaatgattggcccaatacactttgagaagacttacttggtagccataatagagtagttaatgacaggctttagataaaagcccattagtagcctgtggtctcttctgatgtgacctttggatctaggctagcattatcaaacaatctctaaaccaacctaatcaattagcctttcgttgtagttgtctacattgcatggatataataactataagggattgcaactaaattcatgcactcacgtgtttcactcttcttcgttcgttccttttccatcttattgagaaaagtactgtaaacttggaacaacattaaataaaggacacggtccaaaccaatcctttcacattataaactaccacaaaagtaaacacggattgtgcttctggttgccttgatttataaccaaaaaaatgataatacgtttttgcttataactaattatttgagctcccctaaaaaaaacttgtgtgtttcatataatgctgtcccgatattatcgagtcattacaagaagagaaacaagaaacaattacatttcatcgacatgatccaaaataaaaccgatccaaattacaacattctttgtttttttttttttttaaaatttcatcgagtcaatacccgaaccatcacaaaaacggattcatcacaaaatgaggttcgttcttgactcaatctcctccatcgtctgatctcgatgatcaggtgctatcacaatgaagagcagctttaatcttctgaacggtgcacgatatcaaattattaaccgtctccacagattccaccgttagcttagccgtacgcaaactattcaccagtatctgaaacgccaccgttagtaacgaccctccttcctccatgcacccaccgttaccaatactgttacgttcctctgcggcgcagcgttgcgtaccagcctgaccgttagggagaatggcgaatcctgaaggaaggagtgccacgtaagcagaatctccaccgttcatcacagcttgcattgctgggatatcaacaggcgcgtacacgacaaccgctcctgcagcgtctatgcttgtctcttgtaatatcagcatactactctgattcgcatttatcgcctgcatgaaaaaatcaaaacaaaattaaataaatggaaactttggtggtagaagagaaaattataaatcccaaaaggggaaacaataaattaaaagatgatgaacgaggagacttttacagtgtcaccgtcacaagccagaaaaagctcaaggggtacaacggagaaaagacaccaataatgcagaaataaagagagaaaaaaacagaggatttttcaaaacgtcggagccaaaaaggaaagaaaaaggtcaaaaatgtcttattactattgacttttatcacacaatact

SEQ ID NO: 8477 - DNA, 1331 bp, Arabidopsis thaliana landsberg
agttcttatgtaatactctacccaaagaaaagaaaatttaactttggaacaaaattcccatatagaccaagataaaatgtatcataccataaatgattgaacagatcttattttcttgaaagtataaatatttttaatgcttggtgtgaaccgcaaatttttgtccccaacatttttagtggataaatatttctatgttgcaatttattatcattttctatataaataatatttccagcttgtatatgctatattctcgttactaaaaatatatgtatatatgtatgtacatatatgtatatttaaaaagttattattaaaaatctactactttctcaactatactctctttacaagaaaatctgattttaaagaaatttcacagttttctagatagcaaccaactttcaccaatcatacttaatttgaggaattacttacaaataaaatctttaaatcataaactagaagccacagtatctgttaaaataataataattgaatttaggatctgccattagtcgacgaattttcttgaatattcgtttctatgttaaaatggaagtcgtgttaagaatacaaataaataagtatttgttttgaaaaagctgaaaacatttttgaaaaagtaaaaatgactaaataaaataacaagaataagaattatcgttttaactccactgcttcctctgcagcactataaatatatgctttggtactctgcaaggttgttccgtatctctcaccaaaccatctctttctctctttctcaaaatcttgtttatttttttaataaaacaaagaaattaaaaagatgatggttacattagtactaaagtacgtcctcgtgatagtcatgaccttgatattaagagtcctatacgactccatttgttgctacttcctcacaccaagacgaatcaagaagtttatggaacgtcaaggcatcacggggcctaaaccccgtctcctcaccggaaacatcattgatatctccaaaatgctctctcactccgcttctaacgactgctcttccatccaccacaacatcgtcccacgccttcttcctcattacgtctcttggtccaaacaatatggtatgtacccatgaccagttcaacgttttcggatgtccatttaatttttttcttaaacgtctcttcttatgctacataaaatctgttttccccaaatattaacgtaaaatatgaagcggataattatagtttctttcctttgcttatgctccggcccggacatgcctacaatgcattttctataatataacacacttcaaaaatgactgaaatggccttttgcagggcagagat

SEQ ID NO: 8478 - DNA, 1445 bp, Arabidopsis thaliana landsberg
tgaatccattgatgttccttctttgcattagttggcaatatgacttatgttgcaaggtgaagatcaacaatagttatactcaactctctaaataacctctggtggaaccttcttaactctcttttttgtatgttttggttgcagcatactcgtgaacagtgtcgaatggttaaaacttgcaccgaatctaccatggcttgttgatgcaggaggatgtgttgtgcttgattttcttgtatacgacctctctcttcaagttccatgatctttgattcctttcactgagctctaactttactcatatataatctctttctttcagattctgcttcagtttttccacttccgctgtcgcaaagacaaagatactgacaagaagaagcatgaaaccgcagaagctgtctaaggcttgtgactacttcaacaaggcgtcaaagagatacaattttgatttgatctgaccagcaagattcatctcattctaattagttctttctttaatcggattgagttttcaatttttgtgctgatgaaactactcttggattttgagttttaataatataaagttgtttcaactccttagatatgaatgacttgccccaaatcttgtttgttttcttcacagagaaaaatgtcacaacaacaataatatcactcacatcaacttgtttatcactataattttgtattctgtatagagatttagttacatgaagagagggctctctagggcttgcgagcagtaaacatgataaaagaatcctgaatataatcttcataatctgtgagaccacatgatgtgcacacatccttgatctcatcctgcatcaagtaattgtagctctgcagaattctctgcaaaaatgcaaaatgtataaagatcaaaatctatgcatagaaatagccacttttgatcattataaattttctttaccgattggaaaggacgaataatccaaggagtcgaaggactgtatctgagaaacgttgtcccgacaaacacacctccgcttcttagaacacgacagatctcagcaatcttgaaaacaacaacacaaagacaaatttaacaagtgaccatttgcatacactcatgaagctctgacatattcaagaacttacagcatttgtaggagaaggccaacagtgcaaggctgcaccagcatgaaccgcgtcaacagaacccgaagggaaagggaggcgagaaacgtctgctctcacaacagctatattagttgagttgtcgaaagtattatcatttttaatgaattctttgcactgacgaagcatgttttcagagtagtctaaagcaatcacgccagagtatttgccagactgcgcaaatttgcgggaaaacaaaccgcttccccaacccacatccacaagaagcccaccttaaactacaatgaagtattctcagccattctactgcatttcaaagt

SEQ ID NO: 8479 - DNA, 1065 bp, Arabidopsis thaliana landsberg
  unsure (1)..(1065): unsure at all n locations
tccccaaattgcttaatggtgtgaatcgggttgaaaactggatcagatgttggactttggatcaccattaagcttgcagcggtgtcgtcatgttgcttcaagttccaggacatctcacaagcagggtgcaacatctctatgtgacttttggttctcacagctgggtcaccatcccagtgctgcaccattccattgtcatctctggtttcgagtttcttatttcatcttcatcacttcaatattctctctcattctttaagattttgtttggtcttcctctccatcttaatctccaatatgatttatcttttatgttggtgtttgagttttcttttcttttaaatacggngtttgtgtttttcttttatatttgggatttctattttattaggattggtgttacaacggttctataaatagaaactttgctttgttgtggataatcattttttgttttttggataaaccaataaaaaccaaaagaggtaattatctcaattacccgtaaatccggacatctttaagaattcaacggctttgtgaaagatttgtcaatggatattcttagaattcaacattacctttgctttgttgtacttctgttacgtcaaaccccttatatataaacccctccaagttaatcaaccatcatcatattaattacccgctgaaaagctccatcaagaaacgcaaaaagaaagcatggcaattccaaaagctcactactctttagccatcattgtcgttctttttgccgtttcgaggagccaaaaagtatgcaatccagaatgcaaggccaacgaacccttcaactgcgacaaaactcttgcattcagccgaaatggatttcccaaaaattttacttttggtgcagctacctctgcataccaggtttgcatatatcttcgccatgatagctttaggggattgatttctagctataacattttccatatactttcttccttacaatatccaacgctttgttctatcaggttgaaggtgcagcacatagagcaaaaaaaggatgggactatttcactcatagatatccaggtcataaac

SEQ ID NO: 8480 - DNA, 529 bp, Arabidopsis thaliana landsberg
catgtgcatgttatgtataagagaaatgtggtgccgtaaactcaaaagtgtttaatatttttttctatagagtttaattcaattatttttttcttaattagaaaacaagacagcgaggtggagaacatggaggacatcaaatccaatgcaaatatacgtaacgagtttacttgaatctccatgcaagtcccatgcactcaaacccttgtatataaacccctccaaggtcatcgtttaatcatcaccaaaagaagcccatcaataaagaaaatacaaaccatggcaattccaaaagctcactactctttagctgttcttgtccttctctttgtcgtcgtttcgagtagccaaaaagtctgcaatccagaatgcaaggccaaagaacccttccactgcgataatactcatgcattcaaccgtactggatttcccaaaaatttcacttttggtgcagctacttcggcttatcaagtatatatatcttggcttctggggattgatttttagctatatatatataggatttttc

SEQ ID NO: 8481 - DNA, 1473 bp, Arabidopsis thaliana landsberg
tttttttttcttcaattttaaccaaattctatgtgtcaaattatttcacttaattttattcaaagttcttggattgtatccttatgtcttttttggggggaaataggtaacaaagcacgaggatgcgccggaagacgaatggagaaattggaattggagatctgaaggagatctactgcttaatggtgcattcttcacctattctggtgctggaccagctaaatcatcaagctattcaaaagcttcgagtctagccgcgagaccgtcctctcatgttggtgagataactatagcctcgggtgcactcagctgcaaaaggggttctcattgttgatcatagcccatcaacgtgtatgtgtgcgcatgtgtgtatatacatataatataatgaaactagcacttgaaagctaatgtaataatcttgatgggaaagtgaagaagagtttattacattttatcttgtcgttgtgtcggcagagttatttcactcggtttaaaacttaattacaactataactctaaaaacgataccttttgatccctaatgtacacttgattctatatgtataaacataatagaaatatgtagcatatatataattagctagtcattttaaatacttcatatgttttataaaaaatttgtcattttgactcatttgacatattcaaaaatctccacttcaaaaaggaagtcgttcatgtctgaatgtaatatttttgatgctgacttttcaaactaaattccagttttacccgttgtttaaaactaataacatttgcatttattagtatatgatttaattagtgatatgtcaaacagagatatgtttgtatattgagaaaaatctgaatactgtatatgtgaaataagccaaaatgacacttatcataaaacagatgagggttattaaatgacttgttattaactcacattatcacatgtatatacgcatgttatattttttgtacatctatatataagcatgtaacatatatctccatattatacttaatacatatagaattaagtgtacgtactgggaaaggtatcatttttagcattcagtctaaacagaactatagtaacgtatcaaacacagctaatggttaacaggataacagaattctctaaaaaatacaagatgagcgataaaaacctatcaatggataaattcgattcgatggacctcttaaaaatagttattcagtaacagcaaaaactaaccataacagctatgtttcgtcgggtctataaataatgaagcacctttaatctcattttactctaatggtaaaacatcttgaattgagtgaaaaacgaatatatcaatgccttttgaaatgaattctctagttattcaaaccacaatagtattagtctctgttatatcagtttctatcgttcatgccggaaatattcccgcggttatagcgttcggagattcaattctcgatacaagcaacaacaat

SEQ ID NO: 8482 - DNA, 1581 bp, Arabidopsis thaliana landsberg
aaattgtctgcttttgatttatacccagatttgattaatttctgatcgttagatttatctttatatcacttggtcagctctgaatttgatagaaaggtttgatttttactttggtatcttgctcaattggaactttttttctttttctttctcaattggaactttaccagcttaatttttggatattggtttatctgctggatcttcatgattttggtttgctgtcttcaagatctctgccttttgttcacttcatttaatgccatctgttttattttctggcttccgttactttttttattttatgccttgattcatgctacttttttatgttattatattactgaaccattgtctttagctgatggattgtggtactgtatgttcctgttaaatacttttcagctgcaacttcttcatgttcgttggctatgttgctgtgttaaaagtgaacattcacaaatttagctactttctttgcttgtaaaagttcacagaattggcttgtttctttgctggtgaaattcactggatgagcttgtttactttgtttgtgagaatttacagacttggcttgttcttccgcaggtttctacgtttagcaactcattatttttaggcgccatcaagaatgggaaagactcctggtaaatggatcaagactttgcttctcgggaagaagtcgcctaagtcgaattcggataaccgaagccagaaactggtaagagtttgggattcctaactcatccttaaaatgaatgaggattattctaactgtaatgttgttcacatgtacaaagaaatctgctaagaaagaagagctggtggaatcggtgacagaagatttgtcaaacttaacagttgatcctccggtggtttcatcacaaccagttccagcttctactgctcaaaatgtggtttctccaatcaatggtgatgagtccaaggataatctcgagtcaaggaatgacttgggagaagtcgagcttgaacaagctgcaattaaggttcaagctaccttcagagctcatcaggtacttattctttgccataacaaagacaaatctacgtgaatagagttggtagtgttaatgatgtttttttattcatctactgaaggcacgtagagcatttcgaactcttaaaggtatcatcaggctgcaggcagttatccgtggtcacttggtgagaagacaagccattgctacatattcatgtatatggggaattgtgaagtttcaggctcttgttcgtggccagaaagctagatcttcagatattgcgattcagtttcagaaaaaacatatggtagagactctttatcacgccttcattacatagttggctgattttgtaggcttgttataatcaagctgcaattttctttcttctattaggaagcaagtgattcagaagttttgcaatcgagcacgtgtagttggatggataatcccacaaagttcgtctttgttgataaggtatctttaacttatgtttcatggttcttggtggaataataattttcataacttctgctcagtaaacccggatttaccaatcttgcaacacaacattggcttt

SEQ ID NO: 8483 - DNA, 2503 bp, Arabidopsis thaliana landsberg
  unsure (1)..(2503): unsure at all n locations
gcaactcctatgctggtgtgaccttaccatatgaaggaagaaacacaactatgcaaaacgaggtttttggattctgtaaacacaaccattagagaagtctagtaccgaagactaaaaaccattagaagtcttttgcaatataatgaaacggagacacacggtgtatcacaaattagtatgtacaatcccgtttgcaatataaaaagaccccccaaattatttccgaaaggaatataaataaaaaataaaaacccgaagccgcccaaattatgtgacaagtaaagattagatcatcatcaagttctaatgacaggacctctgtacggaattcgtcgtatcacaaagtcatcaggcggttgaaattcctcaagccatgtcacgtctgtgaccacttctccatccacttctaattcacctgctccagttcacaatccaaatcaatatcactaaaggttctaatatggttctgggatcgggtttttggagagcttagttgtattacctggtaagtcttctcttctggatttccggaagtaagtgcaatgccgatcatgctctgaagagtaaggtggagctaagatgtcaagaatagcacaatgggtgatggctttgaaacagtgaatgttgccaccacttttcggatataatgttgttactgggctttgagccgtcatctcagtatccttcaccagtttagcaggtcttgcttcttatgaatcaaaatagtttacaattagaccagaagagtgattggataaaaactgagagagtaacagaaagaagacggttaccttgtgatggatcctctggttcggtcagttgaggctctagccaatcatatgacttcacatgcattgaaccataaacgagcttgcttagcacggtcatgcccggatggttatgaagaggtatcatagaagaaggtggcatacagaagattcctatctgttttgacaacagaggcaaaatgaaccaagtgagagataacattggtggcagtatcaggaagataaaacacccaaaaagagacagactcagaattgactcgaactgtgtttactcatactttctagaccatttgtcataggcttttttgcagacttcaggctcatggcttgaatagttggttcctgagattctctcaaggaccatgtttggatgcccccctattcccctaattttgaatatgcggaaaaggagaagattaaatatccactaaaatttttgtctcaggattggctatagagtgttttaaccttgaacggtatttgcatattattccaagcagaaccattgctacttaaacctaggaagttaaaatgggactcttatgctattttgtatctgaatcatcctaaagtggatcacaaaagattcacccaaaccttaaacagcattcaagaccaatcagccatagagttttcaaatcagtatgcttacagagaaactgtcacactcatgcaaatgaagatactttattgctgggggagactgattacttccattgcgttcattgagaggaccagacctggaccgtgccaattgagcatcctgctcaattccaacatcagatggcttgattttctctgaaacatagattacaaataaggttggtaagtgcaacaggggaccactgcattgaagactaaagtgagatatatatgattactcagtaccaccaacacccttaactaatacactcttattaggtaatttgcagaatgatcagataaacgaattcacatgttgtgggccacaaaattcataaaaaaaaaaaagtccttgtcacaagcactcaaaaagataacaatgatcggccaaataacagatgcgataaactgaaaaccagtggacaaagattcattgaacaatatgtgcgtataatcatacccaagacattgcgaaccttctccagagcatcttctgttattggtccgtctgaagagaaagacgccttgcaagtattgtaaagcctctgagcaaagtaaggcatgatctgaatccaattcaaaagtttctcaagctaactcagctatggtaacagaggaaaagagccgttcccagttttctaagacacaactgatgatactaaaacttccaagacttataaccatttccttcttcttcaacatagaaacatttctgcctgaaacaagccaaagaaaagtaaaaacaagcttgatataagaaaaatgtaccgattcaacaaattattctcaatcaaatgcgactcggatgagcatcgtgcacagaggattcggaaccaaacataatcagtgaatcataaaagcatcattattactcgaacttgggaaatgaatcgcacatatacaaattcagaacatcaaaacgttaaccaatttcggtttgaaaactggatataatcgaattgagctatataatcagcaaattttaaagcatttaccatccactaatcttaagaatctcacagatgaaggacatgntatctanatcaataccaaattcgagctcaaaatcggag

SEQ ID NO: 8484 - DNA, 915 bp, Arabidopsis thaliana landsberg
gggaatgatgatgatggtcatgctcatgatgttcctcatgtttatggctatctgaatgctgatgatgttcctcatgtttatggctatctgaatgctgatgatgctcctcatttttatggctatgggattggtgtgagtgagaatgtgtgcaaccagatccaccatgagcatgatgatgttcctcgtggaaaaagattaacccgacgatattcacgagaagcccaccaaccgaaacaaccaaaagactatttgtagaaatctcctgaggatccaagattctctcaatcgactcaagcacaatcagagccccaacaagaacaaggaacaccgcgttaacataaccagaaagcacttcaaatctacctcggccatagttatactgatggtttgcaggaagacgagagatataagacgcatacagcccaattgccaaagcagcacaatcaaacaacatatgacaagcgtctgagatcaatccaagactgttactcataaaaccagccacaaactcaaccaccatatacgccgtattgatcaaaagaaacaacgcaatcttcctcgatttcttctcgctcaaaatgtgacggataggcttcataaacatagtggaaaacgactcaggcgattccataccaatctcttgataatctgaatacacagactccaactctctaacagcaatgtaaagcaacaaaccacaaagcaacaatccccaaagagatagctcaggaaaatagaagagttccaatactatagtacatagaaacgttacaagaaactccctctctgagtccttcttcgagcttgaaaacttatcatcattataattctcactcaacaacactccaaatacaacagtgttagctaaaggccaacctaaattcccaaagagacactatcatcaccactaccaga

SEQ ID NO: 8485 - DNA, 737 bp, Arabidopsis thaliana landsberg
ggaaagaaagaaagaaagaagaggccgggttttttggaaagggggttgggagtttggagtgtaagggaaatgatgggtatgttcttccgattgttggttgtggtactgaaagacgattaggtcgatgttgatgatgatgatgatgatgatgatccaccattattgttgatgcggaagcttttgagatttttcccgatgagtcgccggaggaaattttcgtcaagacatgatttttgtgattttgtgagctgtttactttgaattccaaatttgttggtttaaccgaattaaaccggaaccgagtaatattcttaaatcaaaaatcaattttgcaaaagcggttactaaagtggtctaggcggtcgtctaaatcccatctatattatgacatctatataatcgttttgtccgcctaaattcatataaatttcttttcaatatatttttttaatttccaactccaaaatttaactaataagttttatcttaataaatattgtttaatatgaattaattaaatatatttttatctaatttttgtttactatttaatatttttatttttttagcagatacttttatatattttttatctaaaattttatatttataatgtcttatgttgtaaacgcttaaaccatctaaaatcgttttgactatgattaaacgttttaggcgctaaatcaccgtcctgcttaccatctaacgcttttttaaactgaacctaaaataagttt

SEQ ID NO: 8486 - DNA, 1737 bp, Arabidopsis thaliana landsberg
tccacccctggtgcgcaaagctcttcatattttctacaaggttcacgaaaaatgtataaggaagataagccttcgttgtttctctacttagcaagtatacatatatatataggttcgcgctctcccagtgatgtaaatgctgttctcattgctatagcctgaaattgacaagcgctcactcccacctaagtagggacttacgaagctataagcatgcaagagacaccaaggagctggagtctttgcctttcaatgtaactgttggacagaaaccggtcgataagattcactgtaaggtaaagcgtatctggaaccagcttgtagtcgtcagaaacctgaaaataccacgcacttcactattttactcaaaagtactctcagtttttgctctaatttttgtaagaaagctatgtatagtaaggtttagtgtcctattcaataagaaacataataagatgatgccgttatttatatatatgagctaagtttgaaggtaactaacttctacaagccagtcaatcagaatctttctcatgtctgggtcgatatctcgctgcacaagctccatataattagccaagggtcgttgttgaagctgcaagaaaagagaggttataactccaacagtcttcatataagtagttatattgagattagttacaagaagttaacagtggaaagatgtaaagcaaatatttggatcatgtaattcaatacctctgcaacatgtatgttgtcatatatatcagcagcatacaagctgcaacactgtggatcttcgacgttggaatcaatatctacaacttgaagtaactccatgacacctgatccatcttcttctgcacaatccagtataagatacataccttaagtaagtttgagaaattcatgttggtatagagttcacttgtttcaacccttgacaacacaaatttaatgggaataactaatttcagcattctggagtccaatgcttgatttaaagttagcgagtgatcaacatgacctcggaaatgaggagaaggtggtaactatcattattttcacgaacactgtagttcttacgttgctcagtaatttcttcatctttaaagtttgaaagagagacatcttgggcttcagccatcctgatcttggacaaatcttctgctaattttgatttttctgtatgcatatctaccagaatatccatggcactgttagcaccttcctttgctgcttttttaggctcttttagacattttctgtttgcctgcaacgtgatgtcaacagtaataagcccaaagggaaagtttgaaggctatattaccaacataagatataaaccaaccaagacaatgaaagcgtatcatctgaaatctttaccttgatgttgcctccctttcgaagttctgaataaataatatctgcagaggtattactcacatccttaagtactgcacgtctcttttgctgataaaccagaggcaggaaattagagagtttagcatcagctcttgaaattcatgactttctataagaacatgtttcagtacctgtttaaaagaaggttttgttggaggtattgatactcctcttcccatggcttttttagctcgtgatctcgttattcgtacaaaactctcctgtacatctgaagtagagatattttctttgtttgcatttggatgcatcgaagaagagcaatacataatttagtctggaaaaaggccagtggttaagccaagcctgcagggc

SEQ ID NO: 8487 - DNA, 787 bp, Arabidopsis thaliana landsberg
gcacacgtggagtggtaaagttcattcaccagttcatccaagcaatgggaagaagttcaactctgaatcaaacttgatttctgctgcgaagaggtcttcatctccttacagacactctcgctgtatgtcaccatttcgcagtacaggtgaacggtttttctttacaccatgcgggtttccctgagactcgtagggaaaccgagaacctgagagctaacaggttgagcaatcatactagaaacataagcaggacgtctcaggagttactctacccaaaaagcaatggttcaatcttggagaagacagtttatgtcgacaccgagaatgatcacatgaccaatgatcagcataactcaaatctcatgatctttccagaggaagcagatatgacaggaaggaaaccagatgccaatcctgaacttgaagcttttgaaaatataagtattagaagtagtgaaatggtgaagggaaatgagttagtagagatcagtagtggttttgatcggtctcctcttgcaccaccttctcccaaaaggccttctgaatcttggctttgtcataatctgccttcagtaacttctcagatcacttcacgtagatatcatccattcaacccccaaaagcaggatcttacagaaaactacagaaatggtaccaagtgggaaactattgttaagacttcctacatgcacagagatcatatccgatattccgaagtaagcatctctcattttcacatatacagtgctttaagcaagaatcagctagccatctttggtagttactt

SEQ ID NO: 8488 - DNA, 1675 bp, Arabidopsis thaliana landsberg
acgctgacaaaactatggacacatgttgatctaaaagcgaataaccccagcaaagtaatttggggaacaccaggtaatcaataaagcttggtgatagctattgatattttcttaagaacgtaccatacttctcaataaactgaagagctttctcaaggaatgatgggcttccatcaatatcttccagagcaagtaagattggtcttccaacaaccaaggattttaatggacgcttctcccgccctaacaattatggaccataaaggtagaatgacgcatagatgatggaaagtaaactattattaaggcagaaatatacataagaaataaaggcataaatattgtgtatatgtaaggcacttaggccaaagctgtaacatggactagaacaaaaattgatgaaaagaaccttcaatagcctcgttagtttcagcacggaatattccattctgacccatgatgagtgctgcattaggggcttgtgcaagagcctgctcaagagcagttttccactcgtacaaatcttcaaatgtctcagcctgcaacatccaaaattagtaacaaaaatatattcacagaaccatcttaaacgacttgaaactcgttcttagagtaggtatttcaaattttatgatgatgatgaatcaccttaagagtgaaagctctcccatcacgcccatctggaaataataccgtcaacagttttttatcctctctcaccacaacactgaaaacaaacaaaaaaaatcactgtaagttcaattattccatgaaattttataatcgacgagcagtatcctgcataccttccagagttattcaagtcgattcctcccagagttaagttaacttcaccacccttttgtggtagtgtaccctgtgaaaaattagttaaatagctcaatatatatgattatcaagaatcttatcatacaatacattaacaaaataagtcaaatacacatttaaaatcaactgtgcaaaaaggcagtatggttgtgaatactaacagggtcatttttgaagaaaaccaaagaagtccgtgtgaggatgaaccagcgtttcttccaagacgtccaacccaatcctattgagcagaataccaaaataaaatgtttaatggattatgatatcacaatagcctcagggaattgaaaaaatgagcaagtatagtgaaatgtgacaatatagggaggtgaaaaatgtcacacggatacctttagatgatatgaaaagtggaccactcttgaaaacctgtcaaataatcgtgagttacataatattagtaacgatcatcagtttagtatcaaacttagattttgacaaactagagaatatagatagtcccagagacaagtaaaattcagtaaaattctcttaattgtttcagtttatattggtaacccgacatgcacaaatatataaacaattcaaaacctctgcctaatcactaggaaagtcatcaagcttctcttttgatgttacggaaatgtactcaacacagatattggagtgttttgctaaaactttaatgagcgatcaaaccaataggggtttcatgaacagctaatcaaagcttgtctcacaactaatgtgtattaggagaatcctagaacaaccgctgccttataatacggacattgaaatctacaaactccaaattttttttattaaa

SEQ ID NO: 8489 - DNA, 1014 bp, Arabidopsis thaliana landsberg
tctctcgagtcatacggtaacactttggttactgtacattgtcagagcttttagggtttttttatttcgttttcgcttcagttttctatgttttaggttttagggttttatgtcactattttagcaagagatcatcactctttcagtttgatcaaacttgtctctgagaagaatcgaaatcaatttctagtgcaattgtggagcttccggtgaaagatgtgatttttatactttgtactgattataaacctgtttaaaggttgtagctttaagcttgatttcctctgttgttcatggtgattgaagcagatgttgtggttagaaagtacaagaaggcaagatcaaaccttaaaactttgaagagacttggagctttacttttacatggagttgatgctaccacactgcattttcaccctgaccttcgttatagaagatttgatcgcgtcatcttcaacttccctcacgccggtttccacggcagagagtctgattcctctcttatacggtaaagttcaacgatttggcgttatagattggtccttcttgctgctgaatgtgtagaccagctgctgcaacttcgaggaatatgtgtgaagagtttgtacatgttctttatttgtttgtttgttgtaggaagcatagagaactggtgtttggatttttcaatggtgcaagccgtttgctaagagctaatggggaagttcatgtctctcacaagaacaaagcacctttttctgagtggaatctcgaggagctcgctagcagatgctttcttgtgttgattcaacgtgtggccttcgagaagaacaattaccctggttatgagaataagagaggagatgggcgtagatgtgaccaacctttccttttgggagagtgcagtactttcaagttcagattctctcgtgtcgctaaggaactttatgcagagaaagtgagatcgagagaagtgaaggaacgagaatcaatgtatccggaagctattttaaacaagcagccagtgtcatttga

SEQ ID NO: 8490 - DNA, 1781 bp, Arabidopsis thaliana landsberg
  unsure (1)..(1781): unsure at all n locations
tcgttaaccaaacgcttaggacttttaactatccaataatggaaactctctcaaacatcatggttaaccctccggcatatcctccggatctcaccatccgtccccgtcaacggtgagatgttccccatcttcaccatcgacttcgcaaactgctcaaagaacgctccctcattctccgcgtaaaacttgaccatctccatagtctctatgctttgcgtgaacaaaatctcatcagaactcaagagtcctctaaagttcacaagattcttgtannnnnnnnnnnnnnnnnnnnnnnnnnnnnnnnnnnnnngattaaagaggttctggtcgttgcccgaaatcggacatccctgctgcaacatagaggcgtagtcttgattcaaagtctggtcgggatcgttgtttccagtatggttgtataatctttgtcggaaaccaatacacctcgagtttcctatcgtgtgactccctacatttgaatcatgcatggttattagttttagaaatgataattaaatttatcaatgtgttagtttatagggcatttaatctttaatagaagttatgagagataagataacttttcttatccaatcacaatcacacatcgttatttaaaacatttgtttacacttttaattagtttcttccataaaatcacaattgctttaagacccttttataaattcaaccacattaataaataaataaaagttatcttggacgagtgtaataactagtatatatacctaagagggcaacaagatcggtgagatcaagtccttgaaagttgaacatagagagaattgtttgtaacgtggactcgggagaaggaatgttttccatggaaccaatcaagcttgcttctcttgcatctcttcttccaagatatacttcccaactaggtccaccacactgtagataattacaaaagtaacgagtgtttgtatcaattatatatcaatcctaatgattgtgttagagaattgacttacaataacaatagagtctctagcaacgagagccaatnnnnnnnnnnnnnnnnnnnnnnnnnnnnnttcattttccaaggcagacttgatctcgtcaatgacttcgaaccctcgagcagagtctcgatttgcatttgatcgtttctcgctttccatggttccactactgtccaatagtacggaagcatcacatccctgcaccaaccaaagtatatatatcaaacaacatttctccttatttatattaaacattatatatttgaagaatagactagattttgacaaacattgacgaaacagtcatggaaatggagcctaagaattgaggcagccatgcgagggtcattcaagtatgcattggcgacgtaagattgaacgatggcttgtgcgtttgggcacgagttgtcgtaaaactgaggggatagagaggctacagagctcgtgctttgatgtgtttgataacaaatacatagaggaaatagcgcaacaagtgagaattgagcaagcacaatgcacaccattgacttcaccattcctgtattcattgccactctattaatttaacaaccatgcattgtgggataatttatagaagaagatttgacaagtatgaattgttacgttaacttggcttttaatttggtggatgagatacattaattgttagcgttggtttggatataagattcgttacatctatatatagcttccaattatcacttcttctttgtcttcctttgcgtgggaatagaaacgtcaatatcccttcgtattatggggctatttaaa

SEQ ID NO: 8491 - DNA, 2008 bp, Arabidopsis thaliana landsberg
  unsure (1)..(2008): unsure at all n locations
gacgatttctataacaaaaacgtatattctgtttcgttctttgtgttctcttttagttacaacgatatatatatcaaggtacttaccctaacagatccataactttatgtgttttcctatatttgttatgtttatccaattataaaaaaaatgcataacaaagttaactattatcttccgataaattcgtgagattttatgcaggtgataatgttcaataatccaatcaggcacgtaatacttttttccaaagctaaataggagaagaaatctatcaaaataggatatatttttttaggccgcctatgatcatctatatatatgaacaacccacaccttgttttaacaaacaaaatcaaactttttcacaacaaggcaaaacaaaaaccctaaaagcctctcagctgctctcttcgacaatggtgaatacttgtaggaccagcttcatcatcatcatgatcctcttgctcttcatcaatcagtctgctctttcttcttctgcacgcgtccgtcatctagaaggtcgagatcatcttcctcaccaccggacacttagtgagaaggagaaagctgataaggaacgtctcagtttcatatttagaacgatcgaggctgacatcaatctggaggaagatgtttctctccgtcttccccaatttgctcgatataataggcttcataattcctatttcagttactgaatctactagggctttgaatttgttccattaaggttcattacttcgattgatactcaatgaatcatgtaatttttatattttttagactttttatcatgacttttgtaaactcttcttcaatttaattgatatattattccagaatagtataaaaataagaaagcctctttttttttttttttttttaatattgacattcttacgctctacgtctaacttttatgtaccctttgatgtaatgcgtcacaattaattttcgtgaatcttttggattgctgatgtgataatcaatttatgtagcataccgaatgaaacagattacacatgccatttaaaagtatgaaccattgaacaccaaaatcggttggtaaatatactaatttgttgtgttttgtatatatagtttatcaatctttatccataagcgttatcaacaaaatatgggtacctctttttaatagacgtgctcagggcataagattaagactaattgcatgatccgtaatttgcgttcttaattaataaggtttatcatcttgcaggtagatctaactcatgagtatataatttaatttatttgctcaagattgaacatgaacattattgtggtgttacaaagagagatagtacgaggtaaaactatcatagaaagtgattcaagtttcttagggactataaaccaacttgtataattgaagatccaaatataaaaaggctctgatccaatttcaacagtcaaaaatcttattataaatggaccatcttacgttgacaaacgtatcttatgtgatcaccttgataagaggaaacccacgttctaacatgtagggtttcgagatacattaatatttccattcttttcttatctcgatactattatatataatacttaccacgtgaaatatcaaatcaatataaaaaaaacgtagaaacttttactatataatctcactagtagcaatgagggtaaaatcacgcaaaaacaatcatctctctataaaaataaaagaagttggttagttccaacgctagagttaagaaatatggctagccaaggatgcgtagattggcagttcagtggcagtgatgcagccgaaaaggcgcccaagcctccctaggcacttactcttctgaaatcttcagtctgtgtgaccctcaaggaaagcctattttgcctccactaagtgaagaggcagagaccagccataccgccgaaaagcgtnntgttaaggctgtcctttgcggtacgggaaacgcctatgctccaagtattggcctcccggttgccaacgggaatatatcataat

SEQ ID NO: 8492 - DNA, 1096 bp, Arabidopsis thaliana landsberg
ctatagttaaaagtttttagataaaattttagatttattatccttcacgaatcaagtacatctaacattaatgtttactatattaatttccatccgtattttttcacataagagttttggtcatgggaatgaaacattgttggagtagaggatacaagaaggttgctttaattttgaagatgactgttggggagtatcggtggatatactcaatcacaaaacgatgaactttttttttttttttttttaaattatcaacccaaatggacttgggccaaggcctacacgaaattgattcagttactaaaaatggaaactggaaaacaggccggaaaaatcaaaatggatcgactcatgttgagcatcgaaagcagagagaccgaaaaccttagatccggcgaaagcaagaaccacaactttgttgctgcctcgaaagagctcgaacacggacgagagatttcggttctcgaccaccctcttcttctttcgatgcaccaagcccgccacagaactcccagaaagttagtccctccgacaatcggttctacgacgacgagtcccgacctagctacccgacgtatctggagctatccccaaaattctcgatccgaaccactccgaaaaccctgagcagatctacttcgatccgggtttgtggaagcccaaagcggtagatctagaagacggtggctcaaccggaccctctgaacctaagacccgcttcagccatctatgctctgagccaccgaaacaaccgttaaccaaaacgatgaactttggagccaagttattggaagatgcaagatattggaagatcaagatagactaagtgaagtttgaatggttaccaagaaagcataatcaatttcagatattcttgcaaaagctgataaaccttttaactatagttttcagtctcacttttgtgttccttctattatcacgaatgccttacattgtgactatctaaactaacgacaccatattaataaagtcaaatgttaaaaaaaagtggtgaaaacagtgaaaattttaagagtgataataggtaggtgtgtttataaatactatactgtttgaattcagtaataaataa

SEQ ID NO: 8493 - DNA, 989 bp, Arabidopsis thaliana landsberg
gtcaagtgttaggaaaagacaaagcaggaagagtgagagggatgggaagaggttacagctaccaattaagctagcgttccttcaagctagagacacacatgtacagaaacttgaagcacaacaggcagaattggtcaacaggattaatgatctgcaaaatgaagttcgaggcttagctaaaggaaaacaggttagttcatctaattcattgtcttcttgtgaaaacagtctagtgaacacaatcatgccagtttgtatattattaccaattttattgtcttcttgtgaaaacagcctagtgatgatgtttctatatcggagactagtaatgctagcaaagtagtaagatgtcaactactcgattggtgttcaaaggatgatgttgttgttggagaaggagatttctgctcagctgaaccaacttacaagattggtcgaattccacttggtcaaaatgcagctgctgttattgtaaaatctgtatcaaacaaagatgcatatgtctggaggccaacaacgacgattttctcacttggggaagctgtggatgttaaaattgcatggccaactgataaaatcattttggacagtgatctgaactcatcaccaactaatcaaactgctggatcatgggtaattctctcttagtacttattatgtgaactatgaaatttatacatgctctattctaagcatataaactcttatgcatttgataggcaacaccaagggaaccacctacaagagcatcatcacataaagaatcatcacatgcggtaccccttctgttcctgtattagttaattagtgaaatttgtgttagaataggacttatcttctgttcttgttgtagctaggacttgtgttattggacatctcatgaaatttgtgtttgaaatttgtgagttgcagagtggaagtagcatgagatcaaatgaacaataaaggtgcatgttgttagattgcgatggcacaggagaaattgtggc

SEQ ID NO: 8494 - DNA, 809 bp, Arabidopsis thaliana landsberg
ttcactgtcaatagatttgatttgttcctgatacaaaaatttcaacagaattagaggaagataggaactctaatcaaagctacttctacattatcagttccttatcccatttcacttacaattgtgtcagcaaactcttgtctaacaggtcgtccatctgaatgtgtatgtcctgctacccatactttactcttagtcaccttactaggctcagaactcttattcctctacaagcatgaaaaacagtccaattcaagtttcagaataacctaagcataccttaaaatggaacagaacacacataccatctcttgagctagtctaagcattccttttttgctggtggtgtggggaatttgagccatcctgagttctctgtacttgtcacttttaacctacaaaagtgttaaaagtcatgaattcattttctacagaaacatgactgtcgaaataaagagttaaaaacacaaccttaaattctgcgctagtcctactcttcacccaatttttccatgctgcaacagattggatgtttgctggttttaaatcatgtatttgtgtcttgcttgtctttcgtactttagttagaagcttggacttagaagcacgccacacacagctcatctgcttaaaaacaaaatctttttggcatccttcggttatattgaatctttcctgtaatattatccaaggataaaccattaatatgcctccaaaaaataattttttttttttttggtttgggctttcaaaatgccgtccaccatgaaatttttggcatttccatggaaggggatgggtttttaaaa

SEQ ID NO: 8495 - DNA, 454 bp, Arabidopsis thaliana landsberg
ctatgactatcattgcctcctactagatacgggaaagaagattgcaagatatgtggatcaatcaacaatcattcaaaatttagttacttgaagactgttacagaaatcctctctgactctttattcagtaggctgaaaactacttttcttggcccaatcatcaaacaggattgagaaaagcaactggtaatcaaaaaagagttaatggcttgggtttttctggtcagctggtttactttctggtagtaagacaacttgtgtcgtcaaaaaaagacgagctttggttttgtatcaacaacaagtcgatgagattttcattgaatgagtttcatcttgtcccgggataaccacgctggataaaagaggatgaaatcccagaagagcctggtgtgggacaggccctcttctcctgggataacccggatcctggtggattataagatgccacaaaaga

SEQ ID NO: 8496 - DNA, 1761 bp, Arabidopsis thaliana landsberg
aaacctgaaagcaccggttcctccaatattggcatctctctcaccttcgaaaatatctcattctgtccattcatcgcgacggtgcttccattaaactctcccgccgtaaaagccaagttaaagaccattgtgaagcttatgttcttcatggctgtcaatgcgtacatcccttgagctcttcccacttcctttgagctcgggtctggtccttcggtcaacggatcatcagcgatcataatcacgccaaaattgacgttggaggaatttgttcggcgggcttccgcaactttgacggcggtaggtttgtcaccggagatgacgtcatggaagtaaaagtggaggtgggtgaatttatccggcttgtagccttgacacggctttgttgtggagtaagcttcggattctgtaacggatacggaaagaagtagaatagttgacaaaagaggaagaagaaggagaaaacgtttagccatgttagtgatatgatactgttggaaatgaaaatatgatttatatatacacaaagcaaaatcagtactctattgttggtttatataacatttgaatatgtcgttttcagatatgacattaccatgattcatacaggtataaacaactagatatttccacctgtatgaacaactagatatttccacctgtatgaatcatggtaacgttatatcggagtttttttaataaaggtccaatggttagaagaattctaatgctctactgcgatatgggattagtctaggtttcggtatgggattctcccgtttaacaaaaaaaaaagaaaagtactgtatttgatagtaatttaaaataggtataaataaaagtacgtagttgataattaacacaaataagaataaaaataaaattctgcattgtgcgctacataatgatgtaaataaatatataaaataaaggtatgtagtagttgaaagaaagatgtaagaccctacattcttgtctacattaatgtaagacaaagtcaataatactactgttctctaattaattatatttccttttggtacaccatgaatgatccatccacttacaaagacactacaactttttgagacggcttctgtttggaaccacgccaattattcaattacaaatgattccacccatgcgtaaaacacaccattttttaaaaagattaactaattgtttggtttagttggtcaagtttttattatattacttttaaccacactagtgagattgtatggttgaacctttggtttcttaaaatttgctttaaaagaattatataaattatcttataactaaacgtagataatctttaagaatatatatacactaatatacatgcaaaatacatgggtttttttttttgttacttgatgttgtgaagtcaaacattttcaaatacaattatagaaaaatacaatgcgtaatactatataattaggaaattatgtttaagaaagcgttaaagactgagtggacaacaacacatcgcctacaccaaaatttaatcaaaataaaacgattaaagacggttgatgtatctatggaatggtatataatgtatatgatacatcaaattaaagtaaaaacaaaaaaaacccaataattatatgtagtctaataataaaaatattgatttggttaagaatataaaacttacttatttttgacgaagccatatcatagacttcaaaaaataacaaattttaggggttcatcgtcttatataaaagataatctggaaatagatataagaaa

SEQ ID NO: 8497 - DNA, 831 bp, Arabidopsis thaliana landsberg
taaaacatacatacaattcactaaccaaaattttgctacaccgtccctttcgtccgaagacactcacatctcaagtcgagatttatttcaaactaaaccttttaaactattaaggagacacaaccaaaaaaaaaaaagagagcaaagtgaaacaatttattttcgaattacataaccaaatcccaaaagttaatgccaaatgaagacattatactcaaccacggcatctatatttacaaccttataagtctttggcagtgcatagcctctagcaaacctgaaatcgccggtacctccgatgatcggcaactctctctcctccagcagtatcggattccgtccatacaacgcagcggtgctgccgataaactctccttccgtgaacacaaagttaaagaccattgtaaaaccaaacgttttcatgtccgtcgatgcgtacaacccctgagctctccccacttccttcgagctcagctcgggtccctcagtcaacggggcgtcaacaataagaaccgcaccgaatacagtagcggaggagtttgttcccggggcttcagcgactctgatggtggtgggtttgtcaccggagatgatgtcatggaagtagaagtggaggtgtgtgagtttatccggcttatttccttgaaacggagtcgttttggagtaaggtttggattgtgttacggtgttggtaagaaggagaacagttgagaatatcaaaggaagaagaagaagcagaaaaggtgtagccatgttcgttatttgtaacatatgtgacttattgcatgaaagcacgaatttttgttggtttatataacatttttgtgtgtg

SEQ ID NO: 8498 - DNA, 545 bp, Arabidopsis thaliana landsberg
  unsure (1)..(545): unsure at all n locations
gcaatacaaaacagaacaattgttatatatatatatatataaaagaaccaaaaacaatatgaggaaaccagagtgaaacaatttatttcggaaagacattagacaatatgcaaatgattaatgccaaatgaagacattatactcgaccacggcatctagaccaacaatcttataagtcttgggcagtgcatagcctctagcaaacctgaaagcaccagttcctccaataatcggcaactctctcaccttcgaaaatatatcattccgtccatacaccgcgatggtgcttccattaaactctcctgccgtgaaaacatagttaaagaccattgtgaagactatgtccttcatggctgttgatgcgtacatcccctgagctcttcccactttctttgagctcgggtctggtccttcggtcaacggatcatctgcgatcatgatcacgccaaaattgacgttgagggagtttgttcggcgggnnnnnnnnnnnnnnnnngcggtaggtttgtcaccggtgatgacgtcatggaagtagaagtggaggt

SEQ ID NO: 8499 - DNA, 535 bp, Arabidopsis thaliana landsberg
  unsure (1)..(535): unsure at all n locations
gaatacctgcagagagttgaagattgcatgcttagctttagacatttgaccttggtatagtgcttaactatgttcttgtcttttagttgaataaaataacatatgcaagtaatattataacaaaaatgtaaagacatggaagtccaatgaagtaggtgtagtagtggaaaactaggtcattttttacttaatttaatcatacatgtaaacaattatacactaaatgaagaaatgaaaaattgaagatagactaacttgtttccaagaagacgatgaagttggatgatggtttcttcctcttgaagagagaactctcctctcttgatatcgggtcttagataattcgtccatcgcaatctacaactcttcccgcatctttttaacccttttaagattcacaccaagaaaaacgaataagaaccatgattgttttaattttaattctaacgttgacatgatctagcatgattatcattattaagtaattntaaacataaacgtaaaacaaaacgcaggaaaacatattgtagctgat

SEQ ID NO: 8500 - DNA, 1472 bp, Arabidopsis thaliana landsberg
gacttaggtaactctccgaccaaccagttataactaatgtccaaaaccgtaacgttttgaagtaatcccatgtcattaggtatacaagattgtaaaccgttatccataagaatgatctcgtttagagtcttacccattttaccgaaactcgtcggtatacatccttcaaaccggtttgaggctagaactagaaccgataccggtgaatttcccatgttaaccgggattttacttctaaaccggttactattcaggaataaagcgtcaagatctttatcgaacaaagattctggtaattcaccttcaaactcgttgtaccggagatcaagatactttaatttcggtaaaccgattaccacttccgggaatttaccagcgaaccggttattactaagatcaagttcgaaaaggagactcaactgcgaaaacccgaccgggagtgtaccacagaaccggtttgagttaacgtgaaacagagcaatatcggttaagaggccaagctcttcagggagatgaccagcgatatctccctggtttagatcaacaccggagacagttttaaccaaagggtcgtcgagagattcggagcatactacaccgttgtagtcgcacacacgtgatccaaaccagttagttgtcagattccacgggtcagagatcatggcacgtttccacgcttgtaacgccacgtaagctctttcgagccgtacgttttcgaatattaggtacggaggtatggttatagggtcgtctcgggtgtacaaaagttgccgggagccaccaggagcgacggcggagatggagagtaagacgacggtggtgaatattaataaggttggttgataaatcctcatcacactctaatggagttttatgtttttgttaatcactctccttcttcttcttcttcttctttattatttttttggttttctttaagatttggatttgtaaagagagagagattagcagtgaaaggtagtgattcttattattagatgtgagtgtagagtaaaaaaattgtaacgctatttttagtagatttatgtgaaactgtttgttttttcattacagtattggctttgaccgagaatgtctaaaaactaatgttttctcttggtcattttcaattctattacaatgagacgatgaataagtaaataacacgtttagttttagggagaaaaagacccactagtttagcgtaaattaagatttttggtataatttattttgaattgacttggcaaatttgaaatgaatttgtcccactactttagcgtctgagatgatgatgctcataaaacagtatgtgatgatgctagtttttaagggggtttgtttgtttggtgtgaacccttatattaagttaaccgaaatgtctactaaaccaaatctgatgatcataacttacaaaagaggagcaccaccatatataacatattgaagcactacgaaaccataatcgacct

SEQ ID NO: 8501 - DNA, 2164 bp, Arabidopsis thaliana landsberg
caattagtgtaacttttatttgtaaacaaagttatagtaaccactggaaacctaacaaactggtttaacatgttgtacacttggattcgttaatgccacagaacttggtcaacttgtgcttcttgatctctttcttacaatcaatcatgctcccattcatgaaatcatacggaagaacttgaaaaatgaattgtgagaaagaagaaaaagaataatgtatacgagcgatcgagtgatcacgtttacgagttagattctagatgtgggaaagcctatacgtcggctcgacaacacagtcgtcaacactagcaattcactagtttcagagttacagatattccacaagcttgatctcacgccaacaaccctaaagatcaattcttgctctggttatagaaacaaacgaacaacctccttgatttcacttttaactgcaaaatcgttaatttgattcaagactcaattaccacaaactagtccagtttactcctagagattgattggttttcatcattagatcaaaatatacaaaacttcaacagtcagaaatttattatagaggatttgtttcatcaattagtgaaactttcacctataaacagatttatctagctggttgccactgaaacatcgcaacatggttctatatttatcaaccaatatatacaaatctataggtttatatatcatagatttgagtctactcaaaattgattctccatttctataggtagagacacaaactaacacccaaaacccttataagaaaagtggacctaaaagagaaaatgatgtgcttaatcatatcttgcgactaaaaatatagaatgggcgatgcctcttaagtcaaataataatgataacattcttttatacagtacactggccttaaccctacaaaaacctctgcttgctcagttgcttccatcgttttcacccaataattacaaactactgtttcaaaaaaaaaaaaattacaaaatatgactacgtccaaattttttttattttatgtcgatcatcatatagcaaaggttaagttagtgacttctaaaagtttacagactaggttaatagcctagagcttgataataatatgcggggacatttctctgatttaaagctttgattttatgatagacttgtaacctagattgcactttttagaccatgatttcaagaacagtggagatcgttgaacaattttttaggaatgataatattctgaaatatgttcaaccgttaaccaaaaactaatgagtcataatcaatctaaatagagtatgttgttcctaattttcctaaaaaagataagaatctacaacacataatatacgccaatttaggaaagcccgacaaaaacctttattgtcttgtagtaattaagtgacctgattcgcgctttaatcaaatcaaatctcaatcacgtaatctcaaattttccttgtctgtcaaaaagaaaagaaaaacaaaacaaaacatatgaaaatctcaatttttccttgcaatatgatacgaacaaaaatatcatagaatctttttctataaatgggaacattcgcatctgtattcctacttactcactgaactccactacttctcaaaaatggggtttcgcaccagaaacctctcctttctcattctcctccttcttaacttctttgctgccacatacgctcgtgaatgtagccctccaaaaccatcacctaagcctcacaaaccaccaaaacattctgtcgtcccacctaaaccaccggcggttaaacctcatccccacccgaaacctcccactataaaacctcctccgcctaaacgacacccccaccctaaaccacccaccgtcaaaccacaccctcaccctaaaccccctaccaaacctcatccccaccctaaaccacctaccaaacctcatccccaccctaaaccacccaccatcaaaccacctcctcaccctaaacctcgtccccaccctaaaccacccaacgtcaaaccacaccctcaccctaaacccccgacaaaacctcatccccaccctaaaccccccaccaaacatcatccccacccaaaaccttccaccataaaacctcctccgaaaccaccctccgtcaaacctccaccatcaactcctaaacctcctacgaccaagcctctctccgtctactcc

SEQ ID NO: 8502 - DNA, 1361 bp, Arabidopsis thaliana landsberg
tggctaccatatacatacttggatcatcttattcacttcatcaccctctgttaatccaaatagatgtctttcatgtagacttagcccatgctaggactaggtggagacttgtatttgggattgggattgtgtatggattgactgggaaagagaatgagaatgaaaagaaaagaaaaaaaaaagagtaaaagtttagagttcttaagggcgatacataaagtgttagtctagtaaaaggtttggaactcaaagagagttaggcattatgattcaaagaaaacggtacaacgccctatatgctataagatttgaagaaaagccttaagtttgtcaaagtataaaaccaaacccgctagactcttaaatcgtttcaaagaagaacccctttagaacttgaaagaaaaagagaaagaatgagaaaaatggtagagttaggacatctatgggacagggatcatcttctgagctatcatactatatatcattgggtagatgggagtctgttcttgtatgtgtccattggcttttacctttagcattctgctaaagctcaatcttttctctgagagtccccagttactcgaccaaataattagagggaccatttttgtctcttagcctaagctcgagaccaagttagttcataaccattgcatttcttgatccactgttccttcttaatgaatgttaaagggaattggttgatgttaatgcttgaatagattaaggcaagttgttaggttgcattgagacgagtatggctaatttttttaagtaagggtttatcatcttgtaacctagaattagctacctagacattgcgcttacctattttatatgcatgcttcgctttttgaatccccaccttcaaacttctacttcaacttaagatttttgtttgcttgagggcaagcaagagataagtttgggagagttgataacactgtattttacccattttaggtgtatgtttatcatcatttagctttgcatttgctcattgtatcatatcattttacaccattttagcttgttttgcatacttaggcatttaggatcatcttgcattcgcattgcatgttttagtgtgttttcaggtgcaaaaggagcttaaaaggactctactcgatccattcactcgatccaggcagctacagaagaggcatcattctactcgacctctttactcgatccaggatgccacggaggaggctgcagtttactcgaccctcctactcgatcaaggcaacctcagatgaagcagcagattgatctactcgcccctcctactcgatccactactcgatccatttactcgaacagggtgacacccctacaagacttgttgagctatcgaagcg

SEQ ID NO: 8503 - DNA, 1715 bp, Arabidopsis thaliana landsberg
acacaagacaccaccatgaaacttgtcgtctctttgatacttgcaacttttccaaaactttgggtctgtaattcaattattagagtcttgaacgtgaagagactttaagatatgtgtgtaaatttgttcaccgtcacattattggtccatttacattacacacgtccactatagttaattctcaggttgtttatccatagatatctgttgttatttctgcgacacttttactggtcacaatgaattatgttgatgtttagattcaacaaaaaaacttactaaatcgggtaactatgaaaaaatattatgtagctgagccaaaaaggtaaagtctacagtttaagaaacattaacacattgaacagaaattaagaaataatataattctatttttaatttttttactgaataactaatagtcacaaaaaatcatattacggccttaccggtccatttatgcattactggtccacaaatgtaaattctcacgttttaaattccatctgtttcaaaaaatttggacactttttggtggttaatatgttaatgattagatttcaaccaaaaacatcaaagttataaatcggacaattattaaaatttgtaatctagatgcaccaaattgtaattttttaaaaaaaacttgattatttagagatgatgaatcgaaggcatgcattaattgcgtagtacaaaacaaatcttgataaatagataaataaacatctttctattcgtaaggacgacaagaatctctcaggttctgtagaattgtcagaatcatttctaatgggaggtaaaatgggatcagtaccggagcaaaacacagagaagcttctctggcagtcaagcgacgtcgctgatagtcgtgactccaagttccggtgttgctcgtggagggctctctacgaggctccggcgaagttgtacgcgctgggacattctgatcgtcggaaactttacttctccatcaagatgggaattgctttggcactctgttctttcgtcatctttctcaaagaaccgcttcaagatgctagtaaattcgcagtttgggcgattctcaccgtcgttctcattttcgagtattacgtcggtattgattcttaactcatagcctagtttatgatcctttgattggatctttgagttttgtttttatgttttgttggaatcttgaactcaagacacttgcacatgtgaagcaaatctagtaaagattcttttaatcctaagactgttcctttttttggattccatctttcattttgatgggttcggatttacttattgagttacattttactgtattattcacattttcagaccaactcttatactttctttgcttgttttttacttggattgaatatttttcactgttttcgagttttctgtttatggaatccatttgatggaactaaagacatcaattggttgattgtataatccatctttttgtataagtggattcaaagattttttctattttctctgttcagatttacttattgactttgcattttactgttttatttacattttcagatcaattattctcatacttattgagtcactcttatgttcaattttcaggagcaactttggttaaaggattcaatagagcattaggcacaatgttagctggaggacttgctctcggcgtgcgcagctctctgttttagcaggagagtttgaagaagtcatcatcgtaa

SEQ ID NO: 8504 - DNA, 270 bp, Arabidopsis thaliana landsberg
cctcctcggataggtgtactagaccttctgcggcaactctactggctacctgcctttcaatctcccccctctcgaattctcactgacatcaattgagaaacaatcggttgaagggaatcttttcaccattcgaattaaaatcaggaagcgccccagagagacgaaaacagaaatctgcactcatctcacacaatgatggctccatcaaggccttgccgaatatctgggaaatgacaccacactgggctacaaagctgtcaatgatgacac

SEQ ID NO: 8505 - DNA, 1747 bp, Arabidopsis thaliana landsberg
ttgttctctcagctattttggcagcaacagattctaactcttggagtaccattgttccatcagtggaaatattaactcttgttttgacgtttacgatagtctgcaaatccaagaaatcttttttccacaatgattgcttccagacatatataggcaaaatatctttgttggaattcgacaaaactatcacaaagacactgcagatataagccgtaagaacattagccccataaaatgccttcataagaacctttgcttcttttatacaattcttgactttatgaaagtttaatgattcaacatatctcccaagaacttcgcggcatttcgatatttccgcggtgatattttccctccaactatcaagtgcggaacaaatctcagtgcatagatcctcagatttcatttctaatttatgcctaaggaactttaagcaaacaatgccatggttcatgtgacgaagcaaggacataaaagcgttacacagatcgagcaattttgtatttatgttcatgtaattctcaaaccaatatccatgctccgaatcagtcatataatgaagcttgagatcagtgatgagaatgtttatatcattatgtgtatcataaagtaattccatagctagaatcatccaaggtaaggtgagaatctcatctgtattttgaggtatgagtttcttcaatctctcggttaatgatgactcaaagttgttcaataataaatttttctttggaaacaacatcctgaaaaatttctttggccggaagaaacattgcgctgtaatcccttgttttgagatcatcttgaaaagattctgagaaataaaaaaaataagtcatcagaatttcgatttgtttgataaactgtcgtttatatgaacattgatgtccaagaaaattcgaaagcaaaatcacagttcaataatgaacgagaactataccttccgaagtcaagaaatcacaacaaaatgtatcgatgtaggtagacgagaaatgtaccacaagttttttttttttatataggtattactgtattattgagagaggacatcgtaataaatatataagtatcccgtgatgtgattgatataaattagggaagacataattttggcaaatcttcttctgcctacagtagttatttgatcaataatcacatctggatttattcattaatatatggatattttgggacaaaatcattaatctaaagttaataaatattatttatatgacatataaagataattaaaaatttggcctaaaaatataattcaaatttacatttttaaaattttctagcaataagagatactttctttttaaaacaaagataatatttttttatttgataaatggtacaaatttaagttaacacaacataagaaaaagaagcaaatcataatatttatatttatattctaatttggcctaataaaagagtatctttatatttatgtgattgacaaatgacaatctttatatctagtaaaacaaaaatcagaggaaaaaaaaaactaatcagatctttctgattaggttttgacatgtttttaaaatttatcatttgtaattaactaaaattaaaacaatttaaattttggcatttacacatgatcaatccaaagatatcagaagtccaaagtaatatttcaattttgtaaatgttgattaaaaataagcaacaaaaaaaaacgagcaaaacatatgcaacatttaaacttcatccttggtgggaattttttata

SEQ ID NO: 8506 - DNA, 1360 bp, Arabidopsis thaliana landsberg
gaatcattcgtgacggtttatttgattcaatgattagggagttaactcatggaccatacatatatgattaaatctcattttttctttatctttagacgatgcctctaatactatatatatacattaaatccatttggaactattttgaaacaaataaattgaactcatgaccctatatgatcttcttttcgattgtacaatataactttggatatataagattttcaattttacccattttctctcagtgttgtaatctctttatgtactgaacaataaaacccttcgtactggtacagtggtacattaataacttaataatgaacacttacactagtatcttctgatctcattttcaatgaatggtaatatagttttcttcattttgtatttatgttcatatatataattctcaaaccaatattcctgctccgaattagtcatatcatgaagcttgagatcagtgatgataatgtttatatcattatgtgtatcataacgtaattccatagcaagaatcatccaaggtaaggtgagaatctcatctttattttgaggtatgagtttcttcaacctctcggttaatgatgaacacgaagtggaggagttgaatccaaagcaaaaggccacaacgtgttgacaatacttatactactgcttgcagcagaagctcacaagatgttacaccgcatccaacttctgcttgtagcggaaggtcacgtcacgataatagaggcagtcgaaggttagacgacattgaaatggttttgttgccaataagcggtcttccaacttctgcgcgtagctgaagtaagtgcaacattaactcttttttattttggttgatttcattgttttcgttagcagaaaaacgagagcttagagtgttggcttagcattgatctgtgtttgcatcatagattgtacgtgtttcttctttctgttgctgcctttggacacaacacagtctttagagacccattaaaatgagatttgatcaacgctgttgcaggaaaaggttcaacatttccattttcctccatgacatgagaaagagaggcatatagaacaatccaagtgaaaacttctaaagagtctggtctgattcagtttctttatgaacaagtaatcattgtctcagcttctctgtttcatctcccaatctcacatggatttgttcactttctatcgataacttatacttcttctcacagattggttaaccaaaatcacagataatccctgcagagaaattctcgtaaatatgaaattaggttaaagaaaaagattacaagattgctaactcatttgataactacaagtcttaagctcaacattatcaatctccaacacatcagtc

SEQ ID NO: 8507 - DNA, 1361 bp, Arabidopsis thaliana landsberg
ctccatatgaataatgattaggattacataggtttatatagtaaagagatttcataaactagatgaatacaattatgtaaaatatcttatatcataactatacaatatttgattatatattgagaatcttctagatacttccatacccttctatagttttaactcaaaaatcaattggcaattggatttaaagaatataatgtgggattccattacacttacgatggatttgctcaaaaaaagaaaaaagaaagaaagattccattacatttaggatgtgagattcgtaacacgattcaaaataatagctaagaccttttatcttaccgaattcccttttaaaactgcaatataccctacttggatcaccctaaactaaagtctaaactatcattttatggttataaacttaattaaaaccaactgacaatgaattaaaaaaataatgtgagattccaaacattatttaatttttggttgtaaaattccaaaaggtatatttaccgcctttaaaaaaaactaatgaaagcaatttaaattgtttctgtgtatattctcattatttcccgtcacttttgtaacaattctaacgttagagcgatcactcactcgcgtaaattgttttttttttattttaaagcgttttaaaccataacataaaaaagtttaaggatattataatttttatcaaaaattaatgatattaggttatcaagtggtcgagtaaatcatatgtttatataatcatataaaattggagaaaaagattttctacctatataaatatagatcatctgtacatgcactccacctcattgcaaagcaatttccccactatctatcctccataatatagtattcctcttttctctcctacgttctctatagtaatggcttcgttacttctcacatcttccagtatgataaccactagctgtccctccatggttctccggtcagggttacccatcggatcttcttttccctctcttcgcctgacccgtccatacgacaaggcgactctgttcgtctcatgttgctccgctgagtccaaaaaggtggcaactagtgctactgatctcaaacctatcgtggaacggaggccggagtacattccgaacaagcttccccacaagaactatgtgcgtgtattagacacaacgcttcgtgacggtgaacaatctcccggtgcagcacttactccaccgcagaagttagagattgccaggcagctagctaaactccgagtagacatcatggaagttggttttccggtgtcgtctgaggaagaattcgaagctattaaaaccatcgccaagaccgtggggaacgaggtaattactttatttccctcacttcac

SEQ ID NO: 8508 - DNA, 1203 bp, Arabidopsis thaliana landsberg
tttattatatataatttatgtaaataggtatagaggggaatatttatgtaaaaatgtacacatataaaactatttatagaaagtataatattctaaataagatatcaaacacagtataatatttaattttgaagaagatactattttgcttttaatgtttccatagaatataatttcttattgataccaaacgcgaaaaccttatatttaaaaccctttctaatattactagcctttaagaaacaaaagtacaaaactaatgataagtttagttaagctacattccgctaagtcaaatttttattatttttaacatcaaaacaatctctctataaatagataaattatattgtataatgttctccatctcaattcaaaacaattcccacactatctttcctccacattaaagtaaagtctctttctcttttttctcctacgtactccatagttatggcttcatcgcttctgacatcttccggtatgatccctaccaccggttccaccgtggttggccggtcagtgttaccctttcaatcttccctgcactctctccgcctgacccattcgtacaagaaccccgcattgttcatctcatgttgctcttctgtgtccaaaaatgcggcaactagttctactgatctcaaacccgctgtggaacggtggccggagtacttaccgaacaagcttcccgacgaaaactatgtgcgtgtattcgacacgacgctccgtgacggtgaacaagctcctggtggatccctcactccaccgcagaagctagagattgcccgacagctcgctaaactccgagtagacatcatggaagtcggttttccgggatcatctgaagaagagttagaaaccgttaagaccatcgccaagaccgtgggaaatgaggttttttctttatatccttcacttaaatgattatgtacttcatatttaacaaaaaaaaaaaacttttgataatttacggattttatgttcaaactgtatatatagttgataaaatgcacatgacccttatagttgaggccgaaataaagaaatcaaattatgtgtttagaaatgtttcaaaagcggctgatgaacaagagggaaacaatagggtttttggttggagaacacaagactcagaacttgaaaggttacttgacaatataaaatttattgtgtgggcttggactatttgtcttaatttat

SEQ ID NO: 8509 - DNA, 1603 bp, Arabidopsis thaliana landsberg
agcagattcgagtgaggtggaagctatgttgagctggccttgtcccaagtctgttactgagctgagagggtttttggggttgaccgggtattatcgcagatttgtgaaggattatggaaggattgcaagacccttaaccaatctgttgaggaagaatggttttgtgtggaatgaagaagctggtcatgcatttgaagcgcttaaacagtcggtaactcacttacccgtgttgatcttgcccgactttcagaaggagtttacagtggaaactgatgcatccgggacaggaataggcgcagttctaacacaagacaagaaaccgattgcatttctaagtcaagccttttcaagccaagggaggatcaagtcagtttacgaaagagaactgctagctatagtaaaggctgttactaaatggaagcattacctcgctggaaaagagtttgtgatcaagacagatcagagaagcctgaagcatctcttggaccagaaagctgtatcaaccatacaacaaagatgggcttcgaaactaattgggctgaagtataagatcgagtacaagccgggggttaataataaggtggttgacgccttatcaagaagaccacaactggaaacggcactgcagtacacgatggttccaccgcacaccttggatacagaattgctaaagaaggagctcaagagtgacaaggagtgggcatcattgattacgaatatagagcaagggaagtacacgggcattgagttcacgttgtcgcaagggcttttgtacaagaatgggcggttggtgataccaaggggatctcccttcattccaaatttactggagcagttccacacaagtgccacagggggccatgagggagctctgaaaacctttaaacgactcactagtgaagtgtattggccaggaatgagacaagatgtggtcaaatacataaagagttgtcaaatttttcatgagaacaagtattcaaccttgtcacccgctggtctgttatctccattacccataccgcagcaaatttggtcagacatcagcttggacttcattgagggacttccaccctccaagggattcaacttaatcttggtggtagtggacagacttagtaagtatggtcattttatcccgtcgaaacatccttttaacgctaagtcagtggctgaggcctttgttagagaggtgattaaacttcatgggtttccatccacaatggtctttgatagagacaaaatttttctgagtcacttctggtccgagctgttcaaattgcaagggacttcactgcagaagagcactgcctaccacccgcagtccgacgggcagactgaagttgtgaacagatgtcttgagtcctacctaagatgcttcgcgggaagacgtccttcagcttggattcagttgttgccttgggcggagtactggtataacacctcgtaccacactgctaccaaaacaactccctttcttgcggtttatgggagagagccaccacctgttcttcgatatggagacacgcagacgcctaatgcaagtgtagaggagcttcttaaggaccgagacagtattctggaggagataaaggagaacaggagt

SEQ ID NO: 8510 - DNA, 951 bp, Arabidopsis thaliana landsberg
acttgatagtttcaaaatactttgtattccatcttgctgaaaaatattgtttcggaaatgtaaaaatcgaaaatatatattgcagtacgcgtgtgtccaatgaacttggagcaggaaatgtaaaaggcgcaaagaaggcgacctctgtgtccgtaaagttgtctttagttcttgctctcggcgttgtaattgttttactcgtaggtcatgatggttgggttgggttatttagcgatagctatgtgattaaagaggagtttgcatcattgaggttttttcttgctgcctctataactcttgattcaatccaaggagttttatcaggtaaaagaatccaatattttttttttactcatctagggtggtaaaaatcattgttaaatttatatacaggagttgcaagaggatgcggatggcagcgtttagtcacggttataaatttggcgacattctacttaattggaatgccgattgccgccttttgtggtttcaagttgaagttttatgccaaggtattgcttgattctataataagattagtaaattttgtttgattatgttatgtttgattcattattttgatggcgacagggtttgtggattggtttgatatgtggaatattttgccaatcatcatctcttttgcttatgacaatattccggaagtggacaaagctgaatgttgctacggtctgaaaactctagttacgttccatttttctacggaggcacatttattttcttaagcagatatggaatcagttatcaagatatatatttggaactcatgatcattttccaaacgcttagttaagatttatctttcttagttttctttttattcttttggagtgtaagggaaataatctggttcacaaagttggtcatggcttgaatattacagcatcattctaagctatctttgaaaccaacttcctcttagttgcgttc

SEQ ID NO: 8511 - DNA, 1508 bp, Arabidopsis thaliana landsberg
gggtcccgaaactctttttgtaaaacctgttgaatttataatgaataaaagatgctttgctgataattattggttgttctataaaggccagtattgaggcaccattttaggctctggtgcagcagtatcaagaacatgaaccattttatgtcaccttcaagtcacatcaaagttaaaactcacatggcaatcaattccaaatcataactttttttttaactataattgcttgaaataaacattttatgagatctgaagatttgtggattttttttccattttttaaatagtaaaatgtttggcaaccaaatctgaaaaagaggtaaagacgagaggtctcgcgcttatccttaaaggactgtggtgaatggtgagtgtgacttggagggaccccatcaccgcaacaatacagcttcttagatctcgataaccacaacttacctgtcacagtttcgattagatcttctcaaaaacttcacctttttttgtttttccagtttctcagaggagatcttccttcaaagctcaaatccttttgtctgaattgtgatactgctgtccccatttttctgcaagttgggaaatttctgtcaaagttttgtgggtctgttaaaaagatctgagctttgaacatggggagctcaatggaggagaaagtggtggctgtgatcatggtcggtggtccaaccaaaggtaaccgctaaatatgttcgctttttttctttctttctttctgattcctcctcaaaagcaaatgactgtgaaatctcgattgatcaaatctaattccgttagattttgatatccaatgcgtttctctcttgtttggttattagtttcgtgtatccgaatgattatggttctgattctgtgtaaatattggttattgagtgatgcacaggcactcgatttcggccattgtcgctgaatattccaaagcctctgtttcctattgcgggacaaccaatggtgcatcatccaatttcagcttgtaaaagagtaatattcttcactcatgatttcaacaattcagatcactggagagactgagagatgatgataccaatcccttattgtctgcagattccaaatttagctcaaatatatcttgttggcttctatgaggaaagggaatttgcactttatgtttcagccatctctaatgaacttaaagttcctgttaggttagtgaatctctcctctttttgcgttagcttcagctcaagtatcagtggctcattcgtgtagctctgatctttcttctctgttttttttttttgggattctgcaaattagatatctgcgagaagacaaaccacatggttcagctggtgggctgtatcactttagaaatcttattatggaagatagtccggttagtctccaaggatcttactatatagaatcattcttcttttgtgttttatggactaaatgcttcttctcacatctgagttcctatatctacttcttgcagtctcatatgttcctgcttaaatgtgatgttt

SEQ ID NO: 8512 - DNA, 1590 bp, Arabidopsis thaliana landsberg
  unsure (1)..(1590): unsure at all n locations
ttctatattcatatatacttaaatattatttatatatgttttaatataattaaattcctattatatccttagttttttttaaaaatcttgctaaatgattaaatattcccaaattaattagatttatttctaaaactaagttggagaaaatattgggcaaaaaacaatattaatttactttccttttttatatagataatttcatatatttttcttctttgattcttgttttttttttgtttgacggtattttttttcgattcttttcacggtcacctgtttctattttctgttttggtagttttttggatatctttcaatttttcggagcttttgtatcgaggtaaaattctatatgtccttgcttgtgttgaattattgatttgtagtgttatgttatttctaaaagtttaatcaaacaagttgcagttttcatctttcgtgtgtctattttgttcatgtccaagtcctctgttactttgttactttgtctctttgtctctttgtctccttgtctcatacatctgactcttttcaaattattgtaaaactaatcaattttggttataacataaacgttaatttgtttttttttttccttttgcactaagtaacgtaagaagcaaagtctaacacttttatcacatgacttgtttccattattttcttttgttactaaaccttaatttgattacataattttgtgccttttaggcttattttgttgattggtgacattttcaaaaactttgcattatattccatactcatttaccaagatttcatgattgttgatatttacacattttaacattgtttttgcttttgtcatagaaaatgagtgttgtttaaagatggaaatagtcacaagtggagaagttaaataacatttgcaaaatgtctcttttgaccaaaataaagaaaaatttgccattagagtatgattaagtgaagagagatccagtgttcgcacatatctttgcaatacacgaaaataaactaagtgaactaaatttattttccttttttaaaaataaattctaaattacatagaattgggtttctattttctatagaatataaaagaaaaaataagaatgtgttttcaaacaattttagaaaatgagtaaatgttagaaaataaattctaaattttctagaagaaagaacaaagaatcgaatatgtattctaaattttgtagaaatagcattttaaatactatagaacataaatgaattctaaatttaatagaacatatagagttcatagaatacgatatctatttgtgtgatcaaaagacagcttgaaagtgtatttcataaaaaaaccggatgacggctagggttctgcgtctagaggcnnnnnnnnnnnnnnnnntagatctatcttcttagaaccctagatttcagtcagagattgaagatttttcgatctgctgtgtcattaagctcgtgtggcttctgtttatggatttgttttcgtgttgaagttggagtgaagggtatttctctaactacaatgaatcgtcctcggaagaagaaaaagatgtctcttatggacgaactgaaagagctagatctgctagggga

SEQ ID NO: 8513 - DNA, 2108 bp, Arabidopsis thaliana landsberg
acaaaatcaatatcaacttatgcgacgttgtcaccatgctgctgcatcgtttggcagccacctatatgtgcatggcgggattagagaaggtagccctgaatttttaaattatattgacattaaaataaaaggaacttatacaaattttgttttttgagatggattttgcatatcttagcactagtcaatttcattgtttttattcatcttctttgagttaaggcaaagtaacaatatttatgacaattccattgttgtttttattcttgtgtagatgtattgctcgacgatttgctagttgctgaaacatcccagtcttcaagtcctgaaccagaagaagataatcctgataattgtaaaatcaaaggaaacttatatagttttgactttcatatattagtcctatggtttttgcatatctaagcactaatcaatttgactttttccaagtttgcagatttcttccttgagttaaaagtaacaaagtttcttttaacaataattgcttgaattttattctcgtgtagatatgttgctcgacgactatctaatggatgaacctaagcctttaagttctgaaccagaagcttcatcctttataatgaggaggtctatactcgtacacacttttctacactcttttgttctgtgcttaatcctatataggtttttttgtttttttaaacaaatccttctttcttccataatgatatcagcacaagtgaaattgcgatggatagattggcagaggcacataacttaccaactatcgaaaatgctttttatgatagtgctattgaaggatacgttccacttcaacatggagctgtatgtggaataatatttttttccttcactcctctatctttctttatatagaatgttatatgttcaataaatgagtgttggttgcgatttcaaaggagacggttggaaatcgaggtggcttggcgagaactgcaagcttggatcaatctactcaagacttgcataagaaggtgtatatatatatatgatcttgctttcagcatatattcccatcttcatgcacttacacgttgcttgctttgcaggtcatttcgacactgttgagacctaaaacctggacgcctcctgccaacagagattttttcttgagttatttagaagttaagcatttgtgcgatgaggtagagaaaatatttatgaatgaaccaacacttcttcagctcaaagttccaatcaaagtcttcggcgatatccatggacaatacggggatttgatgcgtttatttcatgaatatggacatccttcagtggaaggagatatcacgtaagttcaagcttcctagcatgtttttactggtttttgagttttgttcatgaatattagtcactgaaccaatcgttgtgtgtgtgtctaaatatatatacgtcttcatcagccatatagactatttgtttttgggagattatgttgaccgtggacaacacagcttggagatcatcatgttgctgtttgctttgaaggtaagatattctttcttatatgttatgactttttgattttagtatcttctaagatctgtctcttatacgcagatagaatatccgaagaacatccacttgattcgtggaaatcatgagtctcttgcaatgaatagaatttatggttttcttacagaatgcgaagaaagaatggtacgtctcttcagagaatatatattctcattgtcattggctaattaatgaagtaacatatataatcttgttctgtacgttaccagggcgagtcctatgggttcgaagcatggttaaagattaatcaagtttttgattatcttccgcttgctgcacttctagaaaagaaagttttgtgtgtccatggcggaattgggagggcagttacgatcgaagaaattgaaaatatcgaaaggccggcattcccggatactggatcaatggtcttgaaagacatcttatggtaacatactctcaactatttctaactttttttctttccaagctgtgtaataacatttttttatggataaacaggtcagatcctacgatgaatgacactgttttgggtatagtagacaatgccagaggagaaggtgttgtctcat

SEQ ID NO: 8514 - DNA, 1513 bp, Arabidopsis thaliana landsberg
ggagactcatactttggtctcctcagctgcaaagaagggaatgggttttttcggagctggaagacgtccaatgctatcaaccttatcttgttgtttaggaggtggtcgcgctgcttttggcaataaccttcctttcttctcaaaccattccggtttaagcaatgcccttaagcccaacttgttgtaatacactcttctcactgatcctcctgctgcttccaccacctctttggccctaaccgtcactctcgaaacctgtaataaacacgctcataccgattaactgaacatctaactaagcaaatacattgactggtgcaacggctctagagactacagagcaaaagttaataacgcaaatgataaacctcgaaatgaagtggccatttgatatcatcagcaccacgacccattagtcttactccatcttctatttgctttcctatggctcccacatcctgcaaaccgacgttaatgtgttcagtaagaatcagacatattaagaatcctaaactcaatttaaaccgttgaatcaaagagtgaagtatgaccgaaccttgagcgttttcattgtaatcaattcatgagaatctatcttcccagcatttatgagtttagcaatcttccctagaccaaccggctgcatcacaaaacaatcataaacatctttagtcgctgcatcaatagagtgtcaaatcctaaatccttacacacacagtataacctacttcaccacaagcagctaaagaacagcaataatggcatacagaaagaagaacaagagtgatccatctgatttagattctcaaattcgacctaatctaaggaatcaatcacaaatgttaacccttcgaatcaagggaagctacaaaatccgaaacttgacctcagaaataaaaatcccagaactaaaaggcacaagcttgaacctgaaaatggagcttaaatttgttcttgaagccacgtttgggtaaacgacgtcgtagtggagtctgaccaccttcgaaaccaaacttcatcgttcctctcgctttttgccccttgtgacctcttccagcagttttacctttaccagacccaatacctcttcctttcctcgtcttgagttttctcggcacattgtctctcagatcgttcaagctcaataaactataagccctgattccttgaaacgacaaagccctgctcgtagaggtcggaatttgagtagagatcggagaaggacggcattgaagaagtggtgaagaaatgatgaatctgggtttcgcggtttgatgaaacgaagaattgatgagtgatgttgatatgatcgacaagagtcttcttcttaacatttcttcgttgcgggatcaagtagatttcgattttagagatctcctgatgaaattttgattattccattttggggatttagggtttatgagatttcagtgaagagctaatgaatcatcaatcaccattgctttcttcttcagtactgtcacttaaaggcccattaggcccaatattctag

SEQ ID NO: 8515 - DNA, 1548 bp, Arabidopsis thaliana landsberg
gaccaaagagaaatacaagagcaggcggatcttaaatcctcacaataacaaccaagaaaacatgtaaactcaatagagatagtcaccaatttgctaactttaacaccaaactcaaaggacaatgccttgcaattctcaaatcagtaagaaacattaataatctctatgcatttaccagaaaataaattcatctcaaatctcatatgtgtcactgttatccaactgagttcactaagaaactcaaaataaacaaaatttgacaaagattacaatttctgtacttattctggagaaacaaagatccaaaaggataaatccaaaccacacacacactggtcaaagaagatatttaggagaaacccaaatccaaaaaacctaaacttgatcgatgcaaattcaaagaaatcaacatgagaattcaaaagcagcttcagagattgaaaagcgaagttttggggatctcttacctctctatccaagactgagcagaagatttgtttttctatggcggcacacgtaaccgtaactagatattttagtactagccttttgtttttaaactataaagattccatctttttttactttttacggcttttggggttttactcagtcatcatggaccaattacaaaaagatctaagaaaataaaaaataaacaagcaggcccttttaaaaagaagtatgtggtttagttatggaccatagattctttgagtccgatagattcttttcgtcagtttgataagtccatgctcgtgagattgaccgagttttatccagatgactttagttttgtggagcgtagatctcttgatcatcaacttgagatctaccttgataatgtgaaaaacgatgaaaggtttacagatttaaagtgtcttggtgatcttgctcgtgtgatggtagagacaagaaagcatctttcacatcctttggtatatcgtcttctaaagctatctttgattcttcctgttgcaacggcaactgtcgaaagatgtttttccgcgatgaattttgtgaagactacattgcgtaaccgtatcggtgatgtgttcttaagtgattgtcttgttggttatattgaaaagcaagtacttaacactgttacaaacgaatcggtgataaaacgattccaagatatgagtgaacgtagagttcatctttagagtttttatttgtaatgacattgatatgtttatagtaaagtttatcgtttcgtttattttttttttgaccccagtgagtcattgttctggctccgccactgtctataggtatgccatacattgctcggaacattctaacaaaagaagacatcgatgtctctccatttagcgttaaagtcctgaccacttttccttatgtagcttgttttatatatcatagtactagaaatgaagattccttaagtcttgacctctttgcttaagtaattgttttggtagtacggggaacgcttctataaatgaagattccggtatatatatgaagaaattatggagtgttactcaatgtataccaaccattcaaaccttgaagaaacat

SEQ ID NO: 8516 - DNA, 1194 bp, Arabidopsis thaliana landsberg
tctttgtctagcttacatcaaaagattcatcctttctttaataatctgagctcatttcaatccattacataccaacttcaaacaactctcttgtcctcgcccctcggatctgtttttcagaccaaacccatatcaaaagtttcaacatttaagctcaaaacagagccaaatcttgaatctttctcctccttgcaagttatggcagtagaagagcaaagccttgaaaacggcggatccgtacatgtggtcaaaggagaaagtaatttccgtaatgtggtgtgtggtcctgtacggtggctaaagatgttgtcttcagagcttcattggagctttgtgtttggtgtagtctcactatatggaattaaccaagggcttggtggctcattaggtcgtgtagctacagagtattatatgaaagatgttcaaaaagttcagccttctgaatctcaagctctcactgcaatcactaagattccatggatcattaaaccactttggggcattctcactgatgttcttcccatctttggtttccatagacgtccttacttcattttagcaggtaaaatctcgctcgaaatttcgatcaaagtctctttgatttctcttttaaatgtacaaaactctgtttttgtaggggtgcttggagtggtttcattgttgtttatttcactgcatagtaatctacacctttacttggcactgttttggatgacaatatcaagtgctgcaatggcgattgctgatgtaaccattgatgcttgtactgcttacaatagtatcaaacatccttctcttgcatcggatatgcagagtttatgcagtttaagctcttccattggagcacttcttggtttctttatgagtggcatcttagttcatcttgttggctctaaggttagtgaatcgtctgtctactatgatctttttcatttgtgtttcctctctaatgcttgtatttggcttgttttgcgacattagggtgtctttggattgctgacattcccatttgcgttagtatcggtagtcgggatcgtgtttagtgagccccatgttcctggtttctcttacaaacaggtaataattattctctctttggtagcttgatcatgagggtattgactcttgttgtatcatttcaggtgaaccagaaatttaccgatgcagggaaagcgatgtgaggacaatggagtg

SEQ ID NO: 8517 - DNA, 1481 bp, Arabidopsis thaliana landsberg
atcggggcagccattcaaggtggtatcctccgtggtgatgtgaaggatttgcttcttttggacgtggttcctctctcattgggtattgaaacattgggtgcagtcttcaccaagttgattccacgaaacaccactattcccacaaagaagtctcaggtaatgaatcttgacagagtacaatatcagagtgcgtctgaaaactgttgctgacttttatttttgtcattgtgatttggttcttaggttttctccacagctgctgacaaccagatgcaagtgggaatcaaagttcttcagggagaacgtgaaatggcggctgacaacaaagtgcttggagaattcgaccttgttggcatcccaccggcacctagaggaatgccacagatcgaagttacattcgacattgatgcaaatggtattactactgtctcagcgaaagacaaagcaacaggtaaagagcagaatatcacaatcagatcttcaggtggtctctcagacgatgagattaacagaatggtgaaagaagctgagcttaacgcacagaaggatcaagagaagaagcaacttatcgaccttaggaacagtgctgatacaacaatttacagtgtagagaagagcttgagtgaatacagagagaagattccagctgagattgcctctgagatcgaaactgcagtgtctgatctcaggactgctatggctggtgaggatgtcgaggacatcaaggctaaggtcgaagctgcaaacaaggcagtgtcgaagatcggagaacacatgtctaagggatctggatcatctggttccgatggaagctctggtgagggtacaagtgggactgagcagacgcctgaagctgaattcgaggaggccagtggttcaaggaagtgaggttgccgctaaccggttccatacagaaatcaggtttttcccaaaataagtttacatgcttatctcctccctcacaaatttgattagttttgtgtatttaaaaccttatttgagaggtatcatctcttcgaaacctattgagagtcccggatgtagtttgtttgattggttattttcatgaagtttacggttattatcttgaccggttaaatgagtcaatttcacataagattatgaccttttaagtttggtttatggatgaagaatggcgataattgaattgttttgtaacccttggaactttgaaagtaaaacagtttataggaaaatctgggctttgtcggtttttgtagtgcaaagaagcttgatgaaaaagacttggtcatgttgttggcgttgtcgttgtaaggcctcaaattcaattacttgtggaacttacctttgtccatgaacggagacaaagttagcgaaaatgtcagcaaattatggacatgcattttgttcctcgaaggtcgataatcttatgatctcacgcaatttccacctttttaaattgttggaacgcatattcaaaatgtgattaagaaaattaa

SEQ ID NO: 8518 - DNA, 1670 bp, Arabidopsis thaliana landsberg
tcccacaacagagattatccacagcccaatacccacctgagataccaatatatatatactagtccttgtcgcaaaacccatgatagagaaggtttcataagtagattgaataagttttgaacttatgctacaacaataccattttgtcctattaactcgaacgtatacaatatcgaattcgaacacaatcataccatgagaaatttcttcaagtcccttcctagggcaatgctccttagaataacaaaggcctggttcagctcgtttctcagtgcagaaacaatcaaaaggaaatgttcctctttaatatggatttcaggaattttaggtggagtcctggaaataaagaatttttggaacctttaagcaagagcaaagaaagagaaacgtgtagattgtaacttgaaacatggcaacaaaaaagcttacttgttcataaaggcatgagcattggacaataaaaacagggctgcgagagcgaatatcaaaatgtgacacacaagactcaagaaatgatactcaaccaattcaaacagaacccatatggcagtcgctacaccaagaacagaagctgagagttttttgtccctccacaagaacacatcagccgctgcaaacataaggcaacagtaagacaaatccaaatggtttgaaaacatagcaaaacacttattatcaacaaacataatcaatcctcatatcatatagcagatcaagcatcgacaaacgattaaaagagatgagaagaaaacgtacgtaagccaccaccgagaaccttatgaacaggcttctctctaccaaacaaacgatatatcttggccttcaaagctgacggagactctggtttctcgtgctcggaatcagacgacgacgaagagtcgtgatcgtggatcttatcagagatcttttccatcagagattcttccttgtgcatagatttctccaattcttccgccattgtcgtttacttttgtccgatttcgatccaacgtgaagcgagagagagggagagaacgaacggagaaataggtttattaggcaacttatgaacgagcctttagattcgggacccgaaccacagaaatacgttaacgacgttagtcttttttaaagaaggaataaacggacgtcaacgtttagtgcctggaacgtggaggcaaccaaggatccaacaaaggcctagtgggcctggtgcgctctgtaactcctcttttttacttacataaagtaaccgacaagcgtaaggagattccgtatacgtggcagactggcagtcatcggttcatataagaataatatcaacggctcactcgttttaaaaaaaacaaacggtcgatagaacgacgtcgtgggacatttcgtcagtgagtggcaaagtctttaactcggttagagactttctttctttctcttttttacattctttgacatttcaaacacattaaaattgcttagaaaaacatatgtttttttagtcaacgttaccgatatttaggaacatttttgtttaaatctcaaattccaactaatttgttcccatctttagagacattcatctccgacaattaatctaatctaatttgattaactacatatttgacttgactttaaagtccaaatctcgattagctaaaatataagaagatgaatgcaacagtggactttttgtt
